(19) United States
(12) Patent Application Publication
(10) Pub. No.: US 2024/0148803 A1
(43) Pub. Date: May 9, 2024

(54) USE OF IMMUNOTHERAPY AND MICROBIOME MODULATION TO TREAT CANCER

(71) Applicant: Seres Therapeutics, Inc., Cambridge, MA (US)

(72) Inventors: Christopher B. FORD, Swampscott, MA (US); Elizabethh HALVORSEN, Malden, MA (US); Christopher DESJARDINS, Somerville, MA (US); Kankana BARDHAN, Lynn, MA (US); Swarma Deepa PANDIAN, Arlington, MA (US)

(73) Assignee: Seres Therapeutics, Inc., Cambridge, MA (US)

(21) Appl. No.: 18/546,922

(22) PCT Filed: Feb. 18, 2022
(86) PCT No.: PCT/US2022/016885

§ 371 Date: Aug. 17, 2023

Related U.S. Application Data
(60) Provisional application No. 63/150,554, filed on Feb. 17, 2021.

(51) Int. Cl. A61K 35/742; A61K 35/745; A61K 45/06; A61P 35/04

(52) U.S. Cl. CPC A61K 35/742; A61K 35/745; A61K 45/06; A61P 35/04

(57) ABSTRACT

Provided herein are methods and compositions for the treatment of various types of cancers by modulating the microbiome to effect or enhance the efficacy of immunotherapy. Also provided herein are methods of determining a response to an immunotherapy by identifying if a subject has a favorable microbial profile. Further provided herein are methods of determining a donor whose feces are useful for fecal matter transfer.

### CROSS-REFERENCE TO RELATED APPLICATIONS

[0001] This application claims the priority benefit of U.S. Provisional Application No. 63/150,554, filed Feb. 17, 2021, which is incorporated by reference herein in its entirety.

### REFERENCE TO SEQUENCE LISTING SUBMITTED ELECTRONICALLY

[0002] The content of the electronically submitted sequence listing in ASCII text file (Name 4268_061PC01_Seqlisting_ST25.txt; Size: 3.58 MB (3,749,696 bytes); and Date of Creation: Feb. 17, 2022) filed with the application is incorporated herein by reference in its entirety.

### FIELD OF THE DISCLOSURE

[0003] The present disclosure relates to methods and therapeutic compositions for the treatment of various types of cancers that are useful for modulating the microbiome to effect or enhance the efficacy of immunotherapy, as well as for identifying subjects having or donors whose feces are useful for enhancing the efficacy of immunotherapy.

### BACKGROUND

[0004] Growing evidence suggests that the gut microbiome can affect outcome in cancer patients treated with immune checkpoint inhibitors (CPI), though most data is from patients with metastatic melanoma. The relationship of the gastrointestinal microbiome to treatment outcome in other cancers is poorly understood. The assessment of the gastrointestinal microbiome composition in correlation to CPI response in patients with metastatic lung, urothelial, or renal cell carcinoma, or other types of cancers is lacking.

[0005] Fecal matter transplant and designed compositions with certain individual species or consortia of species have been proposed as treatments in modulating gastrointestinal microbiomes, and thus effect or improve therapeutic responses of cancer treatments in animal models and human patients. The growing appreciation of the role of the gastrointestinal microbiomes in shaping immune responses in health and disease parallels an unmet need for microbiome therapeutic strategies to effect or enhance therapeutic responses to immunotherapies in various types of cancer.

### BRIEF SUMMARY

[0006] The disclosure relates to a therapeutic composition comprising an effective amount of a purified or isolated population of bacteria selected from Intestinimonas butyriciproducens and Anaerotruncus colihominis or bacteria having a 16S rDNA sequence having at least 97%, 98%, 98.7% or 99% sequence identity to any one 16S rDNA sequence thereof. In some aspects, the 16S rDNA sequence of Intestinimonas butyriciproducens is selected from SEQ ID NOs: 1369, 1370, 1371, 1372, 1373, 1374, 1375, 1376, 1377, 1378, 1379, 1380, 1381, 1382, 1383, 1384, 1385, 1386, 1387, 1388, 1389, 1390, 1391, 1392, 1393, and 1394, and the 16S rDNA sequence of Anaerotruncus colihominis is selected from SEQ ID NOs: 1066, 1067, 1068, 1069, 1070, 1071, 1072, 1073, 1074, 1075, 1076, 1077, 1078, 1079, 1080, 1081, 1082, 1083, 1084, and 1085.

[0007] The disclosure also relates to a therapeutic composition comprising an effective amount of a purified or isolated population of bacteria selected from Murimonas intestini and Faecalicatena orotica, or bacteria having a 16S rDNA sequence having at least 97%, 98%, 98.7% or 99% sequence identity to any one 16S rDNA sequence thereof. In some aspects, the 16S rDNA sequence of Murimonas intestini is SEQ ID NO: 1621 and the 16S rDNA sequence of Faecalicatena orotica is selected from SEQ ID NOs: 800, 801, 802, 803, 804, 805, 806, 807, 808, 809, and 810.

[0008] The disclosure also relates to a therapeutic composition comprising an effective amount of a purified or isolated population of bacteria comprising one or more bacteria selected from Anaerostipes hadrus, Christensenella timonensis, Desulfovibrio desulfuricans, Dialister invisus, Lachnoclostridium edouardi, Lachnospira pectinoschiza, Lachnospiraceae NG18_sp7, Lawsonibacter sp7, Merdimonas faecis, Negativibacillus sp1, Odoribacter splanchnicus, Roseburia faecis, Roseburia intestinalis, Ruminococcaceae NG11_sp5, Ruthenibacterium lactatiformans, or bacteria having 16S rDNA having at least 94.5%, 95%, 97%, 98%, 98.7% or 99% sequence identity to any one of the 16S rDNA thereof. In some aspects, the 16S rDNA sequence of Anaerostipes hadrus is selected from SEQ ID NOs: 1018, 1019, 1020, 1021, 1022, 1023, 1024, 1025, 1026, 1027, 1028, 1029, 1030, 1031, 1032, 1033, 1034, 1035, 1036, 1037, 1038, 1039, 1040, 1041, 1042, 1043, 1044, 1045, 1046, 1047, 1048, 1049, 1050, 1051, 1052, 1053, 1054, 1055, 1056, and 1057, the 16S rDNA sequence of Christensenella timonensis is selected from SEQ ID NOs: 1283, 1284, and 1285, the 16S rDNA sequence of Desulfovibrio desulfuricans is selected from SEQ ID NOs: 1293, 1294, 1295, and 1296, the 16S rDNA sequence of Dialister invisus is selected from SEQ ID NOs: 1297, 1298, and 1299, the 16S rDNA sequence of Lachnoclostridium edouardi is selected from SEQ ID NOs: 1405, 1406, 1407, 1408, 1409, and 1410, the 16S rDNA sequence of Lachnospira pectinoschiza is selected from SEQ ID NOs: 1411, 1412, 1413, 1414, 1415, and 1416, the 16S rDNA sequence of Lachnospiraceae NG18_sp7 is selected from SEQ ID NOs: 1419, 1420, 1421, 1422, 1423, 1424, 1425, and 1426, the 16S rDNA sequence of Lawsonibacter sp7 is selected from SEQ ID NOs: 1608, 1609, 1610, 1611, 1612, 1613, 1614, and 1615, the 16S rDNA sequence of Merdimonas faecis is SEQ ID NO: 1010, the 16S rDNA sequence of Odoribacter splanchnicus is selected from SEQ ID NOs: 1622, 1623, 1624, 1625, 1626, 1627, 1628, 1629, 1630, 1631, 1632, 1633, 1634, 1635, 1636, 1637, 1638, 1639, 1640, 1641, 1642, 1643, 1644, 1645, 1646, 1647, and 1648, the 16S rDNA sequence of Roseburia faecis is selected from SEQ ID NOs: 1696, 1697, 1698, 1699, 1700, 1701, 1702, 1703, and 1704, the 16S rDNA sequence of Roseburia intestinalis is selected from SEQ ID NOs: 1705, 1706, 1707, 1708, 1709, 1710, 1711, 1712, 1713, 1714, 1715, 1716, 1717, 1718, 1719, 1720, 1721, 1722, 1723, 1724, 1725, 1726, 1727, 1728, 1729, 1730, 1731, and 1732, or the 16S rDNA sequence of Ruthenibacterium lactatiformans is selected from SEQ ID NOs: 1733, 1734, 1735, 1736, 1737, 1738, 1739, 1740, 1741, 1742, 1743, 1744, 1745, 1746, 1747, 1748, and 1749.

[0009] In some aspects, the therapeutic composition comprises one or more bacteria selected from Anaerostipes hadrus, Dialister invisus, Merdimonas faecis, Roseburia faecis, Roseburia intestinalis, Ruminococcaceae NG11_sp5, or bacteria having 16S rDNA having at least 94.5%, 95%, 97%, 98%, 98.7% or 99% sequence identity to any one of the 16S rDNA thereof. In some aspects, the 16S rDNA sequence of Anaerostipes hadrus is selected from SEQ ID NOs: 1018, 1019, 1020, 1021, 1022, 1023, 1024, 1025, 1026, 1027, 1028, 1029, 1030, 1031, 1032, 1033, 1034, 1035, 1036, 1037, 1038, 1039, 1040, 1041, 1042, 1043, 1044, 1045, 1046, 1047, 1048, 1049, 1050, 1051, 1052, 1053, 1054, 1055, 1056, and 1057, the 16S rDNA sequence of Dialister invisus is selected from SEQ ID NOs: 1297, 1298, and 1299, the 16S rDNA sequence of Merdimonas faecis is SEQ ID NO: 1010, the 16S rDNA sequence of Roseburia faecis is selected from SEQ ID NOs: 1696, 1697, 1698, 1699, 1700, 1701, 1702, 1703, and 1704, or the 16S rDNA sequence of Roseburia intestinalis is selected from SEQ ID NOs: 1705, 1706, 1707, 1708, 1709, 1710, 1711, 1712, 1713, 1714, 1715, 1716, 1717, 1718, 1719, 1720, 1721, 1722, 1723, 1724, 1725, 1726, 1727, 1728, 1729, 1730, 1731, and 1732.

[0010] In some aspects, the therapeutic composition comprises one or more bacteria selected from Desulfovibrio desulfuricans, Roseburia intestinalis, or bacteria having 16S rDNA having at least 94.5%, 95%, 97%, 98%, 98.7% or 99% sequence identity to any one of the 16S rDNA thereof. In some aspects, the 16S rDNA sequence of Desulfovibrio desulfuricans is selected from SEQ ID NOs: 1293, 1294, 1295, and 1296 or the 16S rDNA sequence of Roseburia intestinalis is selected from SEQ ID NOs: 1705, 1706, 1707, 1708, 1709, 1710, 1711, 1712, 1713, 1714, 1715, 1716, 1717, 1718, 1719, 1720, 1721, 1722, 1723, 1724, 1725, 1726, 1727, 1728, 1729, 1730, 1731, and 1732.

[0011] In some aspects, the therapeutic composition comprises one or more bacteria selected from Lachnoclostridium edouardi, Lachnospira pectinoschiza, Lawsonibacter sp7, Odoribacter splanchnicus, Ruthenibacterium lactatiformans, or bacteria having 16S rDNA having at least 94.5%, 95%, 97%, 98%, 98.7% or 99% sequence identity to any one of the 16S rDNA thereof. In some aspects, the 16S rDNA sequence of Lachnoclostridium edouardi is selected from SEQ ID NOs: 1405, 1406, 1407, 1408, 1409, and 1410, the 16S rDNA sequence of Lachnospira pectinoschiza is selected from SEQ ID NOs: 1411, 1412, 1413, 1414, 1415, and 1416, the 16S rDNA sequence of Lawsonibacter sp7 is selected from SEQ ID NOs: 1608, 1609, 1610, 1611, 1612, 1613, 1614, and 1615, the 16S rDNA sequence of Odoribacter splanchnicus is selected from SEQ ID NOs: 1622, 1623, 1624, 1625, 1626, 1627, 1628, 1629, 1630, 1631, 1632, 1633, 1634, 1635, 1636, 1637, 1638, 1639, 1640, 1641, 1642, 1643, 1644, 1645, 1646, 1647, and 1648, or the 16S rDNA sequence of Ruthenibacterium lactatiformans is selected from SEQ ID NOs: 1733, 1734, 1735, 1736, 1737, 1738, 1739, 1740, 1741, 1742, 1743, 1744, 1745, 1746, 1747, 1748, and 1749.

[0012] The disclosure also relates to a therapeutic composition comprising an effective amount of a purified or isolated population of bacteria comprising one or more bacteria selected from Anaerotignum lactatifermentans, Anaerotruncus colihominis, Angelakisella sp1, Bacteroides cellulosilyticus, Bacteroides gallinarum, Bacteroides plebeius, Blautia coccoides group, Christensenella minuta, Christensenellaceae NG16_sp1, Clostridium hylemonae, Collinsella bouchesdurhonensis, Coprobacter secundus group, Eisenbergiella massiliensis, Emergencia timonensis, Faecalicatena orotica, Fusicatenibacter sp1, Intestinimonas butyriciproducens, Intestinimonas timonensis, Lachnospiraceae NG17_sp3, Lawsonibacter sp3, Oxalobacter formigenes, Peptoniphilaceae NG4_sp2, Prochlorotrichaceae NG20_sp1, or bacteria having a 16S rDNA sequence having at least 97%, 98%, 98.7% or 99% sequence identity to any one 16S rDNA sequence thereof. In some aspects, the 16S rDNA sequence of Anaerotignum lactatifermentans is selected from SEQ ID NOs: 1058, 1059, 1060, 1061, 1062, 1063, 1064, and 1065, the 16S rDNA sequence of Anaerotruncus colihominis is selected from SEQ ID NOs: 1066, 1067, 1068, 1069, 1070, 1071, 1072, 1073, 1074, 1075, 1076, 1077, 1078, 1079, 1080, 1081, 1082, 1083, 1084, and 1085, the 16S rDNA sequence of Bacteroides cellulosilyticus is selected from SEQ ID NOs: 1086, 1087, 1088, 1089, 1090, 1091, 1092, 1093, 1094, 1095, 1096, 1097, 1098, 1099, 1100, 1101, 1102, 1103, 1104, 1105, and 1106, the 16S rDNA sequence of Bacteroides gallinarum is selected from SEQ ID NOs: 1128 and 1129, the 16S rDNA sequence of Bacteroides plebeius is selected from SEQ ID NOs: 1136, 1137, 1138, 1139, 1140, 1141, 1142, 1143, 1144, 1145, 1146, 1147, 1148, 1149, 1150, 1151, 1152, 1153, 1154, and 1155, the 16S rDNA sequence of Blautia coccoides group is selected from SEQ ID NOs: 1219, 1220, 1221, 1222, 1223, 1224, 1225, 1226, 1227, 1228, 1229, 1230, 1231, 1232, 1233, 1234, 1235, 1236, 1237, 1238, 1239, 1240, 1241, 1242, 1243, 1244, 1245, 1246, 1247, 1248, 1249, 1250, 1251, 1252, 1253, 1254, 1255, 1256, 1257, 1258, 1259, 1260, 1261, 1262, 1263, 1264, 1265, 1266, 1267, 1268, 1269, 1270, 1271, and 1272, the 16S rDNA sequence of Christensenella minuta is selected from SEQ ID NOs: 1275, 1276, 1277, 1278, 1279, 1280, 1281, and 1282, the 16S rDNA sequence of Christensenellaceae NG16_sp1 is selected from SEQ ID NOs: 1286, 1287, and 1288, the 16S rDNA sequence of Clostridium hylemonae is selected from SEQ ID NOs: 790, 791, 792, 793, 794, 795, and 796, the 16S rDNA sequence of Collinsella bouchesdurhonensis is selected from SEQ ID NOs: 1289, 1290, 1291, and 1292, the 16S rDNA sequence of Coprobacter secundus group is selected from SEQ ID NOs: 797, 798, and 799, the 16S rDNA sequence of Eisenbergiella massiliensis is selected from SEQ ID NOs: 1300, 1301, 1302, 1303, 1304, 1305, 1306, 1307, and 1308, the 16S rDNA sequence of Emergencia timonensis is selected from SEQ ID NOs: 1309, 1310, 1311, 1312, 1313, 1314, 1315, 1316, 1317, 1318, 1319, and 1320, the 16S rDNA sequence of Faecalicatena orotica is selected from SEQ ID NOs: 800, 801, 802, 803, 804, 805, 806, 807, 808, 809, and 810, the 16S rDNA sequence of Fusicatenibacter sp1 is selected from SEQ ID NOs: 1350, 1351, 1352, 1353, 1354, and 1355, the 16S rDNA sequence of Intestinimonas butyriciproducens is selected from SEQ ID NOs: 1369, 1370, 1371, 1372, 1373, 1374, 1375, 1376, 1377, 1378, 1379, 1380, 1381, 1382, 1383, 1384, 1385, 1386, 1387, 1388, 1389, 1390, 1391, 1392, 1393, and 1394, the 16S rDNA sequence of Intestinimonas timonensis is selected from SEQ ID NOs: 1403 and, 1404, the 16S rDNA sequence of Lachnospiraceae NG17_sp3 is selected from SEQ ID NOs: 1417 and 1418, the 16S rDNA sequence of Lawsonibacter sp3 is selected from SEQ ID NOs: 1604, 1605, 1606, and 1607, the 16S rDNA sequence of Oxalobacter formigenes is selected from SEQ ID NOs: 1649, 1650, 1651, 1652, and 1653, the 16S rDNA sequence of Peptoniphilaceae NG4_sp2 is SEQ ID NO: 172, or the 16S rDNA sequence of Prochlorotrichaceae NG20_sp1 is SEQ ID NO: 1661.

[0013] In some aspects, the therapeutic composition comprises two, three, four, five, six, seven, eight, nine, ten, eleven, twelve, thirteen, fourteen, fifteen, sixteen, seventeen, eighteen or more bacterial species.

[0014] In some aspects, the therapeutic composition does not comprise one or more bacteria selected from Actinomycetaceae_NG7 sp1, Allisonella histaminiformans, Bacteroides coprocola, Bacteroides faecis, Bacteroides massiliensis, Bifidobacterium animalis, Clostridium asparagiforme group, Desulfovibrionaceae NG5_sp1, Faecalibacterium prausnitzii, Gemmiger sp2, Granulicatella adiacens, Intestinimonas massiliensis, Lactobacillus delbrueckii, Lactobacillus paracasei, Lactobacillus reuteri, Lactococcus lactis, Marvinbryantia sp5, Prevotella buccalis, Propionibacterium freudenreichii, Ruminococcaceae NG18_sp7, Scardovia wiggsiae, Slackia isoflavoniconvertens, Thermodesulfobiaceae NG1_sp1, or bacteria having 16S rDNA having at least 94.5%, 95%, 97%, 98%, 98.7% or 99% sequence identity to any one of the 16S rDNA thereof. In some aspects, the 16S rDNA sequence of Actinomycetaceae_NG7 sp1 is selected from SEQ ID NOs: 1011, 1012, 1013, 1014, 1015, 1016, and 1017, the 16S rDNA sequence of Allisonella histaminiformans is SEQ ID NO: 774, the 16S rDNA sequence of Bacteroides coprocola is selected from SEQ ID NOs: 1107, 1108, 1109, 1110, 1111, and 1112, the 16S rDNA sequence of Bacteroides faecis is selected from SEQ ID NOs: 1113, 1114, 1115, 1116, 1117, 1118, 1119, 1120, 1121, 1122, 1123, 1124, 1125, 1126, and 1127, the 16S rDNA sequence of Bacteroides massiliensis is selected from SEQ ID NOs: 1130, 1131, 1132, 1133, 1134, and 1135, the 16S rDNA sequence of Bifidobacterium animalis is selected from SEQ ID NOs: 1156, 1157, 1158, 1159, 1160, 1161, 1162, 1163, 1164, 1165, 1166, 1167, 1168, 1169, 1170, 1171, 1172, 1173, 1174, 1175, 1176, 1177, 1178, 1179, 1180, 1181, 1182, 1183, 1184, 1185, 1186, 1187, 1188, 1189, 1190, 1191, 1192, 1193, 1194, 1195, 1196, 1197, 1198, 1199, 1200, 1201, 1202, 1203, 1204, 1205, 1206, 1207, 1208, 1209, 1210, 1211, 1212, 1213, 1214, 1215, 1216, 1217, and 1218, the 16S rDNA sequence of Clostridium asparagiforme group is selected from SEQ ID NOs: 775, 776, 777, 778, 779, 780, 781, 782, 783, 784, 785, 786, 787, 788, and 789, the 16S rDNA sequence of Faecalibacterium prausnitzii is selected from SEQ ID NOs: 1321, 1322, 1323, 1324, 1325, 1326, 1327, 1328, 1329, 1330, 1331, 1332, 1333, 1334, 1335, 1336, 1337, 1338, 1339, 1340, 1341, 1342, 1343, 1344, 1345, 1346, 1347, 1348, and 1349, the 16S rDNA sequence of Gemmiger sp2 is selected from SEQ ID NOs: 1356, 1357, 1358, 1359, 1360, 1361, and 1362, the 16S rDNA sequence of Granulicatella adiacens is selected from SEQ ID NOs: 1363, 1364, 1365, 1366, 1367, and 1368, the 16S rDNA sequence of Intestinimonas massiliensis is selected from SEQ ID NOs: 1395, 1396, 1397, 1398, 1399, 1400, 1401, and 1402, the 16S rDNA sequence of Lactobacillus delbrueckii is selected from SEQ ID NOs: 1427, 1428, 1429, 1430, 1431, 1432, 1433, 1434, 1435, 1436, 1437, 1438, 1439, 1440, 1441, 1442, 1443, 1444, 1445, 1446, 1447, 1448, 1449, 1450, 1451, 1452, 1453, 1454, 1455, 1456, 1457, 1458, 1459, 1460, 1461, 1462, 1463, 1464, 1465, 1466, 1467, 1468, 1469, 1470, 1471, 1472, 1473, 1474, 1475, 1476, 1477, 1478, 1479, 1480, 1481, 1482, 1483, 1484, 1485, 1486, 1487, 1488, 1489, 1490, 1491, 1492, 1493, 1494, 1495, 1496, 1497, 1498, 1499, 1500, 1501, 1502, 1503, 1504, and 1505, the 16S rDNA sequence of Lactobacillus reuteri is selected from SEQ ID NOs: 931, 932, 933, 934, 935, 936, 937, 938, 939, 940, 941, 942, 943, 944, 945, 946, 947, 948, 949, 950, 951, 952, 953, 954, 955, 956, 957, 958, 959, 960, 961, 962, 963, 964, 965, 966, 967, 968, 969, 970, 971, 972, 973, 974, 975, 976, 977, 978, 979, 980, 981, 982, 983, 984, 985, 986, 987, 988, 989, 990, 991, 992, 993, 994, 995, 996, 997, 998, 999, 1000, 1001, 1002, 1003, 1004, 1005, 1006, 1007, 1008, and 1009, the 16S rDNA sequence of Lactococcus lactis is selected from SEQ ID NOs: 1506, 1507, 1508, 1509, 1510, 1511, 1512, 1513, 1514, 1515, 1516, 1517, 1518, 1519, 1520, 1521, 1522, 1523, 1524, 1525, 1526, 1527, 1528, 1529, 1530, 1531, 1532, 1533, 1534, 1535, 1536, 1537, 1538, 1539, 1540, 1541, 1542, 1543, 1544, 1545, 1546, 1547, 1548, 1549, 1550, 1551, 1552, 1553, 1554, 1555, 1556, 1557, 1558, 1559, 1560, 1561, 1562, 1563, 1564, 1565, 1566, 1567, 1568, 1569, 1570, 1571, 1572, 1573, 1574, 1575, 1576, 1577, 1578, 1579, 1580, 1581, 1582, 1583, 1584, 1585, 1586, 1587, 1588, 1589, 1590, 1591, 1592, 1593, 1594, 1595, 1596, 1597, 1598, 1599, 1600, 1601, 1602, and 1603, the 16S rDNA sequence of Marvinbryantia sp5 is selected from SEQ ID NOs: 1616, 1617, 1618, 1619, and 1620, the 16S rDNA sequence of Prevotella buccalis is selected from SEQ ID NOs: 1654, 1655, 1656, 1657, 1658, 1659, and 1660, the 16S rDNA sequence of Propionibacterium freudenreichii is selected from SEQ ID NOs: 1662, 1663, 1664, 1665, 1666, 1667, 1668, 1669, 1670, 1671, 1672, 1673, 1674, 1675, 1676, 1677, 1678, 1679, 1680, 1681, 1682, 1683, 1684, 1685, 1686, 1687, 1688, 1689, 1690, 1691, 1692, 1693, 1694, and 1695, the 16S rDNA sequence of Scardovia wiggsiae is selected from SEQ ID NOs: 1750, 1751, 1752, 1753, and 1754, or the 16S rDNA sequence of Slackia isoflavoniconvertens is selected from SEQ ID NOs: 1755 and 1756.

[0015] In some aspects, the therapeutic composition does not comprise Allisonella histaminiformans, Bacteroides faecis, Bacteroides massiliensis, Desulfovibrionaceae NG5_sp1, Gemmiger sp2, Intestinimonas massiliensis, Marvinbryantia sp5, Propionibacterium freudenreichii, Slackia isoflavoniconvertens, Thermodesulfobiaceae NG1_sp1, or bacteria having 16S rDNA having at least 94.5%, 95%, 97%, 98%, 98.7% or 99% sequence identity to any one of the 16S rDNA thereof. In some aspects, the 16S rDNA sequence of Allisonella histaminiformans is SEQ ID NO: 774, the 16S rDNA sequence of Bacteroides faecis is selected from SEQ ID NOs: 1113, 1114, 1115, 1116, 1117, 1118, 1119, 1120, 1121, 1122, 1123, 1124, 1125, 1126, and 1127, the 16S rDNA sequence of Bacteroides massiliensis is selected from SEQ ID NOs: 1130, 1131, 1132, 1133, 1134, and 1135, the 16S rDNA sequence of Gemmiger sp2 is selected from SEQ ID NOs: 1356, 1357, 1358, 1359, 1360, 1361, and 1362, the 16S rDNA sequence of Intestinimonas massiliensis is selected from SEQ ID NOs: 1395, 1396, 1397, 1398, 1399, 1400, 1401, and 1402, the 16S rDNA sequence of Marvinbryantia sp5 is selected from SEQ ID NOs: 1616, 1617, 1618, 1619, and 1620, the 16S rDNA sequence of Propionibacterium freudenreichii is selected from SEQ ID NOs: 1662, 1663, 1664, 1665, 1666, 1667, 1668, 1669, 1670, 1671, 1672, 1673, 1674, 1675, 1676, 1677, 1678, 1679, 1680, 1681, 1682, 1683, 1684, 1685, 1686, 1687, 1688, 1689, 1690, 1691, 1692, 1693, 1694, and 1695, or the 16S rDNA sequence of Slackia isoflavoniconvertens is selected from SEQ ID NOs: 1755 and 1756.

[0016] In some aspects, the therapeutic composition does not comprise Bifidobacterium animalis, Faecalibacterium prausnitzii, or bacteria having 16S rDNA having at least 94.5%, 95%, 97%, 98%, 98.7% or 99% sequence identity to any one of the 16S rDNA thereof. In some aspects, the 16S rDNA sequence of Bifidobacterium animalis is selected from SEQ ID NOs: 1156, 1157, 1158, 1159, 1160, 1161, 1162, 1163, 1164, 1165, 1166, 1167, 1168, 1169, 1170, 1171, 1172, 1173, 1174, 1175, 1176, 1177, 1178, 1179, 1180, 1181, 1182, 1183, 1184, 1185, 1186, 1187, 1188, 1189, 1190, 1191, 1192, 1193, 1194, 1195, 1196, 1197, 1198, 1199, 1200, 1201, 1202, 1203, 1204, 1205, 1206, 1207, 1208, 1209, 1210, 1211, 1212, 1213, 1214, 1215, 1216, 1217, and 1218, or the 16S rDNA sequence of Faecalibacterium prausnitzii is selected from SEQ ID NOs: 1321, 1322, 1323, 1324, 1325, 1326, 1327, 1328, 1329, 1330, 1331, 1332, 1333, 1334, 1335, 1336, 1337, 1338, 1339, 1340, 1341, 1342, 1343, 1344, 1345, 1346, 1347, 1348, and 1349.

[0017] In some aspects, the therapeutic composition does not comprise Granulicatella adiacens, Lactococcus lactis, Scardovia wiggsiae, or bacteria having 16S rDNA having at least 94.5%, 95%, 97%, 98%, 98.7% or 99% sequence identity to any one of the 16S rDNA thereof. In some aspects, the 16S rDNA sequence of Granulicatella adiacens is selected from SEQ ID NOs: 1363, 1364, 1365, 1366, 1367, and 1368, the 16S rDNA sequence of Lactococcus lactis is selected from SEQ ID NOs: 1506, 1507, 1508, 1509, 1510, 1511, 1512, 1513, 1514, 1515, 1516, 1517, 1518, 1519, 1520, 1521, 1522, 1523, 1524, 1525, 1526, 1527, 1528, 1529, 1530, 1531, 1532, 1533, 1534, 1535, 1536, 1537, 1538, 1539, 1540, 1541, 1542, 1543, 1544, 1545, 1546, 1547, 1548, 1549, 1550, 1551, 1552, 1553, 1554, 1555, 1556, 1557, 1558, 1559, 1560, 1561, 1562, 1563, 1564, 1565, 1566, 1567, 1568, 1569, 1570, 1571, 1572, 1573, 1574, 1575, 1576, 1577, 1578, 1579, 1580, 1581, 1582, 1583, 1584, 1585, 1586, 1587, 1588, 1589, 1590, 1591, 1592, 1593, 1594, 1595, 1596, 1597, 1598, 1599, 1600, 1601, 1602, and 1603, or the 16S rDNA sequence of Scardovia wiggsiae is selected from SEQ ID NOs: 1750, 1751, 1752, 1753, and 1754.

[0018] The disclosure also relates to a therapeutic composition comprising an effective amount of a purified or isolated population of bacteria that have 16S rDNA sequence identity of at least 94.5% to 16S rDNA sequences of species belonging to one or more of the families Sutterellaceae, Coriobacteriaceae, Akkermansiaceae, Desulfovibrionaceae, Odoribacteraceae, or Rikenellaceae. In some aspects, the bacteria have 16S rDNA sequence identity of at least 95%, 97%, 98%, 98.7% or 99% to 16S rDNA sequences of species belonging to one or more of the families Sutterellaceae, Coriobacteriaceae, Akkermansiaceae, Desulfovibrionaceae, Odoribacteraceae, or Rikenellaceae. In some aspects, the therapeutic composition comprises bacteria belonging to two, three, four or more families.

[0019] The disclosure also relates to a therapeutic composition comprising an effective amount of a purified or isolated population of bacteria comprising one or more bacteria selected from Akkermansia muciniphila, Dysosmobacter welbionis, Anaerobutyricum hallii, Blautia caecimuris, Holdemania filiformis, Acetatifactor sp1, Ruminococcaceae NG14 sp1, Hungatella sp2, Bifidobacterium catenulatum group, Blautia wexlerae, Hungatella sp1, Intestinibacter bartlettii, Lachnospiraceae NG31 sp1, Lactonifactor longoviformis, Leuconostoc gelidum, Sutterella wadsworthensis, [Extibacter] muris, Alistipes onderdonkii, Collinsella intestinalis, Collinsella stercoris, Muricomes sp1, Neobitarella massiliensis, Prevotellamassilia sp2, Ruminococcaceae NG33 sp1, [Adlercreutzia] equolifaciens group, [Anaerotruncus] rubiinfantis, [Romboutsia] timonensis, Alistipes finegoldii, Alistipes indistinctus, Alistipes obesi, Alistipes putredinis, Alistipes shahii, Anaerofustis stercorihominis, Anaeromassilibacillus sp3, Barnesiella intestinihominis, Bilophila wadsworthia, Blautia faecis, Coriobacteriaceae NG5 sp1, Frisingicoccus sp3, Gordonibacter pamelaeae, Harryflintia acetispora, Lachnospiraceae NG29 sp1, Marvinbryantia sp8, Massilimaliae massiliensis, Massilimaliae timonensis, Neglecta timonensis, Parabacteroides merdae, Peptoniphilaceae NG4 sp1, Peptoniphilaceae NG4 sp3, Pseudoflavonifractor capillosus, Ruminococcaceae NG12 sp1, Ruminococcaceae NG15 sp3, Ruminococcaceae NG17 sp3, Ruthenibacterium sp1, Anaerostipes hadrus, Christensenella timonensis, Desulfovibrio desulfuricans, Dialister invisus, Lachnoclostridium edouardi, Lachnospira pectinoschiza, Lachnospiraceae NG18_sp7, Lawsonibacter sp7, Merdimonas faecis, Negativibacillus sp1, Odoribacter splanchnicus, Roseburia faecis, Roseburia intestinalis, Ruminococcaceae NG11_sp5, Ruthenibacterium lactatiformans, or bacteria having 16S rDNA having at least 94.5%, 95%, 97%, 98%, 98.7% or 99% sequence identity to any one of the 16S rDNA thereof.

[0020] In some aspects of the therapeutic composition, the bacteria comprises one or more bacteria selected from Akkermansia muciniphila, Dysosmobacter welbionis, Anaerobutyricum hallii, Blautia caecimuris, Holdemania filiformis, or bacteria having 16S rDNA having at least 94.5%, 95%, 97%, 98%, 98.7% or 99% sequence identity to any one of the 16S rDNA thereof. In some aspects, the bacteria comprises one or more bacteria selected from Acetatifactor sp1, Blautia wexlerae, Ruminococcaceae NG14 sp1, Hungatella sp2, Holdemania filiformis, or bacteria having 16S rDNA having at least 94.5%, 95%, 97%, 98%, 98.7% or 99% sequence identity to any one of the 16S rDNA thereof.

[0021] In some aspects of the therapeutic composition, the bacteria comprises one or more bacteria selected from Bifidobacterium catenulatum group, Blautia wexlerae, Hungatella sp1, Intestinibacter bartlettii, Lachnospiraceae NG31 sp1, Lactonifactor longoviformis, Leuconostoc gelidum, Sutterella wadsworthensis, Anaerostipes hadrus, Dialister invisus, Merdimonas faecis, Roseburia faecis, Roseburia intestinalis, Ruminococcaceae NG11_sp5, or bacteria having 16S rDNA having at least 94.5%, 95%, 97%, 98%, 98.7% or 99% sequence identity to any one of the 16S rDNA thereof.

[0022] In some aspects of the therapeutic composition, the bacteria comprises one or more bacteria selected from [Extibacter] muris, Alistipes onderdonkii, Collinsella intestinalis, Collinsella stercoris, Muricomes sp1, Neobitarella massiliensis, Prevotellamassilia sp2, Ruminococcaceae NG33 sp1, Desulfovibrio desulfuricans, Roseburia intestinalis, or bacteria having 16S rDNA having at least 94.5%, 95%, 97%, 98%, 98.7% or 99% sequence identity to any one of the 16S rDNA thereof.

[0023] In some aspects of the therapeutic composition, the bacteria comprises one or more bacteria selected from [Adlercreutzia] equolifaciens group, [Anaerotruncus]rubiinfantis, [Romboutsia] timonensis, Alistipes finegoldii, Alistipes indistinctus, Alistipes obesi, Alistipes putredinis, Alistipes shahii, Anaerofustis stercorihominis, Anaeromassilibacillus sp3, Barnesiella intestinihominis, Bilophila wadsworthia, Blautia faecis, Coriobacteriaceae NG5 sp1, Frisingicoccus sp3, Gordonibacter pamelaeae, Harryflintia acetispora, Lachnospiraceae NG29 sp1, Marvinbryantia sp8, Massilimaliae massiliensis, Massilimaliae timonensis, Neglecta timonensis, Parabacteroides merdae, Peptoniphilaceae NG4 sp1, Peptoniphilaceae NG4 sp3, Pseudoflavonifractor capillosus, Ruminococcaceae NG12 sp1, Ruminococcaceae NG15 sp3, Ruminococcaceae NG17 sp3, Ruthenibacterium sp1, Lachnoclostridium edouardi, Lachnospira pectinoschiza, Lawsonibacter sp7, Odoribacter splanchnicus, Ruthenibacterium lactatiformans, or bacteria having 16S rDNA having at least 94.5%, 95%, 97%, 98%, 98.7% or 99% sequence identity to any one of the 16S rDNA thereof.

[0024] The disclosure also relates to a therapeutic composition comprising a purified population of bacteria, wherein the purified or isolated population of bacteria comprises one or more bacteria having a 16S rDNA sequence that is at least 85%, at least 90%, at least 95%, at least 96%, at least 97%, at least 98%, at least 99%, or 100% identical to a 16S rDNA sequence set forth in SEQ ID NOs: 1, 2, 3, 4, 5, 6, 7, 8, 9, 10, 11, 12, 13, 14, 15, 16, 17, 18, 19, 20, 21, 22, 23, 24, 25, 26, 27, 28, 29, 30, 31, 32, 33, 34, 35, 36, 37, 38, 39, 40, 41, 42, 43, 44, 45, 46, 47, 48, 49, 50, 51, 52, 53, 54, 55, 56, 57, 58, 59, 60, 61, 62, 63, 64, 65, 66, 67, 68, 69, 70, 71, 72, 73, 74, 75, 76, 77, 78, 79, 80, 81, 82, 83, 84, 85, 86, 87, 88, 89, 90, 91, 92, 93, 94, 95, 96, 97, 98, 99, 100, 101, 102, 103, 104, 105, 106, 107, 108, 109, 110, 111, 112, 113, 114, 115, 116, 117, 118, 119, 120, 121, 122, 123, 124, 125, 126, 127, 128, 129, 130, 131, 132, 133, 134, 135, 136, 137, 138, 139, 140, 141, 142, 143, 144, 145, 146, 147, 148, 149, 150, 151, 152, 153, 154, 155, 156, 157, 158, 159, 160, 161, 162, 163, 164, 165, 166, 167, 168, 169, 170, 171, 172, 173, 174, 175, 176, 177, 178, 179, 180, 181, 182, 183, 184, 185, 186, 601, 602, 603, 604, 605, 606, 607, 613, 614, 615, 616, 617, 618, 619, 622, 623, 640, 641, 643, 662, 663, 664, 665, 666, 667, 675, 676, 681, 688, 690, 691, 693, 696, 697, 699, 700, 702, 703, 704, 705, 706, 707, 708, 709, 710, 711, 712, 713, 714, 715, 716, 717, 718, 719, 720, 721, 722, 723, 724, 725, 726, 727, 728, 729, 730, 732, 733, 734, 735, 736, 737, 738, 739, 740, 741, 742, 743, 744, 746, 747, 748, 749, 750, 751, 752, 753, 754, 755, 756, 757, 758, 759, 760, 761, 762, 763, 765, 766, 767, 768, 769, 770, 771, 772, 773, 1018, 1019, 1020, 1021, 1022, 1023, 1024, 1025, 1026, 1027, 1028, 1029, 1030, 1031, 1032, 1033, 1034, 1035, 1036, 1037, 1038, 1039, 1040, 1041, 1042, 1043, 1044, 1045, 1046, 1047, 1048, 1049, 1050, 1051, 1052, 1053, 1054, 1055, 1056, 1057, 1283, 1284, 1285, 1293, 1294, 1295, 1296, 1297, 1298, 1299, 1405, 1406, 1407, 1408, 1409, 1410, 1411, 1412, 1413, 1414, 1415, 1416, 1419, 1420, 1421, 1422, 1423, 1424, 1425, 1426, 1608, 1609, 1610, 1611, 1612, 1613, 1614, 1615, 1010, 1622, 1623, 1624, 1625, 1626, 1627, 1628, 1629, 1630, 1631, 1632, 1633, 1634, 1635, 1636, 1637, 1638, 1639, 1640, 1641, 1642, 1643, 1644, 1645, 1646, 1647, 1648, 1696, 1697, 1698, 1699, 1700, 1701, 1702, 1703, 1704, 1705, 1706, 1707, 1708, 1709, 1710, 1711, 1712, 1713, 1714, 1715, 1716, 1717, 1718, 1719, 1720, 1721, 1722, 1723, 1724, 1725, 1726, 1727, 1728, 1729, 1730, 1731, 1732, 1733, 1734, 1735, 1736, 1737, 1738, 1739, 1740, 1741, 1742, 1743, 1744, 1745, 1746, 1747, 1748, and 1749.

[0025] In some aspects of the therapeutic composition, the bacteria comprises one or more bacteria having a 16S rDNA sequence that is at least 85%, at least 90%, at least 95%, at least 96%, at least 97%, at least 98%, at least 99%, or 100% identical to a 16S rDNA sequence set forth in SEQ ID NOs: 605, 613, 640, 641, 643, 662, 663, 664, 665, 666, 667, 681, 688, 690, 703, 732, 733, 736, 737, 738, 739, 740, 741, 742, 743, 744, 749, 754, 755, 756, 758, 765, 766, 767 and 773.

[0026] In some aspects of the therapeutic composition, the bacteria comprises one or more bacteria having a 16S rDNA sequence that is at least 85%, at least 90%, at least 95%, at least 96%, at least 97%, at least 98%, at least 99%, or 100% identical to a 16S rDNA sequence set forth in SEQ ID NOs: 601, 602, 603, 604, 606, 607, 613, 614, 615, 616, 617, 618, 619, 622, 623, 675, 676, 681, 691, 693, 696, 697, 699, 700, 702, 704, 705, 706, 707, 708, 709, 710, 711, 712, 713, 714, 715, 716, 717, 718, 719, 720, 721, 722, 723, 724, 725, 726, 727, 728, 729, 730, 734, 735, 736, 746, 747, 748, 749, 750, 751, 752, 753, 757, 759, 760, 761, 762, 763, 768, 769, 770, 771 and 772.

[0027] In some aspects of the therapeutic composition, the bacteria comprises one or more bacteria having a 16S rDNA sequence that is at least 85%, at least 90%, at least 95%, at least 96%, at least 97%, at least 98%, at least 99%, or 100% identical to a 16S rDNA sequence set forth in SEQ ID NOs: 2, 3, 6, 10, 12, 13, 19, 20, 21, 22, 23, 24, 34, 37, 38, 39, 42, 43, 44, 45, 46, 47, 48, 50, 51, 52, 55, 57, 58, 59, 64, 65, 66, 67, 73, 74, 75, 80, 82, 83, 84, 85, 86, 87, 88, 89, 90, 91, 92, 93, 94, 95, 96, 97, 98, 99, 100, 101, 104, 105, 106, 107, 108, 109, 110, 111, 112, 114, 115, 116, 120, 123, 129, 135, 136, 138, 139, 140, 141, 142, 143, 145, 146, 148, 153, 156, 157, 158, 161, 168, 169, 170, 173, 176, 178, 180, 182, 1018, 1019, 1020, 1021, 1022, 1023, 1024, 1025, 1026, 1027, 1028, 1029, 1030, 1031, 1032, 1033, 1034, 1035, 1036, 1037, 1038, 1039, 1040, 1041, 1042, 1043, 1044, 1045, 1046, 1047, 1048, 1049, 1050, 1051, 1052, 1053, 1054, 1055, 1056, 1057, 1297, 1298, 1299, 1010, 1696, 1697, 1698, 1699, 1700, 1701, 1702, 1703, 1704, 1705, 1706, 1707, 1708, 1709, 1710, 1711, 1712, 1713, 1714, 1715, 1716, 1717, 1718, 1719, 1720, 1721, 1722, 1723, 1724, 1725, 1726, 1727, 1728, 1729, 1730, 1731, and 1732.

[0028] In some aspects of the therapeutic composition, the bacteria comprises one or more bacteria having a 16S rDNA sequence that is at least 85%, at least 90%, at least 95%, at least 96%, at least 97%, at least 98%, at least 99%, or 100% identical to a 16S rDNA sequence set forth in SEQ ID NOs: 16, 17, 18, 53, 54, 60, 77, 79, 81, 103, 119, 125, 132, 133, 134, 164, 175, 179, 184, 1293, 1294, 1295, 1296, 1705, 1706, 1707, 1708, 1709, 1710, 1711, 1712, 1713, 1714, 1715, 1716, 1717, 1718, 1719, 1720, 1721, 1722, 1723, 1724, 1725, 1726, 1727, 1728, 1729, 1730, 1731, and 1732.

[0029] In some aspects of the therapeutic composition, the bacteria comprises one or more bacteria having a 16S rDNA sequence that is at least 85%, at least 90%, at least 95%, at least 96%, at least 97%, at least 98%, at least 99%, or 100% identical to a 16S rDNA sequence set forth in SEQ ID NOs: 1, 4, 5, 7, 8, 9, 11, 14, 15, 25, 26, 27, 28, 29, 30, 31, 32, 33, 35, 36, 40, 41, 61, 62, 68, 69, 70, 71, 72, 76, 78, 117, 118, 121, 122, 124, 127, 128, 130, 131, 137, 144, 147, 149, 150, 151, 152, 154, 155, 159, 160, 162, 163, 165, 166, 167, 171, 174, 177, 181, 183, 186, 1405, 1406, 1407, 1408, 1409, 1410, 1411, 1412, 1413, 1414, 1415, 1416, 1608, 1609, 1610, 1611, 1612, 1613, 1614, 1615, 1622, 1623, 1624, 1625, 1626, 1627, 1628, 1629, 1630, 1631, 1632, 1633, 1634, 1635, 1636, 1637, 1638, 1639, 1640, 1641, 1642, 1643, 1644, 1645, 1646, 1647, 1648, 1733, 1734, 1735, 1736, 1737, 1738, 1739, 1740, 1741, 1742, 1743, 1744, 1745, 1746, 1747, 1748, and 1749.

[0030] In some aspects, the therapeutic composition comprises two, three, four, five, six, seven, eight, nine, ten, eleven, twelve, thirteen, fourteen, fifteen, sixteen, seventeen, eighteen or more bacterial species.

[0031] In some aspects of the therapeutic composition, the therapeutic composition does not comprise one or more bacteria selected from Holdemania massiliensis, Rothia mucilaginosa, Hungatella sp2, Prevotella copri, Campylobacter concisus, [Atopobium]parvulum, Alistipes onderdonkii, Angelakisella massiliensis, Christensenellaceae NG5 sp2, Cuneatibacter caecimuris, Desulfovibrio fairfieldensis, Ruminococcaceae NG13 sp1, Ruminococcaceae NG16 sp1, [Coprococcus] catus, [Lactobacillus] fermentum, [Romboutsia] timonensis, [Ruminococcus] bromii, [Ruminococcus] gauvreaui, Actinomyces graevenitzii, Agathobaculum butyriciproducens group, Bacteroides caccae, Bacteroides intestinalis, Bittarella massiliensis, Blautia luti group, Clostridium saudiense, Corynebacterium durum, Fusicatenibacter sp2, Lachnospiraceae NG30 sp3, Massilimaliae sp1, Monoglobus pectinilyticus, Rothia dentocariosa, Rothia mucilaginosa, Ruminococcaceae NG17 sp1, Schaalia odontolytica, Streptococcus australis, Streptococcus gordonii, Streptococcus infantis group, Streptococcus parasanguinis, Streptococcus salivarius group, [Atopobium] parvulum, [Ruminococcus] gnavus, Bacteroides dorei group, Blautia sp1, Schaalia sp2, Actinomycetaceae_NG7 sp1, Allisonella histaminiformans, Bacteroides coprocola, Bacteroides faecis, Bacteroides massiliensis, Bifidobacterium animalis, Clostridium asparagiforme group, Desulfovibrionaceae NG5_sp1, Faecalibacterium prausnitzii, Gemmiger sp2, Granulicatella adiacens, Intestinimonas massiliensis, Lactobacillus delbrueckii, Lactobacillus paracasei, Lactobacillus reuteri, Lactococcus lactis, Marvinbryantia sp5, Prevotella buccalis, Propionibacterium freudenreichii, Ruminococcaceae NG18_sp7, Scardovia wiggsiae, Slackia isoflavoniconvertens, Thermodesulfobiaceae NG1_sp1, or bacteria having 16S rDNA having at least 94.5%, 95%, 97%, 98%, 98.7% or 99% sequence identity to any one of the 16S rDNA thereof.

[0032] In some aspects of the therapeutic composition, the therapeutic composition does not comprise Holdemania massiliensis, Rothia mucilaginosa, Hungatella sp2, Prevotella copri, Campylobacter concisus, or bacteria having 16S rDNA having at least 94.5%, 95%, 97%, 98%, 98.7% or 99% sequence identity to any one of the 16S rDNA thereof.

[0033] In some aspects of the therapeutic composition, the therapeutic composition does not comprise Rothia mucilaginosa, [Atopobium]parvulum, Holdemania massiliensis, Prevotella copri, Campylobacter concisus, or bacteria having 16S rDNA having at least 94.5%, 95%, 97%, 98%, 98.7% or 99% sequence identity to any one of the 16S rDNA thereof.

[0034] In some aspects of the therapeutic composition, the therapeutic composition does not comprise Alistipes onderdonkii, Angelakisella massiliensis, Christensenellaceae NG5 sp2, Cuneatibacter caecimuris, Desulfovibrio fairfieldensis, Ruminococcaceae NG13 sp1, Ruminococcaceae NG16 sp1, Bifidobacterium animalis, Faecalibacterium prausnitzii, or bacteria having 16S rDNA having at least 94.5%, 95%, 97%, 98%, 98.7% or 99% sequence identity to any one of the 16S rDNA thereof.

[0035] In some aspects of the therapeutic composition, the therapeutic composition does not comprise [Coprococcus] catus, [Lactobacillus] fermentum, [Romboutsia] timonensis, [Ruminococcus] bromii, [Ruminococcus] gauvreauii, Actinomyces graevenitzii, Agathobaculum butyriciproducens group, Bacteroides caccae, Bacteroides intestinalis, Bittarella massiliensis, Blautia luti group, Clostridium saudiense, Corynebacterium durum, Fusicatenibacter sp2, Lachnospiraceae NG30 sp3, Massilimaliae sp1, Monoglobus pectinilyticus, Rothia dentocariosa, Rothia mucilaginosa, Ruminococcaceae NG17 sp1, Schaalia odontolytica, Streptococcus australis, Streptococcus gordonii, Streptococcus infantis group, Streptococcus parasanguinis, Streptococcus salivarius group, Allisonella histaminiformans, Bacteroides faecis, Bacteroides massiliensis, Desulfovibrionaceae NG5_sp1, Gemmiger sp2, Intestinimonas massiliensis, Marvinbryantia sp5, Propionibacterium freudenreichii, Slackia isoflavoniconvertens, Thermodesulfobiaceae NG1_sp1, or bacteria having 16S rDNA having at least 94.5%, 95%, 97%, 98%, 98.7% or 99% sequence identity to any one of the 16S rDNA thereof.

[0036] In some aspects of the therapeutic composition, the therapeutic composition does not comprise [Atopobium] parvulum, [Ruminococcus] gnavus, Bacteroides dorei group, Blautia sp1, Schaalia sp2, Granulicatella adiacens, Lactococcus lactis, Scardovia wiggsiae, or bacteria having 16S rDNA having at least 94.5%, 95%, 97%, 98%, 98.7% or 99% sequence identity to any one of the 16S rDNA thereof.

[0037] In some aspects of the therapeutic composition, the therapeutic composition does not comprise one or more bacteria having a 16S rDNA sequence that is at least 85%, at least 90%, at least 95%, at least 96%, at least 97%, at least 98%, at least 99%, or 100% identical to a 16S rDNA sequence set forth in SEQ ID NOs: 187, 188, 189, 190, 191, 192, 193, 194, 195, 196, 197, 198, 199, 200, 201, 202, 203, 204, 205, 206, 207, 208, 209, 210, 211, 212, 213, 214, 215, 216, 217, 218, 219, 220, 221, 222, 223, 224, 225, 226, 227, 228, 229, 230, 231, 232, 233, 234, 235, 236, 237, 238, 239, 240, 241, 242, 243, 244, 245, 246, 247, 248, 249, 250, 251, 252, 253, 254, 255, 256, 257, 258, 259, 260, 261, 262, 263, 264, 265, 266, 267, 268, 269, 270, 271, 272, 273, 274, 275, 276, 277, 278, 279, 280, 281, 282, 283, 284, 285, 286, 287, 288, 289, 290, 291, 292, 293, 294, 295, 296, 297, 298, 299, 300, 301, 302, 303, 304, 305, 306, 307, 308, 309, 310, 311, 312, 313, 314, 315, 316, 317, 318, 319, 320, 321, 322, 323, 324, 325, 326, 327, 328, 329, 330, 331, 332, 333, 334, 335, 336, 337, 338, 339, 340, 341, 342, 343, 344, 345, 346, 347, 348, 349, 350, 351, 352, 353, 354, 355, 356, 357, 358, 359, 360, 361, 362, 363, 364, 365, 366, 367, 368, 369, 370, 371, 372, 373, 374, 375, 376, 377, 378, 379, 380, 381, 382, 383, 384, 385, 386, 387, 388, 389, 390, 391, 392, 393, 394, 395, 396, 397, 398, 399, 400, 401, 402, 403, 404, 405, 406, 407, 408, 409, 410, 411, 412, 413, 414, 415, 416, 417, 418, 419, 420, 421, 422, 423, 424, 425, 426, 427, 428, 429, 430, 431, 432, 433, 434, 435, 436, 437, 438, 439, 440, 441, 442, 443, 444, 445, 446, 447, 448, 449, 450, 451, 452, 453, 454, 455, 456, 457, 458, 459, 460, 461, 462, 463, 464, 465, 466, 467, 468, 469, 470, 471, 472, 473, 474, 475, 476, 477, 478, 479, 480, 481, 482, 483, 484, 485, 486, 487, 488, 489, 490, 491, 492, 493, 494, 495, 496, 497, 498, 499, 500, 501, 502, 503, 504, 505, 506, 507, 508, 509, 510, 511, 512, 513, 514, 515, 516, 517, 518, 519, 520, 521, 522, 523, 524, 525, 526, 527, 528, 529, 530, 531, 532, 533, 534, 535, 536, 537, 538, 539, 540, 541, 542, 543, 544, 545, 546, 547, 548, 549, 550, 551, 552, 553, 554, 555, 556, 557, 558, 559, 560, 561, 562, 563, 564, 565, 566, 567, 568, 569, 570, 571, 572, 573, 574, 575, 576, 577, 578, 579, 580, 581, 582, 583, 584, 585, 586, 587, 588, 589, 590, 591, 592, 593, 594, 595, 596, 597, 598, 599, 600, 608, 609, 610, 611, 612, 620, 621, 622, 623, 624, 625, 626, 627, 628, 629, 630, 631, 632, 633, 634, 635, 636, 637, 638, 639, 642, 644, 645, 646, 647, 648, 649, 650, 651, 652, 653, 654, 655, 656, 657, 658, 659, 660, 661, 668, 669, 670, 671, 672, 673, 674, 677, 678, 679, 680, 682, 683, 684, 685, 686, 687, 689, 692, 694, 695, 698, 701, 731, 734, 764, 1011, 1012, 1013, 1014, 1015, 1016, 1017, 774, 1107, 1108, 1109, 1110, 1111, 1112, 1113, 1114, 1115, 1116, 1117, 1118, 1119, 1120, 1121, 1122, 1123, 1124, 1125, 1126, 1127, 1130, 1131, 1132, 1133, 1134, 1135, 1156, 1157, 1158, 1159, 1160, 1161, 1162, 1163, 1164, 1165, 1166, 1167, 1168, 1169, 1170, 1171, 1172, 1173, 1174, 1175, 1176, 1177, 1178, 1179, 1180, 1181, 1182, 1183, 1184, 1185, 1186, 1187, 1188, 1189, 1190, 1191, 1192, 1193, 1194, 1195, 1196, 1197, 1198, 1199, 1200, 1201, 1202, 1203, 1204, 1205, 1206, 1207, 1208, 1209, 1210, 1211, 1212, 1213, 1214, 1215, 1216, 1217, 1218, 775, 776, 777, 778, 779, 780, 781, 782, 783, 784, 785, 786, 787, 788, 789, 1321, 1322, 1323, 1324, 1325, 1326, 1327, 1328, 1329, 1330, 1331, 1332, 1333, 1334, 1335, 1336, 1337, 1338, 1339, 1340, 1341, 1342, 1343, 1344, 1345, 1346, 1347, 1348, 1349, 1356, 1357, 1358, 1359, 1360, 1361, 1362, 1363, 1364, 1365, 1366, 1367, 1368, 1395, 1396, 1397, 1398, 1399, 1400, 1401, 1402, 1427, 1428, 1429, 1430, 1431, 1432, 1433, 1434, 1435, 1436, 1437, 1438, 1439, 1440, 1441, 1442, 1443, 1444, 1445, 1446, 1447, 1448, 1449, 1450, 1451, 1452, 1453, 1454, 1455, 1456, 1457, 1458, 1459, 1460, 1461, 1462, 1463, 1464, 1465, 1466, 1467, 1468, 1469, 1470, 1471, 1472, 1473, 1474, 1475, 1476, 1477, 1478, 1479, 1480, 1481, 1482, 1483, 1484, 1485, 1486, 1487, 1488, 1489, 1490, 1491, 1492, 1493, 1494, 1495, 1496, 1497, 1498, 1499, 1500, 1501, 1502, 1503, 1504, 1505, 931, 932, 933, 934, 935, 936, 937, 938, 939, 940, 941, 942, 943, 944, 945, 946, 947, 948, 949, 950, 951, 952, 953, 954, 955, 956, 957, 958, 959, 960, 961, 962, 963, 964, 965, 966, 967, 968, 969, 970, 971, 972, 973, 974, 975, 976, 977, 978, 979, 980, 981, 982, 983, 984, 985, 986, 987, 988, 989, 990, 991, 992, 993, 994, 995, 996, 997, 998, 999, 1000, 1001, 1002, 1003, 1004, 1005, 1006, 1007, 1008, 1009, 1506, 1507, 1508, 1509, 1510, 1511, 1512, 1513, 1514, 1515, 1516, 1517, 1518, 1519, 1520, 1521, 1522, 1523, 1524, 1525, 1526, 1527, 1528, 1529, 1530, 1531, 1532, 1533, 1534, 1535, 1536, 1537, 1538, 1539, 1540, 1541, 1542, 1543, 1544, 1545, 1546, 1547, 1548, 1549, 1550, 1551, 1552, 1553, 1554, 1555, 1556, 1557, 1558, 1559, 1560, 1561, 1562, 1563, 1564, 1565, 1566, 1567, 1568, 1569, 1570, 1571, 1572, 1573, 1574, 1575, 1576, 1577, 1578, 1579, 1580, 1581, 1582, 1583, 1584, 1585, 1586, 1587, 1588, 1589, 1590, 1591, 1592, 1593, 1594, 1595, 1596, 1597, 1598, 1599, 1600, 1601, 1602, 1603, 1616, 1617, 1618, 1619, 1620, 1654, 1655, 1656, 1657, 1658, 1659, 1660, 1662, 1663, 1664, 1665, 1666, 1667, 1668, 1669, 1670, 1671, 1672, 1673, 1674, 1675, 1676, 1677, 1678, 1679, 1680, 1681, 1682, 1683, 1684, 1685, 1686, 1687, 1688, 1689, 1690, 1691, 1692, 1693, 1694, 1695, 1750, 1751, 1752, 1753, 1754, 1755, and 1756.

[0038] In some aspects of the therapeutic composition, the therapeutic composition does not comprise one or more bacteria having a 16S rDNA sequence that is at least 85%, at least 90%, at least 95%, at least 96%, at least 97%, at least 98%, at least 99%, or 100% identical to a 16S rDNA sequence set forth in SEQ ID NOs: 608, 610, 611, 612, 620, 621, 622, 623, 624, 625, 626, 630, 631, 632, 633, 634, 635, 636, 637, 638, 639, 642, 644, 645, 646, 647, 648, 649, 650, 651, 652, 653, 654, 655, 656, 657, 658, 659, 660, 661, 668, 669, 670, 671, 672, 673, 674, 677, 678, 679, 680, 682, 683, 684, 685, 686, 687, 689, 692, 694, 695, 698, 701, 731, 734 and 764.

[0039] In some aspects of the therapeutic composition, the therapeutic composition does not comprise one or more bacteria having a 16S rDNA sequence that is at least 85%, at least 90%, at least 95%, at least 96%, at least 97%, at least 98%, at least 99%, or 100% identical to a 16S rDNA sequence set forth in SEQ ID NOs: 608, 609, 610, 611, 612, 620, 621, 624, 625, 626, 627, 628, 629, 630, 631, 632, 633, 634, 635, 636, 637, 638, 639, 642, 644, 645, 646, 647, 648, 649, 650, 651, 652, 653, 654, 655, 656, 657, 658, 659, 660, 661, 668, 669, 670, 671, 672, 673, 674, 677, 678, 679, 680, 682, 683, 684, 685, 686, 687, 689, 692, 694, 695, 698, 701, 731 and 764.

[0040] In some aspects of the therapeutic composition, the therapeutic composition does not comprise one or more bacteria having a 16S rDNA sequence that is at least 85%, at least 90%, at least 95%, at least 96%, at least 97%, at least 98%, at least 99%, or 100% identical to a 16S rDNA sequence set forth in SEQ ID NOs: 188, 213, 245, 323, 331, 332, 376, 455, 509, 516, 538, 582, 1156, 1157, 1158, 1159, 1160, 1161, 1162, 1163, 1164, 1165, 1166, 1167, 1168, 1169, 1170, 1171, 1172, 1173, 1174, 1175, 1176, 1177, 1178, 1179, 1180, 1181, 1182, 1183, 1184, 1185, 1186, 1187, 1188, 1189, 1190, 1191, 1192, 1193, 1194, 1195, 1196, 1197, 1198, 1199, 1200, 1201, 1202, 1203, 1204, 1205, 1206, 1207, 1208, 1209, 1210, 1211, 1212, 1213, 1214, 1215, 1216, 1217, 1218, o1321, 1322, 1323, 1324, 1325, 1326, 1327, 1328, 1329, 1330, 1331, 1332, 1333, 1334, 1335, 1336, 1337, 1338, 1339, 1340, 1341, 1342, 1343, 1344, 1345, 1346, 1347, 1348, and 1349.

[0041] In some aspects of the therapeutic composition, the therapeutic composition does not comprise one or more bacteria having a 16S rDNA sequence that is at least 85%, at least 90%, at least 95%, at least 96%, at least 97%, at least 98%, at least 99%, or 100% identical to a 16S rDNA sequence set forth in SEQ ID NOs: 187, 189, 190, 191, 192, 193, 194, 195, 196, 197, 198, 199, 200, 201, 202, 203, 204, 205, 211, 214, 216, 217, 218, 219, 220, 221, 222, 224, 225, 226, 227, 228, 229, 230, 231, 232, 233, 234, 235, 236, 237, 238, 239, 240, 241, 242, 243, 244, 246, 247, 248, 253, 254, 255, 257, 258, 259, 263, 264, 265, 267, 268, 269, 270, 271, 272, 273, 277, 283, 286, 289, 290, 291, 292, 293, 294, 295, 296, 297, 298, 299, 300, 301, 302, 303, 304, 305, 306, 307, 308, 309, 310, 311, 312, 313, 314, 315, 316, 317, 318, 319, 320, 321, 322, 324, 325, 326, 327, 328, 329, 330, 333, 334, 335, 336, 337, 338, 339, 340, 341, 342, 343, 344, 345, 346, 347, 348, 349, 350, 351, 352, 353, 354, 355, 356, 357, 358, 359, 360, 361, 362, 363, 364, 365, 366, 367, 368, 369, 370, 371, 372, 373, 374, 375, 377, 378, 379, 380, 381, 382, 383, 384, 385, 386, 387, 389, 390, 391, 392, 393, 394, 395, 396, 397, 398, 399, 400, 401, 402, 403, 409, 410, 411, 412, 413, 414, 415, 418, 421, 424, 425, 428, 429, 430, 431, 432, 433, 434, 435, 436, 437, 438, 439, 440, 441, 442, 443, 444, 445, 447, 449, 450, 452, 453, 454, 456, 457, 458, 460, 462, 463, 464, 465, 466, 467, 468, 469, 471, 472, 473, 474, 475, 476, 478, 479, 480, 481, 483, 484, 486, 487, 488, 489, 490, 491, 492, 493, 494, 495, 496, 497, 498, 499, 500, 501, 502, 503, 504, 505, 506, 507, 508, 510, 511, 512, 513, 514, 515, 520, 521, 522, 523, 524, 525, 526, 527, 528, 529, 530, 531, 537, 539, 540, 542, 543, 544, 545, 546, 547, 548, 550, 551, 552, 553, 554, 555, 560, 561, 564, 565, 566, 573, 574, 577, 579, 581, 583, 584, 585, 586, 587, 588, 589, 591, 594, 595, 596, 597, 598, 599, 600, 774, 1113, 1114, 1115, 1116, 1117, 1118, 1119, 1120, 1121, 1122, 1123, 1124, 1125, 1126, 1127, 1130, 1131, 1132, 1133, 1134, 1135, 1356, 1357, 1358, 1359, 1360, 1361, 1362, 1395, 1396, 1397, 1398, 1399, 1400, 1401, 1402, 1616, 1617, 1618, 1619, 1620, 1662, 1663, 1664, 1665, 1666, 1667, 1668, 1669, 1670, 1671, 1672, 1673, 1674, 1675, 1676, 1677, 1678, 1679, 1680, 1681, 1682, 1683, 1684, 1685, 1686, 1687, 1688, 1689, 1690, 1691, 1692, 1693, 1694, 1695, 1755, and 1756.

[0042] In some aspects of the therapeutic composition, the therapeutic composition does not comprise one or more bacteria having a 16S rDNA sequence that is at least 85%, at least 90%, at least 95%, at least 96%, at least 97%, at least 98%, at least 99%, or 100% identical to a 16S rDNA sequence set forth in SEQ ID NOs: 206, 207, 208, 209, 210, 212, 215, 223, 249, 250, 251, 252, 256, 260, 261, 262, 266, 274, 275, 276, 278, 279, 280, 281, 282, 284, 285, 287, 388, 404, 405, 406, 407, 408, 416, 417, 419, 420, 422, 423, 426, 427, 446, 448, 451, 459, 461, 482, 485, 517, 518, 519, 532, 533, 534, 535, 536, 549, 556, 557, 558, 559, 562, 563, 567, 568, 569, 570, 571, 572, 575, 576, 580, 590, 593, 1363, 1364, 1365, 1366, 1367, 1368, 1506, 1507, 1508, 1509, 1510, 1511, 1512, 1513, 1514, 1515, 1516, 1517, 1518, 1519, 1520, 1521, 1522, 1523, 1524, 1525, 1526, 1527, 1528, 1529, 1530, 1531, 1532, 1533, 1534, 1535, 1536, 1537, 1538, 1539, 1540, 1541, 1542, 1543, 1544, 1545, 1546, 1547, 1548, 1549, 1550, 1551, 1552, 1553, 1554, 1555, 1556, 1557, 1558, 1559, 1560, 1561, 1562, 1563, 1564, 1565, 1566, 1567, 1568, 1569, 1570, 1571, 1572, 1573, 1574, 1575, 1576, 1577, 1578, 1579, 1580, 1581, 1582, 1583, 1584, 1585, 1586, 1587, 1588, 1589, 1590, 1591, 1592, 1593, 1594, 1595, 1596, 1597, 1598, 1599, 1600, 1601, 1602, 1603, 1750, 1751, 1752, 1753, and 1754.

[0043] In some aspects the therapeutic composition further comprises at least one anticancer agent. In some aspects, the anticancer agent is a checkpoint inhibitor. In some aspects, the checkpoint inhibitor is selected from an anti-PD-1 antibody, an anti-CTLA-4 antibody, an anti-PD-L1 antibody or combinations thereof. In some aspects, the checkpoint inhibitor is selected from pembrolizumab, nivolumab, atezolizumab, avelumab, durvalumab, ipilimumab, pidilizumab, AMP-224, AMP-514, STI-A1110, TSR-042, RG-7446, BMS-936559, BMS-936558, MK-3475, CT O11, MPDL3280A, MEDI-4736, MSB-0020718C, AUR-012, LAG-3, OX40 inhibitors, OX40L inhibitors, TIGIT inhibitors or STI-A1010, or combinations thereof. In some aspects, the anticancer agent is a chemotherapy agent. In some aspects, the anticancer agent is a combination of a checkpoint inhibitor and a chemotherapy agent.

[0044] In some aspects of the therapeutic composition, each of the purified or isolated populations of bacteria is present in the composition at a concentration of at least about 1×10² viable colony forming units (CFU). In some aspects, each purified or isolated population of bacteria is present in the composition at a concentration of about 1×10² to 1×10⁹ viable CFU.

[0045] In some aspects of the therapeutic composition, a fraction of the purified or isolated population of bacteria comprises a spore-forming bacteria. In some aspects, a fraction of the purified or isolated population of bacteria is in spore form. In some aspects of the therapeutic composition, a fraction of the purified or isolated population of bacteria is in vegetative form.

[0046] In some aspects, the therapeutic composition further comprises a pharmaceutically acceptable excipient. In some aspects, the therapeutic composition is formulated for delivery to the intestine. In some aspects, the therapeutic composition is enterically coated. In some aspects, the therapeutic composition is formulated for oral administration. In some aspects, the therapeutic composition is formulated into a food or beverage.

[0047] In some aspects, the therapeutic composition is capable of or can reduce the rate of tumor growth in an animal model or in a mammalian subject. In some aspects, the therapeutic composition is capable of or can reduce the rate of tumor growth in an animal model or in a mammalian subject when administered concomitantly with, prior to, or subsequent to the administration of at least one anticancer agent.

[0048] In some aspects, the therapeutic composition is capable of or can increase the number of active CD8 T cells in a tumor of an animal model or of a mammalian subject when administered concomitantly with, prior to, or subsequent to the administration of at least one anticancer agent.

[0049] In some aspects, the therapeutic composition is formulated for multiple administrations.

[0050] In some aspects of the therapeutic composition, each of the populations of bacteria is present in the composition at a concentration of at least 1×10³ viable CFU.

[0051] The disclosure also relates to a method of treating or preventing or reducing risk of a cancer in a mammalian subject in need thereof comprising administering to the subject a therapeutic composition as described herein.

[0052] In some aspects, the bacteria comprises one or more bacteria selected from Bifidobacterium catenulatum group, Blautia wexlerae, Hungatella sp1, Intestinibacter bartlettii, Lachnospiraceae NG31 sp1, Lactonifactor longoviformis, Leuconostoc gelidum, Sutterella wadsworthensis, Anaerostipes hadrus, Dialister invisus, Merdimonas faecis, Roseburia faecis, Roseburia intestinalis, Ruminococcaceae NG11_sp5, or bacteria having 16S rDNA having at least 94.5%, 95%, 97%, 98%, 98.7% or 99% sequence identity to any one of the 16S rDNA thereof. In some aspects, the cancer is a bladder cancer.

[0053] In some aspects, the bacteria comprises one or more bacteria selected from [Extibacter] muris, Alistipes onderdonkii, Collinsella intestinalis, Collinsella stercoris, Muricomes sp1, Neobitarella massiliensis, Prevotellamassilia sp2, Ruminococcaceae NG33 sp1, Desulfovibrio desulfuricans, Roseburia intestinalis, or bacteria having 16S rDNA having at least 94.5%, 95%, 97%, 98%, 98.7% or 99% sequence identity to any one of the 16S rDNA thereof. In some aspects, the cancer is a non-small cell lung cancer.

[0054] In some aspects, the bacteria comprises one or more bacteria selected from [Adlercreutzia] equolifaciens group, [Anaerotruncus] rubiinfantis, [Romboutsia] timonensis, Alistipes finegoldii, Alistipes indistinctus, Alistipes obesi, Alistipes putredinis, Alistipes shahii, Anaerofustis stercorihominis, Anaeromassilibacillus sp3, Barnesiella intestinihominis, Bilophila wadsworthia, Blautia faecis, Coriobacteriaceae NG5 sp1, Frisingicoccus sp3, Gordonibacter pamelaeae, Harryflintia acetispora, Lachnospiraceae NG29 sp1, Marvinbryantia sp8, Massilimaliae massiliensis, Massilimaliae timonensis, Neglecta timonensis, Parabacteroides merdae, Peptoniphilaceae NG4 sp1, Peptoniphilaceae NG4 sp3, Pseudoflavonifractor capillosus, Ruminococcaceae NG12 sp1, Ruminococcaceae NG15 sp3, Ruminococcaceae NG17 sp3, Ruthenibacterium sp1, Lachnoclostridium edouardi, Lachnospira pectinoschiza, Lawsonibacter sp7, Odoribacter splanchnicus, Ruthenibacterium lactatiformans, or bacteria having 16S rDNA having at least 94.5%, 95%, 97%, 98%, 98.7% or 99% sequence identity to any one of the 16S rDNA thereof. In some aspects, the cancer is a metastatic melanoma.

[0055] In some aspects, the bacteria comprises one or more bacteria having a 16S rDNA sequence that is at least 85%, at least 90%, at least 95%, at least 96%, at least 97%, at least 98%, at least 99%, or 100% identical to a 16S rDNA sequence set forth in SEQ ID NOs: 2, 3, 6, 10, 12, 13, 19, 20, 21, 22, 23, 24, 34, 37, 38, 39, 42, 43, 44, 45, 46, 47, 48, 50, 51, 52, 55, 57, 58, 59, 64, 65, 66, 67, 73, 74, 75, 80, 82, 83, 84, 85, 86, 87, 88, 89, 90, 91, 92, 93, 94, 95, 96, 97, 98, 99, 100, 101, 104, 105, 106, 107, 108, 109, 110, 111, 112, 114, 115, 116, 120, 123, 129, 135, 136, 138, 139, 140, 141, 142, 143, 145, 146, 148, 153, 156, 157, 158, 161, 168, 169, 170, 173, 176, 178, 180, 182, 1018, 1019, 1020, 1021, 1022, 1023, 1024, 1025, 1026, 1027, 1028, 1029, 1030, 1031, 1032, 1033, 1034, 1035, 1036, 1037, 1038, 1039, 1040, 1041, 1042, 1043, 1044, 1045, 1046, 1047, 1048, 1049, 1050, 1051, 1052, 1053, 1054, 1055, 1056, 1057, 1297, 1298, 1299, 1010, 1696, 1697, 1698, 1699, 1700, 1701, 1702, 1703, 1704, 1705, 1706, 1707, 1708, 1709, 1710, 1711, 1712, 1713, 1714, 1715, 1716, 1717, 1718, 1719, 1720, 1721, 1722, 1723, 1724, 1725, 1726, 1727, 1728, 1729, 1730, 1731, and 1732. In some aspects, the cancer is a bladder cancer.

[0056] In some aspects, the bacteria comprises one or more bacteria having a 16S rDNA sequence that is at least 85%, at least 90%, at least 95%, at least 96%, at least 97%, at least 98%, at least 99%, or 100% identical to a 16S rDNA sequence set forth in SEQ ID NOs: 16, 17, 18, 53, 54, 60, 77, 79, 81, 103, 119, 125, 132, 133, 134, 164, 175, 179, 184, 1293, 1294, 1295, 1296, 1705, 1706, 1707, 1708, 1709, 1710, 1711, 1712, 1713, 1714, 1715, 1716, 1717, 1718, 1719, 1720, 1721, 1722, 1723, 1724, 1725, 1726, 1727, 1728, 1729, 1730, 1731, and 1732. In some aspects, the cancer is a non-small cell lung cancer.

[0057] In some aspects, the bacteria comprises one or more bacteria having a 16S rDNA sequence that is at least 85%, at least 90%, at least 95%, at least 96%, at least 97%, at least 98%, at least 99%, or 100% identical to a 16S rDNA sequence set forth in SEQ ID NOs: 1, 4, 5, 7, 8, 9, 11, 14, 15, 25, 26, 27, 28, 29, 30, 31, 32, 33, 35, 36, 40, 41, 61, 62, 68, 69, 70, 71, 72, 76, 78, 117, 118, 121, 122, 124, 127, 128, 130, 131, 137, 144, 147, 149, 150, 151, 152, 154, 155, 159, 160, 162, 163, 165, 166, 167, 171, 174, 177, 181, 183, 186, 1405, 1406, 1407, 1408, 1409, 1410, 1411, 1412, 1413, 1414, 1415, 1416, 1608, 1609, 1610, 1611, 1612, 1613, 1614, 1615, 1622, 1623, 1624, 1625, 1626, 1627, 1628, 1629, 1630, 1631, 1632, 1633, 1634, 1635, 1636, 1637, 1638, 1639, 1640, 1641, 1642, 1643, 1644, 1645, 1646, 1647, 1648, 1733, 1734, 1735, 1736, 1737, 1738, 1739, 1740, 1741, 1742, 1743, 1744, 1745, 1746, 1747, 1748, and 1749. In some aspects, the cancer is a metastatic melanoma.

[0058] In some aspects of the method of treating or preventing or reducing risk of a cancer, the therapeutic composition does not comprise Alistipes onderdonkii, Angelakisella massiliensis, Christensenellaceae NG5 sp2, Cuneatibacter caecimuris, Desulfovibrio fairfieldensis, Ruminococcaceae NG13 sp1, Ruminococcaceae NG16 sp1, Bifidobacterium animalis, Faecalibacterium prausnitzii, or bacteria having 16S rDNA having at least 94.5%, 95%, 97%, 98%, 98.7% or 99% sequence identity to any one of the 16S rDNA thereof. In some aspects, the cancer is a bladder cancer.

[0059] In some aspects of the method of treating or preventing or reducing risk of a cancer, the therapeutic composition does not comprise [Coprococcus] catus, [Lactobacillus] fermentum, [Romboutsia] timonensis, [Ruminococcus] bromii, [Ruminococcus] gauvreauii, Actinomyces graevenitzii, Agathobaculum butyriciproducens group, Bacteroides caccae, Bacteroides intestinalis, Bittarella massiliensis, Blautia luti group, Clostridium saudiense, Corynebacterium durum, Fusicatenibacter sp2, Lachnospiraceae NG30 sp3, Massilimaliae sp1, Monoglobus pectinilyticus, Rothia dentocariosa, Rothia mucilaginosa, Ruminococcaceae NG17 sp1, Schaalia odontolytica, Streptococcus australis, Streptococcus gordonii, Streptococcus infantis group, Streptococcus parasanguinis, Streptococcus salivarius group, Allisonella histaminiformans, Bacteroides faecis, Bacteroides massiliensis, Desulfovibrionaceae NG5_sp1, Gemmiger sp2, Intestinimonas massiliensis, Marvinbryantia sp5, Propionibacterium freudenreichii, Slackia isoflavoniconvertens, Thermodesulfobiaceae NG1_sp1, or bacteria having 16S rDNA having at least 94.5%, 95%, 97%, 98%, 98.7% or 99% sequence identity to any one of the 16S rDNA thereof. In some aspects, the cancer is a non-small cell lung cancer.

[0060] In some aspects of the method of treating or preventing or reducing risk of a cancer, the therapeutic composition does not comprise [Atopobium] parvulum, [Ruminococcus] gnavus, Bacteroides dorei group, Blautia sp1, Schaalia sp2, Granulicatella adiacens, Lactococcus lactis, Scardovia wiggsiae, or bacteria having 16S rDNA having at least 94.5%, 95%, 97%, 98%, 98.7% or 99% sequence identity to any one of the 16S rDNA thereof. In some aspects, the cancer is a metastatic melanoma.

[0061] In some aspects of the method of treating or preventing or reducing risk of a cancer, the therapeutic composition does not comprise one or more bacteria having a 16S rDNA sequence that is at least 85%, at least 90%, at least 95%, at least 96%, at least 97%, at least 98%, at least 99%, or 100% identical to a 16S rDNA sequence set forth in SEQ ID NOs: 188, 213, 245, 323, 331, 332, 376, 455, 509, 516, 538, 582, 1156, 1157, 1158, 1159, 1160, 1161, 1162, 1163, 1164, 1165, 1166, 1167, 1168, 1169, 1170, 1171, 1172, 1173, 1174, 1175, 1176, 1177, 1178, 1179, 1180, 1181, 1182, 1183, 1184, 1185, 1186, 1187, 1188, 1189, 1190, 1191, 1192, 1193, 1194, 1195, 1196, 1197, 1198, 1199, 1200, 1201, 1202, 1203, 1204, 1205, 1206, 1207, 1208, 1209, 1210, 1211, 1212, 1213, 1214, 1215, 1216, 1217, 1218, o1321, 1322, 1323, 1324, 1325, 1326, 1327, 1328, 1329, 1330, 1331, 1332, 1333, 1334, 1335, 1336, 1337, 1338, 1339, 1340, 1341, 1342, 1343, 1344, 1345, 1346, 1347, 1348, and 1349. In some aspects, the cancer is a bladder cancer.

[0062] In some aspects of the method of treating or preventing or reducing risk of a cancer, the therapeutic composition does not comprise one or more bacteria having a 16S rDNA sequence that is at least 85%, at least 90%, at least 95%, at least 96%, at least 97%, at least 98%, at least 99%, or 100% identical to a 16S rDNA sequence set forth in SEQ ID NOs: 187, 189, 190, 191, 192, 193, 194, 195, 196, 197, 198, 199, 200, 201, 202, 203, 204, 205, 211, 214, 216, 217, 218, 219, 220, 221, 222, 224, 225, 226, 227, 228, 229, 230, 231, 232, 233, 234, 235, 236, 237, 238, 239, 240, 241, 242, 243, 244, 246, 247, 248, 253, 254, 255, 257, 258, 259, 263, 264, 265, 267, 268, 269, 270, 271, 272, 273, 277, 283, 286, 289, 290, 291, 292, 293, 294, 295, 296, 297, 298, 299, 300, 301, 302, 303, 304, 305, 306, 307, 308, 309, 310, 311, 312, 313, 314, 315, 316, 317, 318, 319, 320, 321, 322, 324, 325, 326, 327, 328, 329, 330, 333, 334, 335, 336, 337, 338, 339, 340, 341, 342, 343, 344, 345, 346, 347, 348, 349, 350, 351, 352, 353, 354, 355, 356, 357, 358, 359, 360, 361, 362, 363, 364, 365, 366, 367, 368, 369, 370, 371, 372, 373, 374, 375, 377, 378, 379, 380, 381, 382, 383, 384, 385, 386, 387, 389, 390, 391, 392, 393, 394, 395, 396, 397, 398, 399, 400, 401, 402, 403, 409, 410, 411, 412, 413, 414, 415, 418, 421, 424, 425, 428, 429, 430, 431, 432, 433, 434, 435, 436, 437, 438, 439, 440, 441, 442, 443, 444, 445, 447, 449, 450, 452, 453, 454, 456, 457, 458, 460, 462, 463, 464, 465, 466, 467, 468, 469, 471, 472, 473, 474, 475, 476, 478, 479, 480, 481, 483, 484, 486, 487, 488, 489, 490, 491, 492, 493, 494, 495, 496, 497, 498, 499, 500, 501, 502, 503, 504, 505, 506, 507, 508, 510, 511, 512, 513, 514, 515, 520, 521, 522, 523, 524, 525, 526, 527, 528, 529, 530, 531, 537, 539, 540, 542, 543, 544, 545, 546, 547, 548, 550, 551, 552, 553, 554, 555, 560, 561, 564, 565, 566, 573, 574, 577, 579, 581, 583, 584, 585, 586, 587, 588, 589, 591, 594, 595, 596, 597, 598, 599, 600, 774, 1113, 1114, 1115, 1116, 1117, 1118, 1119, 1120, 1121, 1122, 1123, 1124, 1125, 1126, 1127, 1130, 1131, 1132, 1133, 1134, 1135, 1356, 1357, 1358, 1359, 1360, 1361, 1362, 1395, 1396, 1397, 1398, 1399, 1400, 1401, 1402, 1616, 1617, 1618, 1619, 1620, 1662, 1663, 1664, 1665, 1666, 1667, 1668, 1669, 1670, 1671, 1672, 1673, 1674, 1675, 1676, 1677, 1678, 1679, 1680, 1681, 1682, 1683, 1684, 1685, 1686, 1687, 1688, 1689, 1690, 1691, 1692, 1693, 1694, 1695, 1755, and 1756. In some aspects, the cancer is non-small cell lung cancer.

[0063] In some aspects of the method of treating or preventing or reducing risk of a cancer, the therapeutic composition does not comprise one or more bacteria having a 16S rDNA sequence that is at least 85%, at least 90%, at least 95%, at least 96%, at least 97%, at least 98%, at least 99%, or 100% identical to a 16S rDNA sequence set forth in SEQ ID NOs: 206, 207, 208, 209, 210, 212, 215, 223, 249, 250, 251, 252, 256, 260, 261, 262, 266, 274, 275, 276, 278, 279, 280, 281, 282, 284, 285, 287, 388, 404, 405, 406, 407, 408, 416, 417, 419, 420, 422, 423, 426, 427, 446, 448, 451, 459, 461, 482, 485, 517, 518, 519, 532, 533, 534, 535, 536, 549, 556, 557, 558, 559, 562, 563, 567, 568, 569, 570, 571, 572, 575, 576, 580, 590, 593, 1363, 1364, 1365, 1366, 1367, 1368, 1506, 1507, 1508, 1509, 1510, 1511, 1512, 1513, 1514, 1515, 1516, 1517, 1518, 1519, 1520, 1521, 1522, 1523, 1524, 1525, 1526, 1527, 1528, 1529, 1530, 1531, 1532, 1533, 1534, 1535, 1536, 1537, 1538, 1539, 1540, 1541, 1542, 1543, 1544, 1545, 1546, 1547, 1548, 1549, 1550, 1551, 1552, 1553, 1554, 1555, 1556, 1557, 1558, 1559, 1560, 1561, 1562, 1563, 1564, 1565, 1566, 1567, 1568, 1569, 1570, 1571, 1572, 1573, 1574, 1575, 1576, 1577, 1578, 1579, 1580, 1581, 1582, 1583, 1584, 1585, 1586, 1587, 1588, 1589, 1590, 1591, 1592, 1593, 1594, 1595, 1596, 1597, 1598, 1599, 1600, 1601, 1602, 1603, 1750, 1751, 1752, 1753, and 1754. In some aspects, the cancer is metastatic melanoma.

[0064] In some aspects of the method of treating or preventing or reducing risk of a cancer, the method further comprises administering at least one anticancer agent to the subject. In some aspects, the anticancer agent is a checkpoint inhibitor. In some aspects, the checkpoint inhibitor is selected from an anti-PD-1 antibody, an anti-CTLA-4 antibody, an anti-PD-L1 antibody or combinations thereof. In some aspects, the checkpoint inhibitor is selected from pembrolizumab, nivolumab, atezolizumab, avelumab, durvalumab, ipilimumab, pidilizumab, AMP-224, AMP-514, STI-A1110, TSR-042, RG-7446, BMS-936559, BMS-936558, MK-3475, CT O11, MPDL3280A, MEDI-4736, MSB-0020718C, AUR-012, LAG-3, OX40 inhibitors, OX40L inhibitors, TIGIT inhibitors, STI-A1010 or combinations thereof. In some aspects, the anticancer agent comprises a chemotherapy agent. In some aspects, the anticancer agent is a combination of a checkpoint inhibitor and a chemotherapy agent.

[0065] In some aspects of the method of treating or preventing or reducing risk of a cancer, the purified or isolated population of bacteria is administered at a concentration of at least about 1×10² viable colony forming units. In some aspects of the method of treating or preventing or reducing risk of a cancer, the purified or isolated population of bacteria is administered at a concentration of at a concentration of about 1×10² to 1×10⁹ viable colony forming units.

[0066] In some aspects of the method of treating or preventing or reducing risk of a cancer, a fraction of the purified or isolated population of bacteria comprises a spore-forming bacteria. In some aspects of the method of treating or preventing or reducing risk of a cancer, a fraction of the purified or isolated population of bacteria is in spore form. In some aspects of the method of treating or preventing or reducing risk of a cancer, a fraction of the purified or isolated population of bacteria is in vegetative form.

[0067] In some aspects of the method of treating or preventing or reducing risk of a cancer, the composition further comprises a pharmaceutically acceptable excipient. In some aspects of the method of treating or preventing or reducing risk of a cancer, the composition is formulated for delivery to the intestine. In some aspects of the method of treating or preventing or reducing risk of a cancer, the composition is enterically coated. In some aspects of the method of treating or preventing or reducing risk of a cancer, the composition is formulated for oral administration. In some aspects of the method of treating or preventing or reducing risk of a cancer, the composition is formulated into a food or beverage.

[0068] In some aspects of the method of treating or preventing or reducing risk of a cancer, the mammalian subject is a human.

[0069] In some aspects of the method of treating or preventing or reducing risk of a cancer, the cancer is selected from a metastatic melanoma, melanoma of the skin, non-small cell lung cancer, a kidney cancer, a bladder cancer, a head and neck cancer, a Merkel cell skin cancer (Merkel cell carcinoma), or a Hodgkin lymphoma. In some aspects, the cancer is a metastatic melanoma. In some aspects, the cancer is a non-small cell lung cancer. In some aspects, the cancer is a bladder cancer.

[0070] In some aspects of the method of treating or preventing or reducing risk of a cancer, prior to administration of the population of bacteria the subject is subjected to antibiotic treatment and/or a bowel cleanse.

[0071] In some aspects of the method of treating or preventing or reducing risk of a cancer, the subject has previously been treated for the cancer. In some aspects, the subject has been determined to be a non-responder to the previous treatment. In some aspects, the subject has been determined to have a toxic response to the previous treatment. In some aspects, the previous treatment comprises immune checkpoint blockade monotherapy or immune checkpoint blockade combination therapy. In some aspects, the cancer is recurrent cancer.

[0072] The disclosure also relates to a method of identifying a mammalian subject as a candidate for immune checkpoint therapy in combination with adjuvant microbiome therapy to treat a cancer, the method comprising:
[0073] a) obtaining a microbiome sample from the subject,
[0074] b) determining the prevalence and/or abundance of the family of bacteria in the microbiome sample, and
[0075] c) determining that the subject is a candidate for treatment if the microbiome sample comprises the bacteria as described herein.

[0076] In some aspects, the subject is determined to be a candidate for immune checkpoint inhibitor therapy. In some aspects, the immune checkpoint therapy comprises immune checkpoint blockade monotherapy or immune checkpoint blockade combination therapy.

[0077] In some aspects of the method of identifying a mammalian subject as a candidate for immune checkpoint therapy in combination with adjuvant microbiome therapy to treat a cancer, the treatment further comprises a chemotherapy.

[0078] In some aspects of the method of identifying a mammalian subject as a candidate for immune checkpoint therapy in combination with adjuvant microbiome therapy to treat a cancer, the mammalian subject is a human.

[0079] In some aspects of the method of identifying a mammalian subject as a candidate for immune checkpoint therapy in combination with adjuvant microbiome therapy to treat a cancer, the cancer is selected from a metastatic melanoma, a melanoma of the skin, a non-small cell lung cancer, a kidney cancer, a bladder cancer, a head and neck cancer, a Merkel cell skin cancer (Merkel cell carcinoma), or a Hodgkin lymphoma. In some aspects, the cancer is a metastatic melanoma. In some aspects, the cancer is a non-small cell lung cancer. In some aspects, the cancer is a bladder cancer.

[0080] The disclosure also relates to a method of identifying a mammalian subject as a donor whose feces are useful for fecal matter transfer, the method comprising:
[0081] a) obtaining a microbiome sample from the potential donor,
[0082] b) determining the prevalence and/or abundance of the species of bacteria in the microbiome sample, and
[0083] c) determining that the donor's feces is useful for fecal matter transfer if the microbiome sample comprises the bacteria as described herein.

[0084] The disclosure also relates to a therapeutic composition derived from fecal matter from a donor identified using the method of identifying a mammalian subject as a donor whose feces are useful for fecal matter transfer. In some aspects, the composition further comprises a pharmaceutically acceptable excipient. In some aspects, the therapeutic composition comprises bacteria that are in vegetative and/or spore form. In some aspects, the therapeutic composition further comprises a checkpoint inhibitor. In some aspects, the checkpoint inhibitor is selected from anti-PD-1 antibody, an anti-CTLA-4 antibody, an anti-PD-L1 antibody or combinations thereof. In some aspects, the checkpoint inhibitor is selected from pembrolizumab, nivolumab, atezolizumab, avelumab, durvalumab, ipilimumab, pidilizumab, AMP-224, AMP-514, STI-A1110, TSR-042, RG-7446, BMS-936559, BMS-936558, MK-3475, CT O11, MPDL3280A, MEDI-4736, MSB-0020718C, AUR-012, LAG-3, OX40 inhibitors, OX40L inhibitors, TIGIT inhibitors, STI-A1010 or combinations thereof.

[0085] The disclosure also relates to a method of treating or preventing or reducing risk of a cancer in a mammalian subject comprising administering to the subject a therapeutic composition derived from fecal matter from a donor identified using the method of identifying a mammalian subject as a donor whose feces are useful for fecal matter transfer.

[0086] The disclosure also relates to a method of treating or preventing or reducing risk of a cancer comprising administering at least one anticancer treatment to a subject determined to have a microbiome sample comprising the bacteria disclosed herein.

[0087] The disclosure also relates to a method comprising evaluating a microbiome profile in a sample from a subject for the bacteria disclosed herein. In some aspects, the method further comprises comparing the microbiome profile to a control microbiome. In some aspects, the control microbiome comprises a microbiome sample from a subject determined to be a responder to an anticancer treatment. In some aspects, comparing comprises comparison of the bacteria disclosed herein to the control microbiome from a subject determined to be a responder to an anticancer treatment. In some aspects, the control microbiome comprises a microbiome sample from a subject determined to be a non-responder to an anticancer treatment. In some aspects, comparing comprises comparison of the bacteria disclosed herein to the control microbiome from a subject determined to be a non-responder to an anticancer treatment.

### BRIEF DESCRIPTION OF THE FIGURES

[0088] The following figures form part of the present specification and are included to further demonstrate certain aspects of the present disclosure. The disclosure may be better understood by reference to one or more of these figures in combination with the detailed description of specific aspects presented herein.

[0089] FIG. 1 is a graph depicting the alpha diversity distribution (i.e., the inverse Simpson index and the spore species richness) of the microbiome samples analyzed. The samples are grouped by responders (R) or non-responders (NR).

[0090] FIGS. 2A, 2B, 2C, 2D, 2E and 2F are graphs showing the microbial communities dissimilarity analysis results of the microbiome samples. FIGS. 2A and 2B show the non-metric multidimensional scaling (NMDS) plots of Bray-Curtis (abundance-based) dissimilarity and binary Jaccard (prevalence-based) distance, respectively. Each patient has only one microbiome sample included. FIGS. 2C and 2D show the NMDS plots of Bray-Curtis (abundance-based) dissimilarity and binary Jaccard (prevalence-based) distance, respectively. Each patient has up to two microbiome samples included and the samples of each patient are linked by solid lines. FIG. 2E is the NMDS plot of FIG. 2C faceted by different time points, i.e., post-treatment and pre-treatment groupings. FIG. 2F is the NMDS plot of FIG. 2E further faceted by specific cancer types, i.e., bladder cancer, lung cancer, melanoma, and RCC.

[0091] FIGS. 3A, 3B, 3C, 3D, 3E, 3F and 3G are graphs showing the weighted UniFrac distance analysis of the microbiome samples. FIG. 3A shows a principal coordinates analysis (PCoA) plot of the weighted UniFrac distance. Each patient has one microbiome sample included. FIG. 3B compares Axis 1 values distribution of the weighted Unifrac distance in the PCoA analysis between R and NR groups. FIG. 3C is a PCoA plot of the weighted UniFrac distance faceted by specific cancer types, i.e., bladder cancer, lung cancer, melanoma, and RCC. FIG. 3D is a PCoA plot of the weighted UniFrac distance faceted by specific bacterial phylum, i.e., Actinobacteria, Bacteroidetes, Firmicutes, and Proteobacteria. FIG. 3E shows a PCoA plot of the weighted UniFrac distance grouped by best overall responses, i.e., complete response (CR), progressive disease (PD), and partial response (PR). CR and PR are shaded similarly in the figure to capture overall response. FIG. 3F is FIG. 3E faceted by specific cancer types, i.e., bladder cancer, lung cancer, melanoma, and RCC. FIG. 3G is FIG. 3C overlaid with supervised clustering, indicated by the ovals.

[0092] FIGS. 4A, 4B, 4C, 4D, 4E and 4F are graphs showing the unweighted UniFrac distance analysis results of the microbiome samples. Each patient has one microbiome sample included. FIG. 4A shows a PCoA plot of the unweighted UniFrac distance. FIG. 4B compares Axis 2 values distribution of the unweighted Unifrac distance in the PCoA analysis between R and NR groups. FIG. 4C is FIG. 4A faceted by specific cancer types, i.e., bladder cancer, lung cancer, melanoma, and RCC. FIG. 4D is a PCoA plot of the unweighted UniFrac distance faceted by specific bacterial phylum, i.e., Actinobacteria, Bacteroidetes, Firmicutes, and Proteobacteria. FIG. 4E shows a PCoA plot of the unweighted UniFrac distance grouped by best overall responses, i.e., complete response (CR), progressive disease (PD), and partial response (PR). CR and PR are shaded similarly in the figure to capture overall response. FIG. 4F is FIG. 4E faceted by specific cancer types, i.e., bladder cancer, lung cancer, melanoma, and RCC.

[0093] FIGS. 5A, 5B, 5C and 5D are schematics and graphs showing the in vivo tests in tumor models of the non-responder fecal matters. FIG. 5A shows the treatment schedule of CT26 models. All of the animals were colonized with the NR patient stool. Some of the animals additionally received the anti-PD-L1+anti-CTLA4 antibodies, while the control animals received isotype control antibodies. FIG. 5B shows a comparison of tumor volume in the CT26 model animals from the different antibody treatment groups from days 9 to 21 post tumor inoculation. FIG. 5C shows the treatment schedule of MC38 models. All of the animals were colonized with the NR patient stool. Some of the animals additionally received the anti-PD-1 antibody, while the control animals received isotype control antibody. FIG. 5D shows a comparison of tumor volume in the MC38 model animals from the different antibody treatment groups from days 5 to 19 post tumor inoculation.

[0094] FIG. 6 is a schematic illustrating the CD8 activation nanostring assay. Briefly, primary human CD8 T cells were thawed at 37C for 24 hours, then activated using three-dimensional beads conjugated to α-CD3 and α-CD28 antibodies, mimicking antigen-presenting cells for 48 hours. Then, the cells were treated either with supernatants from FMTs, single bacterial strain cultures or with SCFAs for 24 hours. The cells were lysed and the cell lysates were used for a downstream gene expression analysis.

[0095] FIGS. 7A-Q are graphs illustrating individual CD8 expression profiles for the following genes: CCL3 (FIG. 7A), CCL4 (FIG. 7B), CCL5 (FIG. 7C), CD69 (FIG. 7D), CTLA4 (FIG. 7E), GZMA (FIG. 7F), GZMB (FIG. 7G), GZMH (FIG. 7H), TIM-3 (HAVCR2, (FIG. 7I), IFNG (FIG. 7J), IL2RA (FIG. 7K), LAG3 (FIG. 7L), PD-1 (FIG. 7M), PRF1 (FIG. 7N), TIGIT (FIG. 7O), TNFα (FIG. 7P), XCL1/2 (FIG. 7Q). Each “BP200xxx” sample represents an FMT prepared from an individual cancer patient.

[0096] FIG. 8A is a graph showing responder (R) FMTs compared to non-responders (NR) FMTs induce higher expression of the CD8 activation marker CD69.

[0097] FIG. 8B is a graph showing CD69 gene expression in individual cancer groups (i.e., bladder, lung, melanoma, and renal cell carcinoma (RCC) cancer groups).

[0098] FIG. 9A is a graph showing T/NK cell recruiting and activating chemokine CCL5 is correlated with outcome (R, NR).

[0099] FIG. 9B is a graph showing inhibitory receptor TIM3 is inversely correlated with outcome (R, NR).

[0100] FIG. 10A is a graph showing CD8 effector cytokines TNFα expression by patient outcome (R, NR) for each cancer type (bladder, lung, melanoma, RCC).

[0101] FIG. 10B is a graph showing CD8 interferon gamma expression by patient outcome (R, NR) for each cancer type (bladder, lung, melanoma, RCC).

[0102] FIG. 11 is a graph showing the correspondence of gene-level signals between experiment 1 and experiment 2 of CD8 gene profiles from bacterial FMT supernatants.

[0103] FIGS. 12A-Q are graphs showing CD8 expression profiles for the following genes: CCL3 (FIG. 12A), CCL4 (FIG. 12B), CCL5 (FIG. 12C), CD69 (FIG. 12D), CTLA4 (FIG. 12E), GZMA (FIG. 12F), GZMB (FIG. 12G), GZMH (FIG. 12H), HAVCR2 (TIM-3, FIG. 12I), IFNG (FIG. 12J), IL2RA (FIG. 12K), LAG3 (FIG. 12L), PDCD1 (PD-1, FIG. 12M), PRF1 (FIG. 12N), TIGIT (FIG. 12O), TNFα (FIG. 12P), XCL 1/2 (FIG. 12), for individual strains.

[0104] FIG. 13A is a graph showing CD8 cytotoxicity data for 34 single strains.

[0105] FIG. 13B is a graph showing CD8 cytotoxicity data for 7 single strains.

[0106] FIGS. 14A-Q are graphs showing data from CD8 T cell donor 1, showing a dose-dependent effect on CD8 gene expression [CCL3 (FIG. 14A), CCL4 (FIG. 14B), CCL5 (FIG. 14C), CD69 (FIG. 14D), CTLA4 (FIG. 14E), GZMA (FIG. 14F), GZMB (FIG. 14G), GZMH (FIG. 14H), HAVCR2 (TIM-3, FIG. 14I), IFNG (FIG. 14J), IL2RA (FIG. 14K), LAG3 (FIG. 14L), PDCD1 (PD-1, FIG. 14M), PRF1 (FIG. 14N), TIGIT (FIG. 14O), TNFα (FIG. 14P), XCL 1/2 (FIG. 14Q)] after treatment with three SCFAs propionate, butyrate and valerate.

[0107] FIGS. 15A-Q are graphs showing data from CD8 T cell donor 2, showing a dose-dependent effect on CD8 gene expression [CCL3 (FIG. 15A), CCL4 (FIG. 15B), CCL5 (FIG. 15C), CD69 (FIG. 15D), CTLA4 (FIG. 15E), GZMA (FIG. 15F), GZMB (FIG. 15G), GZMH (FIG. 15H), HAVCR2 (TIM-3, FIG. 15I), IFNG (FIG. 15J), IL2RA (FIG. 15K), LAG3 (FIG. 15L), PDCD1 (PD-1, FIG. 15M), PRF1 (FIG. 15N), TIGIT (FIG. 15O), TNFα (FIG. 15P), XCL 1/2 (FIG. 15Q)] after treatment with three SCFAs propionate, butyrate and valerate.

[0108] FIG. 16 is a graph showing the loading of individual genes into PC1 composite score where genes with larger absolute magnitudes (larger positive or negative scores) contribute more to the PC1 composite score. Genes with positive values are positively correlated with PC1 and bars with negative values are negatively correlated with PC1.

[0109] FIG. 17 is a graph showing PC1 was positively associated with responder status.

[0110] FIG. 18 is a graph showing PC1 by outcome separated by cancer type.

[0111] FIG. 19 is a graph showing PC1 by outcome with bladder samples removed.

[0112] FIG. 20A is a graph showing Intestinimonas butyriciproducens correlation with PC1.

[0113] FIG. 20B is a graph showing Anaerotruncus colihominis correlation with PC1.

### DETAILED DESCRIPTION

### I. Definitions

[0114] As used herein, the terms “or” and “and/or” are utilized to describe multiple components in combination or exclusive of one another. For example, “x, y, and/or z” can refer to “x” alone, “y” alone, “z” alone, “x, y, and z,” “(x and y) or z,” “x or (y and z),” or “x or y or z.” It is specifically contemplated that x, y, or z may be specifically excluded from an embodiment.

[0115] The singular forms “a,” “an” and “the” include plural referents unless the context clearly dictates otherwise. The terms “a” (or “an”), as well as the terms “one or more,” and “at least one” can be used interchangeably herein. In certain aspects, the term “a” or “an” means “single.” In other aspects, the term “a” or “an” includes “two or more” or “multiple.”

[0116] Throughout this application, the term “about” is used according to its plain and ordinary meaning in the area of cell biology to indicate that a value includes the standard deviation of error for the device or method being employed to determine the value. When the term “about” is used in conjunction with a numerical range, it modifies that range by extending the boundaries above and below the numerical values set forth. In general, the term “about” can modify a numerical value above and below the stated value by a variance of, e.g., 10 percent, 5 percent, 3 percent, 2 percent, or 1 percent; up or down (higher or lower).

[0117] The term “comprising,” which is synonymous with “including,” “containing,” or “characterized by,” is inclusive or open-ended and does not exclude additional, unrecited elements or method steps. The phrase “consisting of” excludes any element, step, or ingredient not specified. The phrase “consisting essentially of” limits the scope of described subject matter to the specified materials or steps and those that do not materially affect its basic and novel characteristics. It is contemplated that embodiments described in the context of the term “comprising” may also be implemented in the context of the term “consisting of” or “consisting essentially of.”

[0118] Unless defined otherwise, all technical and scientific terms used herein have the same meaning as commonly understood by one of ordinary skill in the art to which this disclosure is related.

[0119] “Microbiota” refers to the communities of microbes that live in or on an individual's body, both sustainably and transiently, including eukaryotes, archaea, bacteria, and viruses (including bacterial viruses (i.e., phage)).

[0120] “Microbiome” refers to the genetic content of the communities of microbes that live in and on the human body, both sustainably and transiently, including eukaryotes, archaea, bacteria, and viruses (including bacterial viruses (i.e., phage)), wherein “genetic content” includes genomic DNA, RNA such as micro RNA and ribosomal RNA, the epigenome, plasmids, and all other types of genetic information.

[0121] “Dysbiosis” refers to a state of the microbiota or microbiome of the GI tract or other body area, including mucosal or skin surfaces in which the normal diversity and/or function of the ecological network is disrupted. Any disruption from the preferred (e.g., ideal) state of the microbiota can be considered a dysbiosis, even if such dysbiosis does not result in a detectable decrease in health. This state of dysbiosis may be unhealthy, it may be unhealthy under only certain conditions, or it may prevent a subject from becoming healthier. Dysbiosis may be due to a decrease in diversity, the overgrowth of one or more pathogens or pathobionts, symbiotic organisms able to cause disease only when certain genetic and/or environmental conditions are present in a patient, or the shift to an ecological network that no longer provides a beneficial function to the host and therefore no longer promotes health.

[0122] A “spore” or a population of “spores” includes bacteria (or other single-celled organisms) that are generally viable, more resistant to environmental influences such as heat and bacteriocidal agents than vegetative forms of the same bacteria, and typically are capable of germination and out-growth. “Spore-formers” or bacteria “capable of forming spores” are those bacteria containing the genes and other necessary features to produce spores under suitable environmental conditions.

[0123] The terms “pathogen”, “pathobiont” and “pathogenic” in reference to a bacterium or any other organism or entity includes any such organism or entity that is capable of causing or affecting a disease, disorder or condition of a host organism containing the organism or entity.

[0124] The term “isolated” encompasses a bacterium or other entity or substance that has been (1) separated from at least some of the components with which it was associated when initially produced (whether in nature or in an experimental setting), and/or (2) produced, prepared, purified, and/or manufactured by the hand of man. Isolated bacteria may be separated from at least about 10%, about 20%, about 30%, about 40%, about 50%, about 60%, about 70%, about 80%, about 90%, or more of the other components with which they were initially associated. In some embodiments, isolated bacteria are more than about 80%, about 85%, about 90%, about 91%, about 92%, about 93%, about 94%, about 95%, about 96%, about 97%, about 98%, about 99%, or more than about 99% pure. As used herein, a substance is “pure” if it is substantially free of other components. The terms “purify,” “purifying” and “purified” refer to a bacterium or other material that has been separated from at least some of the components with which it was associated either when initially produced or generated (e.g., whether in nature or in an experimental setting), or during any time after its initial production. A bacterium or a bacterial population may be considered purified if it is isolated at or after production, such as from a material or environment containing the bacterium or bacterial population, and a purified bacterium or bacterial population may contain other materials up to about 10%, about 20%, about 30%, about 40%, about 50%, about 60%, about 70%, about 80%, about 90%, or above about 90% and still be considered “isolated.” In some embodiments, purified bacteria and bacterial populations are more than about 80%, about 85%, about 90%, about 91%, about 92%, about 93%, about 94%, about 95%, about 96%, about 97%, about 98%, about 99%, or more than about 99% pure. In the instance of bacterial compositions provided herein, the one or more bacterial types present in the composition can be independently purified from one or more other bacteria produced and/or present in the material or environment containing the bacterial type. Bacterial compositions and the bacterial components thereof are generally purified from residual habitat products.

[0125] “Inhibition” of a pathogen encompasses the inhibition of any desired function or activity of the bacterial compositions of the present invention. Demonstrations of pathogen inhibition, such as decrease in the growth of a pathogenic bacterium or reduction in the level of colonization of a pathogenic bacterium are provided herein and otherwise recognized by one of ordinary skill in the art. Inhibition of a pathogenic bacterium's “growth” may include inhibiting the increase in size of the pathogenic bacterium and/or inhibiting the proliferation (or multiplication) of the pathogenic bacterium. Inhibition of colonization of a pathogenic bacterium may be demonstrated by measuring the amount or burden of a pathogen before and after a treatment. An “inhibition” or the act of “inhibiting” includes the total cessation and partial reduction of one or more activities of a pathogen, such as growth, proliferation, colonization, and function.

[0126] The “colonization” of a host organism includes the transitory (e.g., for 1 day, 2 days, 3 days, 4 days, 5 days, 6 days, or 1 week) or non-transitory (e.g., greater than one week, at least two weeks, at least three weeks, at least 4 weeks, at least 6 weeks, at least 8 weeks, at least 3 month, at least 4 months, at least 6 months) residence of a bacterium or other microscopic organism. As used herein, “reducing colonization” of a host subject's gastrointestinal tract (or any other microbiotal niche) by a pathogenic bacterium includes a reduction in the residence time of the pathogen in the gastrointestinal tract as well as a reduction in the number (or concentration) of the pathogen in the lumen of the gastrointestinal tract or adhered to the mucosal surface of the gastrointestinal tract. Measuring reductions of adherent pathogens may be demonstrated, e.g., by a biopsy sample, or luminal reductions may be measured indirectly, e.g., indirectly by measuring the pathogenic burden in the stool of a mammalian host.

[0127] A “combination” of two or more bacteria includes the physical co-existence of the two bacteria, either in the same material or product or in physically connected products, as well as the temporal co-administration or co-localization of the two bacteria.

[0128] A “cytotoxic” activity or bacterium includes the ability to kill another bacterial cell, such as a pathogenic bacterial cell or a closely related species of strain. A “cytostatic” activity or bacterium includes the ability to inhibit, partially or fully, growth, metabolism, and/or proliferation of a bacterial cell, such as a pathogenic bacterial cell.

[0129] To be free of “non-comestible products” means that a bacterial composition or other material provided herein does not have a substantial amount of a non-comestible product, e.g., a product or material that is inedible, harmful or otherwise undesired in a product suitable for administration, e.g., oral administration, to a human subject.

[0130] “Residual habitat products” refers to material derived from the habitat for microbiota within or on a human or animal. For example, microbiota live in feces in the gastrointestinal tract, on the skin itself, in saliva, mucus of the respiratory tract, or secretions of the genitourinary tract (i.e., biological matter associated with the microbial community). Substantially free of residual habitat products means that the bacterial composition no longer contains the biological matter associated with the microbial environment on or in the human or animal subject and is 100% free, 99% free, 98% free, 97% free, 96% free, or 95% free of any contaminating biological matter associated with the microbial community. Residual habitat products can include abiotic materials (including undigested food) or it can include unwanted microorganisms and/or fragments of microorganisms. Substantially free of residual habitat products may also mean that the bacterial composition contains no detectable cells from a human or animal and that only microbial cells are detectable. In one embodiment, substantially free of residual habitat products may also mean that the bacterial composition contains no detectable viral (including bacterial viruses (i.e., phage) or human viruses), fungal, or mycoplasmal contaminants. In another embodiment, it means that fewer than 1×10⁻²%, 1×10⁻³%, 1×10⁻⁴%, 1×10⁻⁵%, 1×10⁻⁶%, 1×10⁻⁷%, 1×10⁻⁸% of the viable cells in the bacterial composition are human or animal, as compared to microbial cells. There are multiple ways to accomplish this degree of purity, none of which are limiting. Thus, contamination may be reduced by isolating desired constituents through multiple steps of streaking to single colonies on solid media until replicate (such as, but not limited to, two) streaks from serial single colonies have shown only a single colony morphology. Alternatively, reduction of contamination can be accomplished by multiple rounds of serial dilutions to single desired cells (e.g., a dilution of 10⁻⁸ or 10⁻⁹), such as through multiple 10-fold serial dilutions. This can further be confirmed by showing that multiple isolated colonies have similar cell shapes and Gram staining behavior. Other methods for confirming adequate purity include genetic analysis (e.g. PCR, DNA sequencing), serology and antigen analysis, enzymatic and metabolic analysis, and methods using instrumentation such as flow cytometry with reagents that distinguish desired constituents from contaminants.

[0131] “Phylogenetic tree” refers to a graphical representation of the evolutionary relationships of one genetic sequence to another that is generated using a defined set of phylogenetic reconstruction algorithms (e.g., parsimony, maximum likelihood, or Bayesian). Nodes in the tree represent distinct ancestral sequences and the confidence of any node is provided by a bootstrap or Bayesian posterior probability, which measures branch uncertainty.

[0132] “Operational taxonomic unit (OTU, plural OTUs)”, in some embodiments, refers to a terminal leaf in a phylogenetic tree and is defined by a specific genetic sequence and all sequences that share sequence identity to this sequence at the level of species. A “type” or a plurality of “types” of bacteria includes an OTU or a plurality of different OTUs, and also encompasses a strain, species, genus, family or order of bacteria. The specific genetic sequence may be the 16S rDNA sequence or a portion of the 16S rDNA sequence or it may be a functionally conserved housekeeping gene found broadly across the eubacterial kingdom. OTUs share at least 95%, 96%, 97%, 98%, or 99/a sequence identity. OTUs generally defined by comparing sequences between organisms. Sequences with less than 95% sequence identity are not considered to form part of the same OTU. In some embodiments, metagenomics methods, known in the art, are used to identify species and/or OTUs.

[0133] “Clade” refers to the set of OTUs or members of a phylogenetic tree downstream of a statistically valid node in a phylogenetic tree. A clade is a group of related organisms representing all of the phylogenetic descendants of a common ancestor. The clade comprises a set of terminal leaves in the phylogenetic tree that is a distinct monophyletic evolutionary unit.

[0134] The terms “subject” or “patient” refers to any animal subject including humans, laboratory animals (e.g., primates, rats, mice), livestock (e.g., cows, sheep, goats, pigs, turkeys, chickens), and household pets (e.g., dogs, cats, rodents, etc.). The subject or patient may be healthy, or may be suffering from an infection due to a gastrointestinal pathogen or may be at risk of developing or transmitting to others an infection due to a gastrointestinal pathogen.

[0135] The term “pathobiont” refer to specific bacterial species found in healthy hosts that may trigger immune-mediated pathology and/or disease in response to certain genetic or environmental factors. Chow et al., (2011) Curr Op Immunol. Pathobionts of the intestinal microbiota and inflammatory disease. 23: 473-80. Thus, a pathobiont is a pathogen that is mechanistically distinct from an acquired infectious organism. Thus, the term “pathogen” includes both acquired infectious organisms and pathobionts.

[0136] As used herein, the term “immunoregulator” refers to an agent or a signaling pathway (or a component thereof) that regulates an immune response. “Regulating,” “modifying” or “modulating” an immune response refers to any alteration of the immune system or in the activity of such cell. Such regulation includes stimulation or suppression of the immune system which may be manifested by an increase or decrease in the number of various cell types, an increase or decrease in the activity of these cells, or any other changes which can occur within the immune system. Both inhibitory and stimulatory immunoregulators have been identified, some of which may have enhanced function or utility as a therapeutic target in a cancer microenvironment.

[0137] As used herein, the term “immune evasion” refers to inhibition of a subject's immune system or a component thereof (e.g., endogenous T cell response) by a cancer or tumor cell in order to maximize or allow continued growth or spread of the cancer/tumor.

[0138] As used herein, the term “immunotherapy” refers to the treatment or prevention of a disease or condition (e.g., cancer) by a method comprising inducing, enhancing, suppressing or otherwise modifying an immune response.

[0139] As used herein, “potentiating an endogenous immune response” means increasing the effectiveness or potency of an existing immune response in a subject. This increase in effectiveness and potency may be achieved, for example, by overcoming mechanisms that suppress the endogenous host immune response or by stimulating mechanisms that enhance the endogenous host immune response.

[0140] As used herein, the term “antibody” refers to a whole antibody molecule or a fragment thereof (e.g., fragments such as Fab, Fab′, and F(ab′)₂), it may be a polyclonal or monoclonal antibody, a chimeric antibody, a humanized antibody, a human antibody, etc.

[0141] As used herein, “cancer” means all types of cancers. In particular, the cancers can be solid or non-solid cancers. Non-limiting examples of cancers are carcinomas or adenocarcinomas such as breast, prostate, ovary, lung, pancreas or colon cancer, sarcomas, lymphomas, melanomas, leukemias, germ cell cancers and blastomas.

[0142] The terms “treat,” “treating,” and “treatment,” as used herein, refer to any type of intervention or process performed on, or administering an active agent to, the subject with the objective of reversing, alleviating, ameliorating, inhibiting, or slowing down or preventing the progression, development, severity or recurrence of a symptom, complication, condition or biochemical indicia associated with a cancer or enhancing overall survival. Treatment can be of a subject having a cancer or a subject who does not have a cancer (e.g., for prevention or prophylaxis). As used here, the terms “treat,” “treating,” and “treatment” refer to the administration of an effective dose or effective dosage.

[0143] The terms “prevent,” “preventing,” and “prevention,” as used herein, refer to partially or completely delaying onset of a cancer; partially or completely delaying onset of one or more symptoms, features, or clinical manifestations of a cancer; partially or completely delaying onset of one or more symptoms, features, or manifestations of a cancer (including, but not limited to, fatigue or reduced exercise capacity); partially or completely delaying progression from a cancer; and/or decreasing the risk of developing pathology associated with a cancer.

### II. General Compositions and Methods of the Disclosure

[0144] Provided herein are compositions and methods for treatment and/or prevention and/or reducing risk of a cancer by microbiome manipulation. In particular, the amount, identity, presence, and/or ratio of bacteria in the microbiome (e.g., GI microbiome) in a subject is manipulated to facilitate treatment and/or prevention and/or reducing risk of a cancer. Furthermore, applicants have discovered that the abundance and/or prevalence of certain commensal bacteria in feces can be used to identify fecal donors and/or donations that can improve patient response to a checkpoint inhibitor. Fecal material from such individuals can be used, e.g., in fecal microbiome transplantation or in a processed form derived from such material, for example a preparation enriched in Firmicutes (e.g., Clostridia, Clostridiales, or spore formers), that are in vegetative and/or spore form.

[0145] Applicants have identified bacterial species that are useful for increasing the efficacy of cancer treatment, e.g., treatments using checkpoint inhibitors. In some aspects, the effectiveness of an endogenous immune response, immunotherapy, chemotherapeutic, or other treatment (e.g., surgery, radiation, etc.) in the treatment and/or prevention and/or reducing risk of reoccurrence of cancer and/or tumor is dependent upon conditions within the subject (e.g., the tumor microenvironment). In particular, the identity or characteristics (e.g., concentration or level) of the microbiome within a subject can affect the effectiveness of cancer treatments (e.g., generally or specific treatments) and/or the effectiveness of the subject's own response to cancer, e.g., immune response.

[0146] In some aspects, the presence or increased level of one or more species of bacteria in a subject facilitates treatment (e.g., immunotherapy, chemotherapy, etc.) and/or the subject's endogenous immune response to cancer and/or tumor cells. In some aspects, the absence and/or decreased level of one or more species of bacteria in a subject discourages cancer/tumor growth, spread, and/or evasion of treatment/immune response. In some aspects, the absence or decreased level of one or more species of bacteria in a subject facilitates treatment (e.g., immunotherapy, chemotherapy, etc.) and/or the subject's endogenous immune response to cancer and/or tumor cells.

[0147] In some aspects, the presence of certain microbes (e.g., microbes that facilitate cancer treatment) in a subject creates an environment or microenvironment (e.g., microbiome) that is conducive to the treatment of cancer and/or inhibits cancer/tumor growth. In some aspects, the presence of detrimental microbes (e.g., microbes that facilitate cancer/tumor growth and/or prevent treatment) in a subject creates an environment or microenvironment (e.g., microbiome) that is conducive to the treatment of cancer and/or inhibits cancer/tumor growth. Microbes or their products may act locally at the level of the gut epithelium and the lamina propria to alter immunological tone or immune cell trafficking, or they may act distally by the translocation of microbes or their products into circulation to alter peripheral immune responses, e.g. in blood, liver, spleen, lymph nodes or tumor.

[0148] Modulation of microflora levels and/or identity can comprise encouraging or facilitating growth of one or more species of beneficial microbes (e.g., microbes that facilitate cancer treatment), discouraging or inhibiting growth of one or more types of detrimental microbes (e.g., species of bacteria that facilitate cancer/tumor growth and/or prevent treatment), administering one or more types of beneficial microbes (e.g., species of bacteria that facilitate cancer treatment) to the subject, and/or combinations thereof. Aspects within the scope herein are not limited by the mechanisms for introducing one or more microbes (e.g., probiotic administration, fecal transplant, etc.), encouraging growth of beneficial microbes (e.g., administering agents that skew the environment within the subject toward growth conditions for the beneficial microbes), discouraging or inhibiting growth of detrimental microbes (e.g., administering agents that skew the environment within the subject away from growth conditions for the detrimental microbes, administration of antimicrobial(s), etc.), and combinations thereof.

[0149] In some aspects, methods are provided for the treatment and/or prevention and/or reducing risk of cancer by the manipulation of the presence, amount, or relative ratio of one or more families, genera, or species of bacteria (e.g., in the gastrointestinal microbiome). In some aspects, the presence, amount, or relative ratio of particular bacteria, fungi, and/or archaea within a subject is altered. For example, in some aspects, the presence, amount, or relative ratio of one or more bacteria from the families Sutterellaceae, Coriobacteriaceae, Akkermansiaceae, Desulfovibrionaceae, Odoribacteraceae, or Rikenellaceae is manipulated.

[0150] In some aspects, the presence, amount or relative ratio of a purified or isolated population of bacteria that have 16S rDNA sequence identity of at least 94.5% to 16S rDNA sequences of species belonging to one or more of the families Sutterellaceae, Coriobacteriaceae, Akkermansiaceae, Desulfovibrionaceae, Odoribacteraceae, or Rikenellaceaeare manipulated or adjusted. In some aspects, the bacteria have 16S rDNA sequence identity of at least 95%, 97%, 98%, 98.7% or 99% to 16S rDNA sequences of species belonging to one or more of the families Sutterellaceae, Coriobacteriaceae, Akkermansiaceae, Desulfovibrionaceae, Odoribacteraceae, or Rikenellaceae.

[0151] In some aspects, the presence, amount or relative ratio of one or more bacterial species selected from Intestinimonas butyriciproducens and Anaerotruncus colihominis or bacteria having a 16S rDNA sequence having at least 97%, 98%, 98.7% or 99% sequence identity to any one 16S rDNA sequence thereof, are manipulated or adjusted. In some aspects, the presence, amount or relative ratio of one or more bacterial species selected from Murimonas intestini and Faecalicatena orotica or bacteria having a 16S rDNA sequence having at least 97%, 98%, 98.7% or 99% sequence identity to any one 16S rDNA sequence thereof, are manipulated or adjusted.

[0152] In some aspects, the presence, amount or relative ratio of one or more bacterial species selected from Anaerotignum lactatifermentans, Anaerotruncus colihominis, Angelakisella sp1, Bacteroides cellulosilyticus, Bacteroides gallinarum, Bacteroides plebeius, Blautia coccoides group, Christensenella minuta, Christensenellaceae NG16_sp1, Clostridium hylemonae, Collinsella bouchesdurhonensis, Coprobacter secundus group, Eisenbergiella massiliensis, Emergencia timonensis, Faecalicatena orotica, Fusicatenibacter sp1, Intestinimonas butyriciproducens, Intestinimonas timonensis, Lachnospiraceae NG17_sp3, Lawsonibacter sp3, Oxalobacter formigenes, Peptoniphilaceae NG4_sp2, Prochlorotrichaceae NG20_sp1, or bacteria having a 16S rDNA sequence having at least 97%, 98%, 98.7% or 99% sequence identity to any one 16S rDNA sequence thereof, are manipulated or adjusted.

[0153] In some aspects, the presence, amount or relative ratio of one or more bacterial species selected from Anaerostipes hadrus, Christensenella timonensis, Desulfovibrio desulfuricans, Dialister invisus, Lachnoclostridium edouardi, Lachnospira pectinoschiza, Lachnospiraceae NG18_sp7, Lawsonibacter sp7, Merdimonas faecis, Negativibacillus sp1, Odoribacter splanchnicus, Roseburia faecis, Roseburia intestinalis, Ruminococcaceae NG11_sp5, Ruthenibacterium lactatiformans or bacteria having a 16S rDNA sequence having at least 97%, 98%, 98.7% or 99% sequence identity to any one 16S rDNA sequence thereof, are manipulated or adjusted.

[0154] In some aspects, the presence, amount or relative ratio of one or more bacterial species selected from Akkermansia muciniphila, Dysosmobacter welbionis, Anaerobutyricum hallii, Blautia caecimuris, Holdemania filiformis, Acetatifactor sp1, Ruminococcaceae NG14 sp1, Hungatella sp2, Bifidobacterium catenulatum group, Blautia wexlerae, Hungatella sp1, Intestinibacter bartlettii, Lachnospiraceae NG31 sp1, Lactonifactor longoviformis, Leuconostoc gelidum, Sutterella wadsworthensis, [Extibacter] muris, Alistipes onderdonkii, Collinsella intestinalis, Collinsella stercoris, Muricomes sp1, Neobitarella massiliensis, Prevotellamassilia sp2, Ruminococcaceae NG33 sp1, [Adlercreutzia] equolifaciens group, [Anaerotruncus] rubiinfantis, [Romboutsia] timonensis, Alistipes finegoldii, Alistipes indistinctus, Alistipes obesi, Alistipes putredinis, Alistipes shahii, Anaerofustis stercorihominis, Anaeromassilibacillus sp3, Barnesiella intestinihominis, Bilophila wadsworthia, Blautia faecis, Coriobacteriaceae NG5 sp1, Frisingicoccus sp3, Gordonibacter pamelaeae, Harryflintia acetispora, Lachnospiraceae NG29 sp1, Marvinbryantia sp8, Massilimaliae massiliensis, Massilimaliae timonensis, Neglecta timonensis, Parabacteroides merdae, Peptoniphilaceae NG4 sp1, Peptoniphilaceae NG4 sp3, Pseudoflavonifractor capillosus, Ruminococcaceae NG12 sp1, Ruminococcaceae NG15 sp3, Ruminococcaceae NG17 sp3, Ruthenibacterium sp1, Anaerostipes hadrus, Christensenella timonensis, Desulfovibrio desulfuricans, Dialister invisus, Lachnoclostridium edouardi, Lachnospira pectinoschiza, Lachnospiraceae NG18_sp7, Lawsonibacter sp7, Merdimonas faecis, Negativibacillus sp1, Odoribacter splanchnicus, Roseburia faecis, Roseburia intestinalis, Ruminococcaceae NG11_sp5, Ruthenibacterium lactatiformans, or bacteria having 16S rDNA having at least 94.5%, 95%, 97%, 98%, 98.7% or 99% sequence identity to any one of the 16S rDNA thereof, are manipulated or adjusted.

[0155] In some aspects, the methods exclude the administration of, the evaluation of, the detection of, or the determination of the amount or relative ratio of one or more bacterial species selected from Actinomycetaceae_NG7 sp1, Allisonella histaminiformans, Bacteroides coprocola, Bacteroides faecis, Bacteroides massiliensis, Bifidobacterium animalis, Clostridium asparagiforme group, Desulfovibrionaceae NG5_sp1, Faecalibacterium prausnitzii, Gemmiger sp2, Granulicatella adiacens, Intestinimonas massiliensis, Lactobacillus delbrueckii, Lactobacillus paracasei, Lactobacillus reuteri, Lactococcus lactis, Marvinbryantia sp5, Prevotella buccalis, Propionibacterium freudenreichii, Ruminococcaceae NG18_sp7, Scardovia wiggsiae, Slackia isoflavoniconvertens, Thermodesulfobiaceae NG1_sp1, or bacteria having 16S rDNA having at least 94.5%, 95%, 97%, 98%, 98.7% or 99% sequence identity to any one of the 16S rDNA thereof.

[0156] In some aspects, the methods exclude the administration of, the evaluation of, the detection of, or the determination of the amount or relative ratio of one or more bacterial species selected from Holdemania massiliensis, Rothia mucilaginosa, Hungatella sp2, Prevotella copri, Campylobacter concisus, [Atopobium] parvulum, Alistipes onderdonkii, Angelakisella massiliensis, Christensenellaceae NG5 sp2, Cuneatibacter caecimuris, Desulfovibrio fairfieldensis, Ruminococcaceae NG13 sp1, Ruminococcaceae NG16 sp1, [Coprococcus] catus, [Lactobacillus] fermentum, [Romboutsia] timonensis, [Ruminococcus] bromii, [Ruminococcus] gauvreaui, Actinomyces graevenitzii, Agathobaculum butyriciproducens group, Bacteroides caccae, Bacteroides intestinalis, Bittarella massiliensis, Blautia luti group, Clostridium saudiense, Corynebacterium durum, Fusicatenibacter sp2, Lachnospiraceae NG30 sp3, Massilimaliae sp1, Monoglobus pectinilyticus, Rothia dentocariosa, Rothia mucilaginosa, Ruminococcaceae NG17 sp1, Schaalia odontolytica, Streptococcus australis, Streptococcus gordonii, Streptococcus infantis group, Streptococcus parasanguinis, Streptococcus salivarius group, [Atopobium] parvulum, [Ruminococcus] gnavus, Bacteroides dorei group, Blautia sp1, Schaalia sp2, Actinomycetaceae_NG7 sp1, Allisonella histaminiformans, Bacteroides coprocola, Bacteroides faecis, Bacteroides massiliensis, Bifidobacterium animalis, Clostridium asparagiforme group, Desulfovibrionaceae NG5_sp1, Faecalibacterium prausnitzii, Gemmiger sp2, Granulicatella adiacens, Intestinimonas massiliensis, Lactobacillus delbrueckii, Lactobacillus paracasei, Lactobacillus reuteri, Lactococcus lactis, Marvinbryantia sp5, Prevotella buccalis, Propionibacterium freudenreichii, Ruminococcaceae NG18_sp7, Scardovia wiggsiae, Slackia isoflavoniconvertens, Thermodesulfobiaceae NG1_sp1, or bacteria having 16S rDNA having at least 94.5%, 95%, 97%, 98%, 98.7% or 99% sequence identity to any one of the 16S rDNA thereof.

[0157] In some aspects, the presence, amount, or relative ratio of one or more bacteria Akkermansia muciniphila, Dysosmobacter welbionis, Anaerobutyricum hallii, Blautia caecimuris, Holdemania filiformis, or bacteria having 16S rDNA having at least 94.5%, 95%, 97%, 98%, 98.7% or 99% sequence identity to any one of the 16S rDNA thereof are manipulated. In some aspects, the presence, amount, or relative ratio of one or more bacteria Acetatifactor sp1, Blautia wexlerae, Ruminococcaceae NG14 sp1, Hungatella sp2, Holdemania filiformis, or bacteria having 16S rDNA having at least 94.5%, 95%, 97%, 98%, 98.7% or 99% sequence identity to any one of the 16S rDNA thereof are manipulated. In some aspects, the presence, amount, or relative ratio of one or more bacteria Bifidobacterium catenulatum group, Blautia wexlerae, Hungatella sp1, Intestinibacter bartlettii, Lachnospiraceae NG31 sp1, Lactonifactor longoviformis, Leuconostoc gelidum, Sutterella wadsworthensis, Anaerostipes hadrus, Dialister invisus, Merdimonas faecis, Roseburia faecis, Roseburia intestinalis, Ruminococcaceae NG11_sp5, or bacteria having 16S rDNA having at least 94.5%, 95%, 97%, 98%, 98.7% or 99% sequence identity to any one of the 16S rDNA thereof are manipulated. In some aspects, the presence, amount, or relative ratio of one or more bacteria [Extibacter] muris, Alistipes onderdonkii, Collinsella intestinalis, Collinsella stercoris, Muricomes sp1, Neobitarella massiliensis, Prevotellamassilia sp2, Ruminococcaceae NG33 sp1, Desulfovibrio desulfuricans, Roseburia intestinalis, or bacteria having 16S rDNA having at least 94.5%, 95%, 97%, 98%, 98.7% or 99% sequence identity to any one of the 16S rDNA thereof are manipulated. In some aspects, the presence, amount, or relative ratio of one or more bacteria [Adlercreutzia] equolifaciens group, [Anaerotruncus]rubiinfantis, [Romboutsia] timonensis, Alistipes finegoldii, Alistipes indistinctus, Alistipes obesi, Alistipes putredinis, Alistipes shahii, Anaerofustis stercorihominis, Anaeromassilibacillus sp3, Barnesiella intestinihominis, Bilophila wadsworthia, Blautia faecis, Coriobacteriaceae NG5 sp1, Frisingicoccus sp3, Gordonibacter pamelaeae, Harryflintia acetispora, Lachnospiraceae NG29 sp1, Marvinbryantia sp8, Massilimaliae massiliensis, Massilimaliae timonensis, Neglecta timonensis, Parabacteroides merdae, Peptoniphilaceae NG4 sp1, Peptoniphilaceae NG4 sp3, Pseudoflavonifractor capillosus, Ruminococcaceae NG12 sp1, Ruminococcaceae NG15 sp3, Ruminococcaceae NG17 sp3, Ruthenibacterium sp1, Lachnoclostridium edouardi, Lachnospira pectinoschiza, Lawsonibacter sp7, Odoribacter splanchnicus, Ruthenibacterium lactatiformans, or bacteria having 16S rDNA having at least 94.5%, 95%, 97%, 98%, 98.7% or 99% sequence identity to any one of the 16S rDNA thereof are manipulated.

### III. Therapeutic Compositions

[0158] This disclosure relates to a therapeutic composition comprising an effective amount of a purified or isolated population of bacteria that have 16S rDNA sequence identity of at least 94.5% to 16S rDNA sequences of species belonging to one or more of the families Sutterellaceae, Coriobacteriaceae, Akkermansiaceae, Desulfovibrionaceae, Odoribacteraceae, or Rikenellaceae.

[0159] In some aspects, the therapeutic composition can comprise an effective amount of a purified or isolated population of bacteria that have 16S rDNA sequence identity of at least 95%, 97%, 98%, 98.7% or 99% to 16S rDNA sequences of species belonging to one or more of the families Sutterellaceae, Coriobacteriaceae, Akkermansiaceae, Desulfovibrionaceae, Odoribacteraceae, or Rikenellaceae.

[0160] In some aspects, the therapeutic composition can comprise bacteria belonging to two, three, four or more families.

[0161] The disclosure also relates to a therapeutic composition comprising an effective amount of a purified or isolated population of bacteria comprising one or more bacteria selected from Intestinimonas butyriciproducens and Anaerotruncus colihominis or bacteria having a 16S rDNA sequence having at least 97%, 98%, 98.7% or 99% sequence identity to any one 16S rDNA sequence thereof. The disclosure also relates to a therapeutic composition comprising an effective amount of a purified or isolated population of bacteria comprising one or more bacteria selected from Murimonas intestini and Faecalicatena orotica or bacteria having a 16S rDNA sequence having at least 97%, 98%, 98.7% or 99% sequence identity to any one 16S rDNA sequence thereof.

[0162] The disclosure also relates to a therapeutic composition comprising an effective amount of a purified or isolated population of bacteria comprising one or more bacteria selected from Anaerotignum lactatifermentans, Anaerotruncus colihominis, Angelakisella sp1, Bacteroides cellulosilyticus, Bacteroides gallinarum, Bacteroides plebeius, Blautia coccoides group, Christensenella minuta, Christensenellaceae NG16_sp1, Clostridium hylemonae, Collinsella bouchesdurhonensis, Coprobacter secundus group, Eisenbergiella massiliensis, Emergencia timonensis, Faecalicatena orotica, Fusicatenibacter sp1, Intestinimonas butyriciproducens, Intestinimonas timonensis, Lachnospiraceae NG17_sp3, Lawsonibacter sp3, Oxalobacter formigenes, Peptoniphilaceae NG4_sp2, Prochlorotrichaceae NG20_sp1, or bacteria having a 16S rDNA sequence having at least 97%, 98%, 98.7% or 99% sequence identity to any one 16S rDNA sequence thereof.

[0163] The disclosure also relates to a therapeutic composition comprising an effective amount of a purified or isolated population of bacteria comprising one or more bacteria selected from Anaerostipes hadrus, Christensenella timonensis, Desulfovibrio desulfuricans, Dialister invisus, Lachnoclostridium edouardi, Lachnospira pectinoschiza, Lachnospiraceae NG18_sp7, Lawsonibacter sp7, Merdimonas faecis, Negativibacillus sp1, Odoribacter splanchnicus, Roseburia faecis, Roseburia intestinalis, Ruminococcaceae NG11_sp5, Ruthenibacterium lactatiformans or bacteria having a 16S rDNA sequence having at least 97%, 98%, 98.7% or 99% sequence identity to any one 16S rDNA sequence thereof.

[0164] The disclosure also relates to a therapeutic composition comprising an effective amount of a purified or isolated population of bacteria comprising one or more bacteria selected from Akkermansia muciniphila, Dysosmobacter welbionis, Anaerobutyricum hallii, Blautia caecimuris, Holdemania filiformis, Acetatifactor sp1, Ruminococcaceae NG14 sp1, Hungatella sp2, Bifidobacterium catenulatum group, Blautia wexlerae, Hungatella sp1, Intestinibacter bartlettii, Lachnospiraceae NG31 sp1, Lactonifactor longoviformis, Leuconostoc gelidum, Sutterella wadsworthensis, [Extibacter] muris, Alistipes onderdonkii, Collinsella intestinalis, Collinsella stercoris, Muricomes sp1, Neobitarella massiliensis, Prevotellamassilia sp2, Ruminococcaceae NG33 sp1, [Adlercreutzia] equolifaciens group, [Anaerotruncus] rubiinfantis, [Romboutsia] timonensis, Alistipes finegoldii, Alistipes indistinctus, Alistipes obesi, Alistipes putredinis, Alistipes shahii, Anaerofustis stercorihominis, Anaeromassilibacillus sp3, Barnesiella intestinihominis, Bilophila wadsworthia, Blautia faecis, Coriobacteriaceae NG5 sp1, Frisingicoccus sp3, Gordonibacter pamelaeae, Harryflintia acetispora, Lachnospiraceae NG29 sp1, Marvinbryantia sp8, Massilimaliae massiliensis, Massilimaliae timonensis, Neglecta timonensis, Parabacteroides merdae, Peptoniphilaceae NG4 sp1, Peptoniphilaceae NG4 sp3, Pseudoflavonifractor capillosus, Ruminococcaceae NG12 sp1, Ruminococcaceae NG15 sp3, Ruminococcaceae NG17 sp3, Ruthenibacterium sp1, Anaerostipes hadrus, Christensenella timonensis, Desulfovibrio desulfuricans, Dialister invisus, Lachnoclostridium edouardi, Lachnospira pectinoschiza, Lachnospiraceae NG18_sp7, Lawsonibacter sp7, Merdimonas faecis, Negativibacillus sp1, Odoribacter splanchnicus, Roseburia faecis, Roseburia intestinalis, Ruminococcaceae NG11_sp5, Ruthenibacterium lactatiformans, or bacteria having 16S rDNA having at least 94.5%, 95%, 97%, 98%, 98.7% or 99% sequence identity to any one of the 16S rDNA thereof.

[0165] The disclosure also relates to a therapeutic composition comprising an effective amount of a purified or isolated population of bacteria comprising one or more bacteria selected from Akkermansia muciniphila, Bifidobacterium catenulatum group, Blautia wexlerae, Hungatella sp1, Intestinibacter bartlettii, Lachnospiraceae NG31 sp1, Lactonifactor longoviformis, Leuconostoc gelidum, Sutterella wadsworthensis, [Extibacter] muris, Collinsella intestinalis, Collinsella stercoris, Muricomes sp1, Neobitarella massiliensis, Prevotellamassilia sp2, Ruminococcaceae NG33 sp1, [Adlercreutzia] equolifaciens group, [Anaerotruncus] rubiinfantis, Alistipes finegoldii, Alistipes indistinctus, Alistipes obesi, Alistipes putredinis, Alistipes shahii, Anaerofustis stercorihominis, Anaeromassilibacillus sp3, Barnesiella intestinihominis, Bilophila wadsworthia, Blautia faecis, Coriobacteriaceae NG5 sp1, Frisingicoccus sp3, Gordonibacter pamelaeae, Harryflintia acetispora, Lachnospiraceae NG29 sp1, Marvinbryantia sp8, Massilimaliae massiliensis, Massilimaliae timonensis, Neglecta timonensis, Parabacteroides merdae, Peptoniphilaceae NG4 sp1, Peptoniphilaceae NG4 sp3, Pseudoflavonifractor capillosus, Ruminococcaceae NG12 sp1, Ruminococcaceae NG15 sp3, Ruminococcaceae NG17 sp3, Ruthenibacterium sp1, or bacteria having 16S rDNA having at least 94.5%, 95%, 97%, 98%, 98.7% or 99% sequence identity to any one of the 16S rDNA thereof.

[0166] In some aspects, the bacteria in the composition can comprise one or more bacteria selected from Anaerostipes hadrus, Dialister invisus, Merdimonas faecis, Roseburia faecis, Roseburia intestinalis, Ruminococcaceae NG11_sp5, or bacteria having 16S rDNA having at least 94.5%, 95%, 97%, 98%, 98.7% or 99% sequence identity to any one of the 16S rDNA thereof. In other aspects, the bacteria in the composition can comprise one or more bacteria selected from Desulfovibrio desulfuricans, Roseburia intestinalis, or bacteria having 16S rDNA having at least 94.5%, 95%, 97%, 98%, 98.7% or 99% sequence identity to any one of the 16S rDNA thereof. In other aspects, the bacteria in the composition can comprise one or more bacteria selected from Lachnoclostridium edouardi, Lachnospira pectinoschiza, Lawsonibacter sp7, Odoribacter splanchnicus, Ruthenibacterium lactatiformans, or bacteria having 16S rDNA having at least 94.5%, 95%, 97%, 98%, 98.7% or 99% sequence identity to any one of the 16S rDNA thereof.

[0167] In some aspects, the bacteria in the composition can comprise one or more bacteria selected from Akkermansia muciniphila, Dysosmobacter welbionis, Anaerobutyricum hallii, Blautia caecimuris, Holdemania filiformis, or bacteria having 16S rDNA having at least 94.5%, 95%, 97%, 98%, 98.7% or 99% sequence identity to any one of the 16S rDNA thereof. In some aspects, the bacteria in the composition can comprise one or more bacteria selected from Akkermansia muciniphila or bacteria having 16S rDNA having at least 94.5%, 95%, 97%, 98%, 98.7% or 99% sequence identity to any one of the 16S rDNA thereof.

[0168] In other aspects, the bacteria in the composition can comprise one or more bacteria selected from Acetatifactor sp1, Blautia wexlerae, Ruminococcaceae NG14 sp1, Hungatella sp2, Holdemania filiformis, or bacteria having 16S rDNA having at least 94.5%, 95%, 97%, 98%, 98.7% or 99% sequence identity to any one of the 16S rDNA thereof.

[0169] In other aspects, the bacteria in the composition can comprise one or more bacteria selected from Bifidobacterium catenulatum group, Blautia wexlerae, Hungatella sp1, Intestinibacter bartlettii, Lachnospiraceae NG31 sp1, Lactonifactor longoviformis, Leuconostoc gelidum, Sutterella wadsworthensis, or bacteria having 16S rDNA having at least 94.5%, 95%, 97%, 98%, 98.7% or 99% sequence identity to any one of the 16S rDNA thereof.

[0170] In other aspects, the bacteria in the composition can comprise one or more bacteria selected from [Extibacter] muris, Alistipes onderdonkii, Collinsella intestinalis, Collinsella stercoris, Muricomes sp1, Neobitarella massiliensis, Prevotellamassilia sp2, Ruminococcaceae NG33 sp1, or bacteria having 16S rDNA having at least 94.5%, 95%, 97%, 98%, 98.7% or 99% sequence identity to any one of the 16S rDNA thereof. In other aspects, the bacteria in the composition can comprise one or more bacteria selected from [Extibacter] muris, Collinsella intestinalis, Collinsella stercoris, Muricomes sp1, Neobitarella massiliensis, Prevotellamassilia sp2, Ruminococcaceae NG33 sp1, or bacteria having 16S rDNA having at least 94.5%, 95%, 97%, 98%, 98.7% or 99% sequence identity to any one of the 16S rDNA thereof.

[0171] In other aspects, the bacteria in the composition can comprise one or more bacteria selected from [Adlercreutzia] equolifaciens group, [Anaerotruncus] rubiinfantis, [Romboutsia] timonensis, Alistipes finegoldii, Alistipes indistinctus, Alistipes obesi, Alistipes putredinis, Alistipes shahii, Anaerofustis stercorihominis, Anaeromassilibacillus sp3, Barnesiella intestinihominis, Bilophila wadsworthia, Blautia faecis, Coriobacteriaceae NG5 sp1, Frisingicoccus sp3, Gordonibacter pamelaeae, Harryflintia acetispora, Lachnospiraceae NG29 sp1, Marvinbryantia sp8, Massilimaliae massiliensis, Massilimaliae timonensis, Neglecta timonensis, Parabacteroides merdae, Peptoniphilaceae NG4 sp1, Peptoniphilaceae NG4 sp3, Pseudoflavonifractor capillosus, Ruminococcaceae NG12 sp1, Ruminococcaceae NG15 sp3, Ruminococcaceae NG17 sp3, Ruthenibacterium sp1, or bacteria having 16S rDNA having at least 94.5%, 95%, 97%, 98%, 98.7% or 99% sequence identity to any one of the 16S rDNA thereof. In other aspects, the bacteria in the composition can comprise one or more bacteria selected from [Adlercreutzia] equolifaciens group, [Anaerotruncus] rubiinfantis, Alistipes finegoldii, Alistipes indistinctus, Alistipes obesi, Alistipes putredinis, Alistipes shahii, Anaerofustis stercorihominis, Anaeromassilibacillus sp3, Barnesiella intestinihominis, Bilophila wadsworthia, Blautia faecis, Coriobacteriaceae NG5 sp1, Frisingicoccus sp3, Gordonibacter pamelaeae, Harryflintia acetispora, Lachnospiraceae NG29 sp1, Marvinbryantia sp8, Massilimaliae massiliensis, Massilimaliae timonensis, Neglecta timonensis, Parabacteroides merdae, Peptoniphilaceae NG4 sp1, Peptoniphilaceae NG4 sp3, Pseudoflavonifractor capillosus, Ruminococcaceae NG12 sp1, Ruminococcaceae NG15 sp3, Ruminococcaceae NG17 sp3, Ruthenibacterium sp1, or bacteria having 16S rDNA having at least 94.5%, 95%, 97%, 98%, 98.7% or 99% sequence identity to any one of the 16S rDNA thereof.

[0172] In some aspects, the bacteria in the composition can comprise one or more bacteria selected from bacteria in any of Tables 4-6, 8, or 10-13 associated with responders (R), or bacteria having 16S rDNA having at least 94.5%, 95%, 97%, 98%, 98.7% or 99% sequence identity to any one of the 16S rDNA thereof. In some aspects, the bacteria in the composition can comprise one or more bacteria from Table 17, such as those bacteria associated with a positive spearman.rho value, or bacteria having 16S rDNA having at least 94.5%, 95%, 97%, 98%, 98.7% or 99% sequence identity to any one of the 16S rDNA thereof.

[0173] The disclosure also provides a therapeutic composition comprising a purified population of bacteria, wherein the purified or isolated population of bacteria comprises one or more bacteria having a 16S rDNA sequence that is at least 85%, at least 90%, at least 95%, at least 96%, at least 97%, at least 98%, at least 99%, or 100% identical to a 16S rDNA sequence set forth in SEQ ID NOs: 1369, 1370, 1371, 1372, 1373, 1374, 1375, 1376, 1377, 1378, 1379, 1380, 1381, 1382, 1383, 1384, 1385, 1386, 1387, 1388, 1389, 1390, 1391, 1392, 1393, 1394, 1066, 1067, 1068, 1069, 1070, 1071, 1072, 1073, 1074, 1075, 1076, 1077, 1078, 1079, 1080, 1081, 1082, 1083, 1084, and 1085.

[0174] The disclosure also provides a therapeutic composition comprising a purified population of bacteria, wherein the purified or isolated population of bacteria comprises one or more bacteria having a 16S rDNA sequence that is at least 85%, at least 90%, at least 95%, at least 96%, at least 97%, at least 98%, at least 99%, or 100% identical to a 16S rDNA sequence set forth in SEQ ID NOs: 1621, 800, 801, 802, 803, 804, 805, 806, 807, 808, 809, and 810.

[0175] The disclosure also provides a therapeutic composition comprising a purified population of bacteria, wherein the purified or isolated population of bacteria comprises one or more bacteria having a 16S rDNA sequence that is at least 85%, at least 90%, at least 95%, at least 96%, at least 97%, at least 98%, at least 99%, or 100% identical to a 16S rDNA sequence set forth in SEQ ID NOs: 1018, 1019, 1020, 1021, 1022, 1023, 1024, 1025, 1026, 1027, 1028, 1029, 1030, 1031, 1032, 1033, 1034, 1035, 1036, 1037, 1038, 1039, 1040, 1041, 1042, 1043, 1044, 1045, 1046, 1047, 1048, 1049, 1050, 1051, 1052, 1053, 1054, 1055, 1056, 1057, 1283, 1284, 1285, 1293, 1294, 1295, 1296, 1297, 1298, 1299, 1405, 1406, 1407, 1408, 1409, 1410, 1411, 1412, 1413, 1414, 1415, 1416, 1419, 1420, 1421, 1422, 1423, 1424, 1425, 1426, 1608, 1609, 1610, 1611, 1612, 1613, 1614, 1615, 1010, 1622, 1623, 1624, 1625, 1626, 1627, 1628, 1629, 1630, 1631, 1632, 1633, 1634, 1635, 1636, 1637, 1638, 1639, 1640, 1641, 1642, 1643, 1644, 1645, 1646, 1647, 1648, 1696, 1697, 1698, 1699, 1700, 1701, 1702, 1703, 1704, 1705, 1706, 1707, 1708, 1709, 1710, 1711, 1712, 1713, 1714, 1715, 1716, 1717, 1718, 1719, 1720, 1721, 1722, 1723, 1724, 1725, 1726, 1727, 1728, 1729, 1730, 1731, 1732, 1733, 1734, 1735, 1736, 1737, 1738, 1739, 1740, 1741, 1742, 1743, 1744, 1745, 1746, 1747, 1748, and 1749.

[0176] In some aspects, the bacteria in the composition comprises one or more bacteria having a 16S rDNA sequence that is at least 85%, at least 90%, at least 95%, at least 96%, at least 97%, at least 98%, at least 99%, or 100% identical to a 16S rDNA sequence set forth in SEQ ID NOs: 1018, 1019, 1020, 1021, 1022, 1023, 1024, 1025, 1026, 1027, 1028, 1029, 1030, 1031, 1032, 1033, 1034, 1035, 1036, 1037, 1038, 1039, 1040, 1041, 1042, 1043, 1044, 1045, 1046, 1047, 1048, 1049, 1050, 1051, 1052, 1053, 1054, 1055, 1056, 1057, 1297, 1298, 1299, 1010, 1696, 1697, 1698, 1699, 1700, 1701, 1702, 1703, 1704, 1705, 1706, 1707, 1708, 1709, 1710, 1711, 1712, 1713, 1714, 1715, 1716, 1717, 1718, 1719, 1720, 1721, 1722, 1723, 1724, 1725, 1726, 1727, 1728, 1729, 1730, 1731, and 1732

[0177] In some aspects, the bacteria in the composition comprises one or more bacteria having a 16S rDNA sequence that is at least 85%, at least 90%, at least 95%, at least 96%, at least 97%, at least 98%, at least 99%, or 100% identical to a 16S rDNA sequence set forth in SEQ ID NOs: 1293, 1294, 1295, 1296, 1705, 1706, 1707, 1708, 1709, 1710, 1711, 1712, 1713, 1714, 1715, 1716, 1717, 1718, 1719, 1720, 1721, 1722, 1723, 1724, 1725, 1726, 1727, 1728, 1729, 1730, 1731, and 1732.

[0178] In some aspects, the bacteria in the composition comprises one or more bacteria having a 16S rDNA sequence that is at least 85%, at least 90%, at least 95%, at least 96%, at least 97%, at least 98%, at least 99%, or 100% identical to a 16S rDNA sequence set forth in SEQ ID NOs: 1405, 1406, 1407, 1408, 1409, 1410, 1411, 1412, 1413, 1414, 1415, 1416, 1608, 1609, 1610, 1611, 1612, 1613, 1614, 1615, 1622, 1623, 1624, 1625, 1626, 1627, 1628, 1629, 1630, 1631, 1632, 1633, 1634, 1635, 1636, 1637, 1638, 1639, 1640, 1641, 1642, 1643, 1644, 1645, 1646, 1647, 1648, 1733, 1734, 1735, 1736, 1737, 1738, 1739, 1740, 1741, 1742, 1743, 1744, 1745, 1746, 1747, 1748, and 1749.

[0179] The disclosure also provides a therapeutic composition comprising a purified population of bacteria, wherein the purified or isolated population of bacteria comprises one or more bacteria having a 16S rDNA sequence that is at least 85%, at least 90%, at least 95%, at least 96%, at least 97%, at least 98%, at least 99%, or 100% identical to a 16S rDNA sequence set forth in SEQ ID NOs: 1058, 1059, 1060, 1061, 1062, 1063, 1064, 1065, 1066, 1067, 1068, 1069, 1070, 1071, 1072, 1073, 1074, 1075, 1076, 1077, 1078, 1079, 1080, 1081, 1082, 1083, 1084, 1085, 1086, 1087, 1088, 1089, 1090, 1091, 1092, 1093, 1094, 1095, 1096, 1097, 1098, 1099, 1100, 1101, 1102, 1103, 1104, 1105, 1106, 1128, 1129, 1136, 1137, 1138, 1139, 1140, 1141, 1142, 1143, 1144, 1145, 1146, 1147, 1148, 1149, 1150, 1151, 1152, 1153, 1154, 1155, 1219, 1220, 1221, 1222, 1223, 1224, 1225, 1226, 1227, 1228, 1229, 1230, 1231, 1232, 1233, 1234, 1235, 1236, 1237, 1238, 1239, 1240, 1241, 1242, 1243, 1244, 1245, 1246, 1247, 1248, 1249, 1250, 1251, 1252, 1253, 1254, 1255, 1256, 1257, 1258, 1259, 1260, 1261, 1262, 1263, 1264, 1265, 1266, 1267, 1268, 1269, 1270, 1271, 1272, 1275, 1276, 1277, 1278, 1279, 1280, 1281, 1282, 1286, 1287, 1288, 790, 791, 792, 793, 794, 795, 796, 1289, 1290, 1291, 1292, 797, 798, 799, 1300, 1301, 1302, 1303, 1304, 1305, 1306, 1307, 1308, 1309, 1310, 1311, 1312, 1313, 1314, 1315, 1316, 1317, 1318, 1319, 1320, 800, 801, 802, 803, 804, 805, 806, 807, 808, 809, 810, 1350, 1351, 1352, 1353, 1354, 1355, 1369, 1370, 1371, 1372, 1373, 1374, 1375, 1376, 1377, 1378, 1379, 1380, 1381, 1382, 1383, 1384, 1385, 1386, 1387, 1388, 1389, 1390, 1391, 1392, 1393, 1394, 1403, 1404, 1417, 1418, 1604, 1605, 1606, 1607, 1649, 1650, 1651, 1652, 1653, 172, and 1661.

[0180] The disclosure also provides a therapeutic composition comprising a purified population of bacteria, wherein the purified or isolated population of bacteria comprises one or more bacteria having a 16S rDNA sequence that is at least 85%, at least 90%, at least 95%, at least 96%, at least 97%, at least 98%, at least 99%, or 100% identical to a 16S rDNA sequence set forth in SEQ ID NOs: 1, 2, 3, 4, 5, 6, 7, 8, 9, 10, 11, 12, 13, 14, 15, 16, 17, 18, 19, 20, 21, 22, 23, 24, 25, 26, 27, 28, 29, 30, 31, 32, 33, 34, 35, 36, 37, 38, 39, 40, 41, 42, 43, 44, 45, 46, 47, 48, 49, 50, 51, 52, 53, 54, 55, 56, 57, 58, 59, 60, 61, 62, 63, 64, 65, 66, 67, 68, 69, 70, 71, 72, 73, 74, 75, 76, 77, 78, 79, 80, 81, 82, 83, 84, 85, 86, 87, 88, 89, 90, 91, 92, 93, 94, 95, 96, 97, 98, 99, 100, 101, 102, 103, 104, 105, 106, 107, 108, 109, 110, 111, 112, 113, 114, 115, 116, 117, 118, 119, 120, 121, 122, 123, 124, 125, 126, 127, 128, 129, 130, 131, 132, 133, 134, 135, 136, 137, 138, 139, 140, 141, 142, 143, 144, 145, 146, 147, 148, 149, 150, 151, 152, 153, 154, 155, 156, 157, 158, 159, 160, 161, 162, 163, 164, 165, 166, 167, 168, 169, 170, 171, 172, 173, 174, 175, 176, 177, 178, 179, 180, 181, 182, 183, 184, 185, 186, 601, 602, 603, 604, 605, 606, 607, 613, 614, 615, 616, 617, 618, 619, 622, 623, 640, 641, 643, 662, 663, 664, 665, 666, 667, 675, 676, 681, 688, 690, 691, 693, 696, 697, 699, 700, 702, 703, 704, 705, 706, 707, 708, 709, 710, 711, 712, 713, 714, 715, 716, 717, 718, 719, 720, 721, 722, 723, 724, 725, 726, 727, 728, 729, 730, 732, 733, 734, 735, 736, 737, 738, 739, 740, 741, 742, 743, 744, 746, 747, 748, 749, 750, 751, 752, 753, 754, 755, 756, 757, 758, 759, 760, 761, 762, 763, 765, 766, 767, 768, 769, 770, 771, 772, 773, 1018, 1019, 1020, 1021, 1022, 1023, 1024, 1025, 1026, 1027, 1028, 1029, 1030, 1031, 1032, 1033, 1034, 1035, 1036, 1037, 1038, 1039, 1040, 1041, 1042, 1043, 1044, 1045, 1046, 1047, 1048, 1049, 1050, 1051, 1052, 1053, 1054, 1055, 1056, 1057, 1283, 1284, 1285, 1293, 1294, 1295, 1296, 1297, 1298, 1299, 1405, 1406, 1407, 1408, 1409, 1410, 1411, 1412, 1413, 1414, 1415, 1416, 1419, 1420, 1421, 1422, 1423, 1424, 1425, 1426, 1608, 1609, 1610, 1611, 1612, 1613, 1614, 1615, 1010, 1622, 1623, 1624, 1625, 1626, 1627, 1628, 1629, 1630, 1631, 1632, 1633, 1634, 1635, 1636, 1637, 1638, 1639, 1640, 1641, 1642, 1643, 1644, 1645, 1646, 1647, 1648, 1696, 1697, 1698, 1699, 1700, 1701, 1702, 1703, 1704, 1705, 1706, 1707, 1708, 1709, 1710, 1711, 1712, 1713, 1714, 1715, 1716, 1717, 1718, 1719, 1720, 1721, 1722, 1723, 1724, 1725, 1726, 1727, 1728, 1729, 1730, 1731, 1732, 1733, 1734, 1735, 1736, 1737, 1738, 1739, 1740, 1741, 1742, 1743, 1744, 1745, 1746, 1747, 1748, 1749.

[0181] In some aspects, the bacteria in the composition comprises one or more bacteria having a 16S rDNA sequence that is at least 85%, at least 90%, at least 95%, at least 96%, at least 97%, at least 98%, at least 99%, or 100% identical to a 16S rDNA sequence set forth in SEQ ID NOs: 605, 613, 640, 641, 643, 662, 663, 664, 665, 666, 667, 681, 688, 690, 703, 732, 733, 736, 737, 738, 739, 740, 741, 742, 743, 744, 749, 754, 755, 756, 758, 765, 766, 767 and 773.

[0182] In some aspects, the bacteria in the composition comprises one or more bacteria having a 16S rDNA sequence that is at least 85%, at least 90%, at least 95%, at least 96%, at least 97%, at least 98%, at least 99%, or 100% identical to a 16S rDNA sequence set forth in SEQ ID NOs: 601, 602, 603, 604, 606, 607, 613, 614, 615, 616, 617, 618, 619, 622, 623, 675, 676, 681, 691, 693, 696, 697, 699, 700, 702, 704, 705, 706, 707, 708, 709, 710, 711, 712, 713, 714, 715, 716, 717, 718, 719, 720, 721, 722, 723, 724, 725, 726, 727, 728, 729, 730, 734, 735, 736, 746, 747, 748, 749, 750, 751, 752, 753, 757, 759, 760, 761, 762, 763, 768, 769, 770, 771 and 772.

[0183] In some aspects, the bacteria in the composition comprises one or more bacteria having a 16S rDNA sequence that is at least 85%, at least 90%, at least 95%, at least 96%, at least 97%, at least 98%, at least 99%, or 100% identical to a 16S rDNA sequence set forth in SEQ ID NOs: 2, 3, 6, 10, 12, 13, 19, 20, 21, 22, 23, 24, 34, 37, 38, 39, 42, 43, 44, 45, 46, 47, 48, 50, 51, 52, 55, 57, 58, 59, 64, 65, 66, 67, 73, 74, 75, 80, 82, 83, 84, 85, 86, 87, 88, 89, 90, 91, 92, 93, 94, 95, 96, 97, 98, 99, 100, 101, 104, 105, 106, 107, 108, 109, 110, 111, 112, 114, 115, 116, 120, 123, 129, 135, 136, 138, 139, 140, 141, 142, 143, 145, 146, 148, 153, 156, 157, 158, 161, 168, 169, 170, 173, 176, 178, 180, 182, 1018, 1019, 1020, 1021, 1022, 1023, 1024, 1025, 1026, 1027, 1028, 1029, 1030, 1031, 1032, 1033, 1034, 1035, 1036, 1037, 1038, 1039, 1040, 1041, 1042, 1043, 1044, 1045, 1046, 1047, 1048, 1049, 1050, 1051, 1052, 1053, 1054, 1055, 1056, 1057, 1297, 1298, 1299, 1010, 1696, 1697, 1698, 1699, 1700, 1701, 1702, 1703, 1704, 1705, 1706, 1707, 1708, 1709, 1710, 1711, 1712, 1713, 1714, 1715, 1716, 1717, 1718, 1719, 1720, 1721, 1722, 1723, 1724, 1725, 1726, 1727, 1728, 1729, 1730, 1731, and 1732.

[0184] In some aspects, the bacteria in the composition comprises one or more bacteria having a 16S rDNA sequence that is at least 85%, at least 90%, at least 95%, at least 96%, at least 97%, at least 98%, at least 99%, or 100% identical to a 16S rDNA sequence set forth in SEQ ID NOs: 16, 17, 18, 53, 54, 60, 77, 79, 81, 103, 119, 125, 132, 133, 134, 164, 175, 179, 184, 1293, 1294, 1295, 1296, 1705, 1706, 1707, 1708, 1709, 1710, 1711, 1712, 1713, 1714, 1715, 1716, 1717, 1718, 1719, 1720, 1721, 1722, 1723, 1724, 1725, 1726, 1727, 1728, 1729, 1730, 1731, and 1732.

[0185] In some aspects, the bacteria in the composition comprises one or more bacteria having a 16S rDNA sequence that is at least 85%, at least 90%, at least 95%, at least 96%, at least 97%, at least 98%, at least 99%, or 100% identical to a 16S rDNA sequence set forth in SEQ ID NOs: 1, 4, 5, 7, 8, 9, 11, 14, 15, 25, 26, 27, 28, 29, 30, 31, 32, 33, 35, 36, 40, 41, 61, 62, 68, 69, 70, 71, 72, 76, 78, 117, 118, 121, 122, 124, 127, 128, 130, 131, 137, 144, 147, 149, 150, 151, 152, 154, 155, 159, 160, 162, 163, 165, 166, 167, 171, 174, 177, 181, 183, 186, 1405, 1406, 1407, 1408, 1409, 1410, 1411, 1412, 1413, 1414, 1415, 1416, 1608, 1609, 1610, 1611, 1612, 1613, 1614, 1615, 1622, 1623, 1624, 1625, 1626, 1627, 1628, 1629, 1630, 1631, 1632, 1633, 1634, 1635, 1636, 1637, 1638, 1639, 1640, 1641, 1642, 1643, 1644, 1645, 1646, 1647, 1648, 1733, 1734, 1735, 1736, 1737, 1738, 1739, 1740, 1741, 1742, 1743, 1744, 1745, 1746, 1747, 1748, and 1749.

[0186] In other aspects, the therapeutic composition can comprise two, three, four, five, six, seven, eight, nine, ten, eleven, twelve, thirteen, fourteen, fifteen, sixteen, seventeen, eighteen, nineteen, twenty, twenty-five, thirty, or more bacterial species.

[0187] In some aspects, the therapeutic composition does not comprise one or more bacteria selected from Actinomycetaceae_NG7 sp1, Allisonella histaminiformans, Bacteroides coprocola, Bacteroides faecis, Bacteroides massiliensis, Bifidobacterium animalis, Clostridium asparagiforme group, Desulfovibrionaceae NG5_sp1, Faecalibacterium prausnitzii, Gemmiger sp2, Granulicatella adiacens, Intestinimonas massiliensis, Lactobacillus delbrueckii, Lactobacillus paracasei, Lactobacillus reuteri, Lactococcus lactis, Marvinbryantia sp5, Prevotella buccalis, Propionibacterium freudenreichii, Ruminococcaceae NG18_sp7, Scardovia wiggsiae, Slackia isoflavoniconvertens, Thermodesulfobiaceae NG1_sp1, or bacteria having 16S rDNA having at least 94.5%, 95%, 97%, 98%, 98.7% or 99% sequence identity to any one of the 16S rDNA thereof.

[0188] In some aspects, the therapeutic composition does not comprise one or more bacteria selected from Holdemania massiliensis, Rothia mucilaginosa, Hungatella sp2, Prevotella copri, Campylobacter concisus, [Atopobium] parvulum, Alistipes onderdonkii, Angelakisella massiliensis, Christensenellaceae NG5 sp2, Cuneatibacter caecimuris, Desulfovibrio fairfieldensis, Ruminococcaceae NG13 sp1, Ruminococcaceae NG16 sp1, [Coprococcus] catus, [Lactobacillus] fermentum, [Romboutsia] timonensis, [Ruminococcus]bromii, [Ruminococcus] gauvreauii, Actinomyces graevenitzii, Agathobaculum butyriciproducens group, Bacteroides caccae, Bacteroides intestinalis, Bittarella massiliensis, Blautia luti group, Clostridium saudiense, Corynebacterium durum, Fusicatenibacter sp2, Lachnospiraceae NG30 sp3, Massilimaliae sp1, Monoglobus pectinilyticus, Rothia dentocariosa, Rothia mucilaginosa, Ruminococcaceae NG17 sp1, Schaalia odontolytica, Streptococcus australis, Streptococcus gordonii, Streptococcus infantis group, Streptococcus parasanguinis, Streptococcus salivarius group, [Atopobium] parvulum, [Ruminococcus]gnavus, Bacteroides dorei group, Blautia sp1, Schaalia sp2, Actinomycetaceae_NG7 sp1, Allisonella histaminiformans, Bacteroides coprocola, Bacteroides faecis, Bacteroides massiliensis, Bifidobacterium animalis, Clostridium asparagiforme group, Desulfovibrionaceae NG5_sp1, Faecalibacterium prausnitzii, Gemmiger sp2, Granulicatella adiacens, Intestinimonas massiliensis, Lactobacillus delbrueckii, Lactobacillus paracasei, Lactobacillus reuteri, Lactococcus lactis, Marvinbryantia sp5, Prevotella buccalis, Propionibacterium freudenreichii, Ruminococcaceae NG18_sp7, Scardovia wiggsiae, Slackia isoflavoniconvertens, Thermodesulfobiaceae NG1_sp1, or bacteria having 16S rDNA having at least 94.5%, 95%, 97%, 98%, 98.7% or 99% sequence identity to any one of the 16S rDNA thereof.

[0189] In some aspects, the therapeutic composition does not comprise one or more bacteria selected from Actinomycetaceae_NG7 sp1, Allisonella histaminiformans, Bacteroides coprocola, Bacteroides faecis, Bacteroides massiliensis, Bifidobacterium animalis, Clostridium asparagiforme group, Desulfovibrionaceae NG5_sp1, Faecalibacterium prausnitzii, Gemmiger sp2, Granulicatella adiacens, Intestinimonas massiliensis, Lactobacillus delbrueckii, Lactobacillus paracasei, Lactobacillus reuteri, Lactococcus lactis, Marvinbryantia sp5, Prevotella buccalis, Propionibacterium freudenreichii, Ruminococcaceae NG18_sp7, Scardovia wiggsiae, Slackia isoflavoniconvertens, Thermodesulfobiaceae NG1_sp1, or bacteria having 16S rDNA having at least 94.5%, 95%, 97%, 98%, 98.7% or 99% sequence identity to any one of the 16S rDNA thereof.

[0190] In some aspects, the therapeutic composition does not comprise Allisonella histaminiformans, Bacteroides faecis, Bacteroides massiliensis, Desulfovibrionaceae NG5_sp1, Gemmiger sp2, Intestinimonas massiliensis, Marvinbryantia sp5, Propionibacterium freudenreichii, Slackia isoflavoniconvertens, Thermodesulfobiaceae NG1_sp1, or bacteria having 16S rDNA having at least 94.5%, 95%, 97%, 98%, 98.7% or 99% sequence identity to any one of the 16S rDNA thereof. In other aspects, the therapeutic composition does not comprise Bifidobacterium animalis, Faecalibacterium prausnitzii, or bacteria having 16S rDNA having at least 94.5%, 95%, 97%, 98%, 98.7% or 99% sequence identity to any one of the 16S rDNA thereof. In other aspects, the therapeutic composition does not comprise Granulicatella adiacens, Lactococcus lactis, Scardovia wiggsiae, or bacteria having 16S rDNA having at least 94.5%, 95%, 97%, 98%, 98.7% or 99% sequence identity to any one of the 16S rDNA thereof.

[0191] In some aspects, the therapeutic composition does not comprise one or more bacteria selected from Rothia mucilaginosa, Prevotella copri, Campylobacter concisus, [Atopobium] parvulum, Angelakisella massiliensis, Christensenellaceae NG5 sp2, Cuneatibacter caecimuris, Desulfovibrio fairfieldensis, Ruminococcaceae NG13 sp1, Ruminococcaceae NG16 sp1, [Coprococcus] catus, [Lactobacillus] fermentum, [Ruminococcus] bromii, [Ruminococcus] gauvreauii, Actinomyces graevenitzii, Agathobaculum butyriciproducens group, Bacteroides caccae, Bacteroides intestinalis, Bittarella massiliensis, Blautia luti group, Clostridium saudiense, Corynebacterium durum, Fusicatenibacter sp2, Lachnospiraceae NG30 sp3, Massilimaliae sp1, Monoglobus pectinilyticus, Rothia dentocariosa, Rothia mucilaginosa, Ruminococcaceae NG17 sp1, Schaalia odontolytica, Streptococcus australis, Streptococcus gordonii, Streptococcus infantis group, Streptococcus parasanguinis, Streptococcus salivarius group, [Atopobium] parvulum, [Ruminococcus] gnavus, Bacteroides dorei group, Blautia sp1, Schaalia sp2, or bacteria having 16S rDNA having at least 94.5%, 95%, 97%, 98%, 98.7% or 99% sequence identity to any one of the 16S rDNA thereof.

[0192] In some aspects, the therapeutic composition does not comprise Holdemania massiliensis, Rothia mucilaginosa, Hungatella sp2, Prevotella copri, Campylobacter concisus, or bacteria having 16S rDNA having at least 94.5%, 95%, 97%, 98%, 98.7% or 99% sequence identity to any one of the 16S rDNA thereof. In some aspects, the therapeutic composition does not comprise Rothia mucilaginosa, Prevotella copri, Campylobacter concisus, or bacteria having 16S rDNA having at least 94.5%, 95%, 97%, 98%, 98.7% or 99% sequence identity to any one of the 16S rDNA thereof.

[0193] In some aspects, the therapeutic composition does not comprise Rothia mucilaginosa, [Atopobium] parvulum, Holdemania massiliensis, Prevotella copri, Campylobacter concisus, or bacteria having 16S rDNA having at least 94.5%, 95%, 97%, 98%, 98.7% or 99% sequence identity to any one of the 16S rDNA thereof. In some aspects, the therapeutic composition does not comprise Rothia mucilaginosa, [Atopobium] parvulum, Prevotella copri, Campylobacter concisus, or bacteria having 16S rDNA having at least 94.5%, 95%, 97%, 98%, 98.7% or 99% sequence identity to any one of the 16S rDNA thereof.

[0194] In some aspects, the therapeutic composition does not comprise Alistipes onderdonkii, Angelakisella massiliensis, Christensenellaceae NG5 sp2, Cuneatibacter caecimuris, Desulfovibrio fairfieldensis, Ruminococcaceae NG13 sp1, Ruminococcaceae NG16 sp1, or bacteria having 16S rDNA having at least 94.5%, 95%, 97%, 98%, 98.7% or 99% sequence identity to any one of the 16S rDNA thereof. In some aspects, the therapeutic composition does not comprise Angelakisella massiliensis, Christensenellaceae NG5 sp2, Cuneatibacter caecimuris, Desulfovibrio fairfieldensis, Ruminococcaceae NG13 sp1, Ruminococcaceae NG16 sp1, or bacteria having 16S rDNA having at least 94.5%, 95%, 97%, 98%, 98.7% or 99% sequence identity to any one of the 16S rDNA thereof.

[0195] In some aspects, the therapeutic composition does not comprise [Coprococcus] catus, [Lactobacillus] fermentum, [Romboutsia] timonensis, [Ruminococcus] bromii, [Ruminococcus] gauvreaui, Actinomyces graevenitzii, Agathobaculum butyriciproducens group, Bacteroides caccae, Bacteroides intestinalis, Bittarella massiliensis, Blautia luti group, Clostridium saudiense, Corynebacterium durum, Fusicatenibacter sp2, Lachnospiraceae NG30 sp3, Massilimaliae sp1, Monoglobus pectinilyticus, Rothia dentocariosa, Rothia mucilaginosa, Ruminococcaceae NG17 sp1, Schaalia odontolytica, Streptococcus australis, Streptococcus gordonii, Streptococcus infantis group, Streptococcus parasanguinis, Streptococcus salivarius group, or bacteria having 16S rDNA having at least 94.5%, 95%, 97%, 98%, 98.7% or 99% sequence identity to any one of the 16S rDNA thereof. In some aspects, the therapeutic composition does not comprise [Coprococcus] catus, [Lactobacillus] fermentum, [Ruminococcus] bromii, [Ruminococcus] gauvreauii, Actinomyces graevenitzii, Agathobaculum butyriciproducens group, Bacteroides caccae, Bacteroides intestinalis, Bittarella massiliensis, Blautia luti group, Clostridium saudiense, Corynebacterium durum, Fusicatenibacter sp2, Lachnospiraceae NG30 sp3, Massilimaliae sp1, Monoglobus pectinilyticus, Rothia dentocariosa, Rothia mucilaginosa, Ruminococcaceae NG17 sp1, Schaalia odontolytica, Streptococcus australis, Streptococcus gordonii, Streptococcus infantis group, Streptococcus parasanguinis, Streptococcus salivarius group, or bacteria having 16S rDNA having at least 94.5%, 95%, 97%, 98%, 98.7% or 99% sequence identity to any one of the 16S rDNA thereof.

[0196] In some aspects, the therapeutic composition does not comprise [Atopobium] parvulum, [Ruminococcus] gnavus, Bacteroides dorei group, Blautia sp1, Schaalia sp2, or bacteria having 16S rDNA having at least 94.5%, 95%, 97%, 98%, 98.7% or 99% sequence identity to any one of the 16S rDNA thereof.

[0197] In some aspects, the therapeutic composition does not comprise one or more bacteria selected from bacteria in any of Tables 4-6, or 9-13 associated with non-responders (R), or bacteria having 16S rDNA having at least 94.5%, 95%, 97%, 98%, 98.7% or 99% sequence identity to any one of the 16S rDNA thereof.

[0198] In some aspects, the therapeutic composition does not comprise one or more bacteria having a 16S rDNA sequence that is at least 85%, at least 90%, at least 95%, at least 96%, at least 97%, at least 98%, at least 99%, or 100% identical to a 16S rDNA sequence set forth in SEQ ID NOs: 187, 188, 189, 190, 191, 192, 193, 194, 195, 196, 197, 198, 199, 200, 201, 202, 203, 204, 205, 206, 207, 208, 209, 210, 211, 212, 213, 214, 215, 216, 217, 218, 219, 220, 221, 222, 223, 224, 225, 226, 227, 228, 229, 230, 231, 232, 233, 234, 235, 236, 237, 238, 239, 240, 241, 242, 243, 244, 245, 246, 247, 248, 249, 250, 251, 252, 253, 254, 255, 256, 257, 258, 259, 260, 261, 262, 263, 264, 265, 266, 267, 268, 269, 270, 271, 272, 273, 274, 275, 276, 277, 278, 279, 280, 281, 282, 283, 284, 285, 286, 287, 288, 289, 290, 291, 292, 293, 294, 295, 296, 297, 298, 299, 300, 301, 302, 303, 304, 305, 306, 307, 308, 309, 310, 311, 312, 313, 314, 315, 316, 317, 318, 319, 320, 321, 322, 323, 324, 325, 326, 327, 328, 329, 330, 331, 332, 333, 334, 335, 336, 337, 338, 339, 340, 341, 342, 343, 344, 345, 346, 347, 348, 349, 350, 351, 352, 353, 354, 355, 356, 357, 358, 359, 360, 361, 362, 363, 364, 365, 366, 367, 368, 369, 370, 371, 372, 373, 374, 375, 376, 377, 378, 379, 380, 381, 382, 383, 384, 385, 386, 387, 388, 389, 390, 391, 392, 393, 394, 395, 396, 397, 398, 399, 400, 401, 402, 403, 404, 405, 406, 407, 408, 409, 410, 411, 412, 413, 414, 415, 416, 417, 418, 419, 420, 421, 422, 423, 424, 425, 426, 427, 428, 429, 430, 431, 432, 433, 434, 435, 436, 437, 438, 439, 440, 441, 442, 443, 444, 445, 446, 447, 448, 449, 450, 451, 452, 453, 454, 455, 456, 457, 458, 459, 460, 461, 462, 463, 464, 465, 466, 467, 468, 469, 470, 471, 472, 473, 474, 475, 476, 477, 478, 479, 480, 481, 482, 483, 484, 485, 486, 487, 488, 489, 490, 491, 492, 493, 494, 495, 496, 497, 498, 499, 500, 501, 502, 503, 504, 505, 506, 507, 508, 509, 510, 511, 512, 513, 514, 515, 516, 517, 518, 519, 520, 521, 522, 523, 524, 525, 526, 527, 528, 529, 530, 531, 532, 533, 534, 535, 536, 537, 538, 539, 540, 541, 542, 543, 544, 545, 546, 547, 548, 549, 550, 551, 552, 553, 554, 555, 556, 557, 558, 559, 560, 561, 562, 563, 564, 565, 566, 567, 568, 569, 570, 571, 572, 573, 574, 575, 576, 577, 578, 579, 580, 581, 582, 583, 584, 585, 586, 587, 588, 589, 590, 591, 592, 593, 594, 595, 596, 597, 598, 599, 600, 608, 609, 610, 611, 612, 620, 621, 622, 623, 624, 625, 626, 627, 628, 629, 630, 631, 632, 633, 634, 635, 636, 637, 638, 639, 642, 644, 645, 646, 647, 648, 649, 650, 651, 652, 653, 654, 655, 656, 657, 658, 659, 660, 661, 668, 669, 670, 671, 672, 673, 674, 677, 678, 679, 680, 682, 683, 684, 685, 686, 687, 689, 692, 694, 695, 698, 701, 731, 734, 764, 1011, 1012, 1013, 1014, 1015, 1016, 1017, 774, 1107, 1108, 1109, 1110, 1111, 1112, 1113, 1114, 1115, 1116, 1117, 1118, 1119, 1120, 1121, 1122, 1123, 1124, 1125, 1126, 1127, 1130, 1131, 1132, 1133, 1134, 1135, 1156, 1157, 1158, 1159, 1160, 1161, 1162, 1163, 1164, 1165, 1166, 1167, 1168, 1169, 1170, 1171, 1172, 1173, 1174, 1175, 1176, 1177, 1178, 1179, 1180, 1181, 1182, 1183, 1184, 1185, 1186, 1187, 1188, 1189, 1190, 1191, 1192, 1193, 1194, 1195, 1196, 1197, 1198, 1199, 1200, 1201, 1202, 1203, 1204, 1205, 1206, 1207, 1208, 1209, 1210, 1211, 1212, 1213, 1214, 1215, 1216, 1217, 1218, 775, 776, 777, 778, 779, 780, 781, 782, 783, 784, 785, 786, 787, 788, 789, 1321, 1322, 1323, 1324, 1325, 1326, 1327, 1328, 1329, 1330, 1331, 1332, 1333, 1334, 1335, 1336, 1337, 1338, 1339, 1340, 1341, 1342, 1343, 1344, 1345, 1346, 1347, 1348, 1349, 1356, 1357, 1358, 1359, 1360, 1361, 1362, 1363, 1364, 1365, 1366, 1367, 1368, 1395, 1396, 1397, 1398, 1399, 1400, 1401, 1402, 1427, 1428, 1429, 1430, 1431, 1432, 1433, 1434, 1435, 1436, 1437, 1438, 1439, 1440, 1441, 1442, 1443, 1444, 1445, 1446, 1447, 1448, 1449, 1450, 1451, 1452, 1453, 1454, 1455, 1456, 1457, 1458, 1459, 1460, 1461, 1462, 1463, 1464, 1465, 1466, 1467, 1468, 1469, 1470, 1471, 1472, 1473, 1474, 1475, 1476, 1477, 1478, 1479, 1480, 1481, 1482, 1483, 1484, 1485, 1486, 1487, 1488, 1489, 1490, 1491, 1492, 1493, 1494, 1495, 1496, 1497, 1498, 1499, 1500, 1501, 1502, 1503, 1504, 1505, 931, 932, 933, 934, 935, 936, 937, 938, 939, 940, 941, 942, 943, 944, 945, 946, 947, 948, 949, 950, 951, 952, 953, 954, 955, 956, 957, 958, 959, 960, 961, 962, 963, 964, 965, 966, 967, 968, 969, 970, 971, 972, 973, 974, 975, 976, 977, 978, 979, 980, 981, 982, 983, 984, 985, 986, 987, 988, 989, 990, 991, 992, 993, 994, 995, 996, 997, 998, 999, 1000, 1001, 1002, 1003, 1004, 1005, 1006, 1007, 1008, 1009, 1506, 1507, 1508, 1509, 1510, 1511, 1512, 1513, 1514, 1515, 1516, 1517, 1518, 1519, 1520, 1521, 1522, 1523, 1524, 1525, 1526, 1527, 1528, 1529, 1530, 1531, 1532, 1533, 1534, 1535, 1536, 1537, 1538, 1539, 1540, 1541, 1542, 1543, 1544, 1545, 1546, 1547, 1548, 1549, 1550, 1551, 1552, 1553, 1554, 1555, 1556, 1557, 1558, 1559, 1560, 1561, 1562, 1563, 1564, 1565, 1566, 1567, 1568, 1569, 1570, 1571, 1572, 1573, 1574, 1575, 1576, 1577, 1578, 1579, 1580, 1581, 1582, 1583, 1584, 1585, 1586, 1587, 1588, 1589, 1590, 1591, 1592, 1593, 1594, 1595, 1596, 1597, 1598, 1599, 1600, 1601, 1602, 1603, 1616, 1617, 1618, 1619, 1620, 1654, 1655, 1656, 1657, 1658, 1659, 1660, 1662, 1663, 1664, 1665, 1666, 1667, 1668, 1669, 1670, 1671, 1672, 1673, 1674, 1675, 1676, 1677, 1678, 1679, 1680, 1681, 1682, 1683, 1684, 1685, 1686, 1687, 1688, 1689, 1690, 1691, 1692, 1693, 1694, 1695, 1750, 1751, 1752, 1753, 1754, 1755, and 1756.

[0199] In some aspects, the therapeutic composition does not comprise one or more bacteria having a 16S rDNA sequence that is at least 85%, at least 90%, at least 95%, at least 96%, at least 97%, at least 98%, at least 99%, or 100% identical to a 16S rDNA sequence set forth in SEQ ID NOs: 608, 610, 611, 612, 620, 621, 622, 623, 624, 625, 626, 630, 631, 632, 633, 634, 635, 636, 637, 638, 639, 642, 644, 645, 646, 647, 648, 649, 650, 651, 652, 653, 654, 655, 656, 657, 658, 659, 660, 661, 668, 669, 670, 671, 672, 673, 674, 677, 678, 679, 680, 682, 683, 684, 685, 686, 687, 689, 692, 694, 695, 698, 701, 731, 734 and 764.

[0200] In some aspects, the therapeutic composition does not comprise one or more bacteria having a 16S rDNA sequence that is at least 85%, at least 90%, at least 95%, at least 96%, at least 97%, at least 98%, at least 99%, or 100% identical to a 16S rDNA sequence set forth in SEQ ID NOs: 608, 609, 610, 611, 612, 620, 621, 624, 625, 626, 627, 628, 629, 630, 631, 632, 633, 634, 635, 636, 637, 638, 639, 642, 644, 645, 646, 647, 648, 649, 650, 651, 652, 653, 654, 655, 656, 657, 658, 659, 660, 661, 668, 669, 670, 671, 672, 673, 674, 677, 678, 679, 680, 682, 683, 684, 685, 686, 687, 689, 692, 694, 695, 698, 701, 731 and 764.

[0201] In some aspects, the therapeutic composition does not comprise one or more bacteria having a 16S rDNA sequence that is at least 85%, at least 90%, at least 95%, at least 96%, at least 97%, at least 98%, at least 99%, or 100% identical to a 16S rDNA sequence set forth in SEQ ID NOs: 188, 213, 245, 323, 331, 332, 376, 455, 509, 516, 538, 582, 1156, 1157, 1158, 1159, 1160, 1161, 1162, 1163, 1164, 1165, 1166, 1167, 1168, 1169, 1170, 1171, 1172, 1173, 1174, 1175, 1176, 1177, 1178, 1179, 1180, 1181, 1182, 1183, 1184, 1185, 1186, 1187, 1188, 1189, 1190, 1191, 1192, 1193, 1194, 1195, 1196, 1197, 1198, 1199, 1200, 1201, 1202, 1203, 1204, 1205, 1206, 1207, 1208, 1209, 1210, 1211, 1212, 1213, 1214, 1215, 1216, 1217, 1218, o1321, 1322, 1323, 1324, 1325, 1326, 1327, 1328, 1329, 1330, 1331, 1332, 1333, 1334, 1335, 1336, 1337, 1338, 1339, 1340, 1341, 1342, 1343, 1344, 1345, 1346, 1347, 1348, and 1349.

[0202] In some aspects, the therapeutic composition does not comprise one or more bacteria having a 16S rDNA sequence that is at least 85%, at least 90%, at least 95%, at least 96%, at least 97%, at least 98%, at least 99%, or 100% identical to a 16S rDNA sequence set forth in SEQ ID NOs: 187, 189, 190, 191, 192, 193, 194, 195, 196, 197, 198, 199, 200, 201, 202, 203, 204, 205, 211, 214, 216, 217, 218, 219, 220, 221, 222, 224, 225, 226, 227, 228, 229, 230, 231, 232, 233, 234, 235, 236, 237, 238, 239, 240, 241, 242, 243, 244, 246, 247, 248, 253, 254, 255, 257, 258, 259, 263, 264, 265, 267, 268, 269, 270, 271, 272, 273, 277, 283, 286, 289, 290, 291, 292, 293, 294, 295, 296, 297, 298, 299, 300, 301, 302, 303, 304, 305, 306, 307, 308, 309, 310, 311, 312, 313, 314, 315, 316, 317, 318, 319, 320, 321, 322, 324, 325, 326, 327, 328, 329, 330, 333, 334, 335, 336, 337, 338, 339, 340, 341, 342, 343, 344, 345, 346, 347, 348, 349, 350, 351, 352, 353, 354, 355, 356, 357, 358, 359, 360, 361, 362, 363, 364, 365, 366, 367, 368, 369, 370, 371, 372, 373, 374, 375, 377, 378, 379, 380, 381, 382, 383, 384, 385, 386, 387, 389, 390, 391, 392, 393, 394, 395, 396, 397, 398, 399, 400, 401, 402, 403, 409, 410, 411, 412, 413, 414, 415, 418, 421, 424, 425, 428, 429, 430, 431, 432, 433, 434, 435, 436, 437, 438, 439, 440, 441, 442, 443, 444, 445, 447, 449, 450, 452, 453, 454, 456, 457, 458, 460, 462, 463, 464, 465, 466, 467, 468, 469, 471, 472, 473, 474, 475, 476, 478, 479, 480, 481, 483, 484, 486, 487, 488, 489, 490, 491, 492, 493, 494, 495, 496, 497, 498, 499, 500, 501, 502, 503, 504, 505, 506, 507, 508, 510, 511, 512, 513, 514, 515, 520, 521, 522, 523, 524, 525, 526, 527, 528, 529, 530, 531, 537, 539, 540, 542, 543, 544, 545, 546, 547, 548, 550, 551, 552, 553, 554, 555, 560, 561, 564, 565, 566, 573, 574, 577, 579, 581, 583, 584, 585, 586, 587, 588, 589, 591, 594, 595, 596, 597, 598, 599, 600, 774, 1113, 1114, 1115, 1116, 1117, 1118, 1119, 1120, 1121, 1122, 1123, 1124, 1125, 1126, 1127, 1130, 1131, 1132, 1133, 1134, 1135, 1356, 1357, 1358, 1359, 1360, 1361, 1362, 1395, 1396, 1397, 1398, 1399, 1400, 1401, 1402, 1616, 1617, 1618, 1619, 1620, 1662, 1663, 1664, 1665, 1666, 1667, 1668, 1669, 1670, 1671, 1672, 1673, 1674, 1675, 1676, 1677, 1678, 1679, 1680, 1681, 1682, 1683, 1684, 1685, 1686, 1687, 1688, 1689, 1690, 1691, 1692, 1693, 1694, 1695, 1755, and 1756.

[0203] In some aspects, the therapeutic composition does not comprise one or more bacteria having a 16S rDNA sequence that is at least 85%, at least 90%, at least 95%, at least 96%, at least 97%, at least 98%, at least 99%, or 100% identical to a 16S rDNA sequence set forth in SEQ ID NOs: 206, 207, 208, 209, 210, 212, 215, 223, 249, 250, 251, 252, 256, 260, 261, 262, 266, 274, 275, 276, 278, 279, 280, 281, 282, 284, 285, 287, 388, 404, 405, 406, 407, 408, 416, 417, 419, 420, 422, 423, 426, 427, 446, 448, 451, 459, 461, 482, 485, 517, 518, 519, 532, 533, 534, 535, 536, 549, 556, 557, 558, 559, 562, 563, 567, 568, 569, 570, 571, 572, 575, 576, 580, 590, 593, 1363, 1364, 1365, 1366, 1367, 1368, 1506, 1507, 1508, 1509, 1510, 1511, 1512, 1513, 1514, 1515, 1516, 1517, 1518, 1519, 1520, 1521, 1522, 1523, 1524, 1525, 1526, 1527, 1528, 1529, 1530, 1531, 1532, 1533, 1534, 1535, 1536, 1537, 1538, 1539, 1540, 1541, 1542, 1543, 1544, 1545, 1546, 1547, 1548, 1549, 1550, 1551, 1552, 1553, 1554, 1555, 1556, 1557, 1558, 1559, 1560, 1561, 1562, 1563, 1564, 1565, 1566, 1567, 1568, 1569, 1570, 1571, 1572, 1573, 1574, 1575, 1576, 1577, 1578, 1579, 1580, 1581, 1582, 1583, 1584, 1585, 1586, 1587, 1588, 1589, 1590, 1591, 1592, 1593, 1594, 1595, 1596, 1597, 1598, 1599, 1600, 1601, 1602, 1603, 1750, 1751, 1752, 1753, and 1754.

[0204] In some aspects, a therapeutic composition can reduce the rate of tumor growth in an animal model. In some embodiments, a therapeutic composition can reduce the rate of tumor growth in a human subject. In some embodiments, a therapeutic composition can reduce the rate of tumor growth in an in vitro cell culture model. In some embodiments, a therapeutic composition can reduce the rate of tumor growth in an in situ model.

[0205] In some aspects, the method of treating a cancer may use any of the therapeutic compositions listed herein, including combinations of genera from therapeutic compositions and/or combinations of species from therapeutic compositions. These methods of treatment, including combination treatment with other anti-cancer agents, are described in further detail below.

[0206] In some aspects, the bacteria in the therapeutic compositions may be identified by species, operational taxonomic unit (OTU), whole genome sequence or other methods known in the art for defining different types of bacteria.

[0207] Bacterial compositions can comprise two types of bacteria (termed “binary combinations” or “binary pairs”) or greater than two types of bacteria. Bacterial compositions that comprise three types of bacteria are termed “ternary combinations”. For instance, a bacterial composition can comprise at least 2, at least 3, at least 4, at least 5, at least 6, at least 7, at least 8, at least 9, at least 10, at least 11, at least 12, at least 13, at least 14, at least 15, at least 16, at least 17, at least 18, at least 19, at least 20, or at least 21, 22, 23, 24, 25, 26, 27, 28, 29 30, 31, 32, 33, 34, 35, 36, 37, 38, 39, or at least 40, at least 50 or greater than 50 types of bacteria, as defined by species or operational taxonomic unit (OTU), or otherwise as provided herein.

[0208] In another aspect, the number of types of bacteria present in a bacterial composition is at or below a known value. For example, in such embodiments the bacterial composition comprises 50 or fewer types of bacteria, such as 49, 48, 47, 46, 45, 44, 43, 42, 41, 40, 39, 38, 37, 36, 35, 34, 33, 32, 31, 30, 29, 28, 27, 26, 25, 24, 23, 22, 21, 20, 19, 18, 17, 16, 15, 14, 13, 12, 11, or 10 or fewer, or 9 or fewer types of bacteria, 8 or fewer types of bacteria, 7 or fewer types of bacteria, 6 or fewer types of bacteria, 5 or fewer types of bacteria, 4 or fewer types of bacteria, or 3 or fewer types of bacteria. In another aspect, a bacterial composition comprises from 2 to no more than 40, from 2 to no more than 30, from 2 to no more than 20, from 2 to no more than 15, from 2 to no more than 10, or from 2 to no more than 5 types of bacteria.

[0209] A bacterial composition useful in a method described herein can be prepared comprising at least one type of isolated bacteria, wherein a first type and a second type are independently chosen from the genera or species listed herein. In another aspect, the first and/or second OTUs can be characterized by one or more of the variable regions of the 16S sequence (V1-V9). These regions in bacteria are defined by nucleotides 69-99, 137-242, 433-497, 576-682, 822-879, 986-1043, 1117-1173, 1243-1294 and 1435-1465 respectively using numbering based on the E. coli system of nomenclature. (e.g., Brosius et al., Complete nucleotide sequence of a 16S ribosomal RNA gene from Escherichia coli, Proc Nat Acad Sci 75(10):4801-4805 (1978)). In some aspects, at least one of the V1, V2, V3, V4, V5, V6, V7, V8, and V9 regions are used to characterize an OTU. In one aspect, the V1, V2, and V3 regions are used to characterize an OTU. In another aspect, the V3, V4, and V5 regions are used to characterize an OTU. In another embodiment, the V4 region is used to characterize an OTU.

[0210] Methods of the disclosure include administration of a combination of therapeutic agents and compositions. The therapy can be administered in any suitable manner known in the art. For example, the therapies may be administered sequentially (at different times) or concurrently (at the same time). In some aspects, the therapies are in a separate composition. In some aspects, the therapies are in the same composition.

[0211] Various combinations of the therapies can be employed, for example, one therapy or composition designated “A” and another therapy or composition designated “B”:

A/B/A B/A/B B/B/A A/A/B A/B/B B/A/A A/B/B/B B/A/B/B
B/B/B/A B/B/A/B A/A/B/B A/B/A/B A/B/B/A B/B/A/A
B/A/B/A B/A/A/B A/A/A/B B/A/A/A A/B/A/A A/A/B/A

[0212] The therapies and compositions of the disclosure can be administered by the same route of administration or by different routes of administration. In some aspects, the therapy is administered intracolonically, intravenously, intramuscularly, subcutaneously, topically, orally, transdermally, intraperitoneally, intraorbitally, by implantation, intrathecally, intraventricularly, or intranasally. In some embodiments, the microbial modulator is administered intravenously, intramuscularly, subcutaneously, topically, orally, transdermally, intraperitoneally, intraorbitally, by implantation, intrathecally, intraventricularly, or intranasally.

[0213] In some aspects, the compositions of the disclosure are administered in a therapeutically effective or sufficient amount of each of the at least one isolated or purified population of bacteria or each of the at least two, 3, 4, 5, 6, 7, 8, 9, 10 11, 12, 13, 14, or 15 isolated or purified populations of bacteria of the microbial modulator compositions of the embodiments that is administered to a human will be at least about 1×10³ viable colony forming units (CFU) of bacteria or at least about 1×10⁴, 1×10⁵, 1×10⁶, 1×10⁷, 1×10⁸, 1×10⁹, 1×10¹⁰, 1×10¹¹, 1×10¹², 1×10¹³, 1×10¹⁴, 1×10¹⁵ viable CFU (or any derivable range therein). In some aspects, a single dose will contain an amount of bacteria (such as a specific bacteria or species, genus, or family described herein) of at least, at most, or exactly 1×10⁴, 1×10⁵, 1×10⁶, 1×10⁷, 1×10⁸, 1×10⁹, 1×10¹⁰, 1×10¹¹, 1×10¹², 1×10¹³, 1×10¹⁴, 1×10¹⁵ or greater than 1×10¹⁵ viable CFU (or any derivable range therein) of a specified bacteria. In some aspects, a single dose will contain at least, at most, or exactly 1×10⁴, 1×10⁵, 1×10⁶, 1×10⁷, 1×10⁸, 1×10⁹, 1×10¹⁰, 1×10¹¹, 1×10¹², 1×10¹³, 1×10¹⁴, 1×10¹⁵ or greater than 1×10¹⁵ viable CFU (or any derivable range therein) of total bacteria. In specific aspects, the bacteria are provided in spore form or as sporulated bacteria. In particular aspects, the concentration of spores of each isolated or purified population of bacteria, for example of each species, subspecies or strain, is at least, at most, or exactly 1×10⁴, 1×10⁵, 1×10⁶, 1×10⁷, 1×10⁸, 1×10⁹, 1×10¹⁰, 1×10¹¹, 1×10¹², 1×10¹³, 1×10¹⁴, 1×10¹⁵ or greater than 1×10¹⁵ (or any derivable range therein) viable bacterial spores per gram of composition or per administered dose. In some aspects, the composition comprises or the method comprises administration of at least, at most, or exactly 1, 2, 3, 4, 5, 6, 7, 8, 9, 10, 11, 12, 13, 14, 15, 20, 25, 30, 40, or 50 (or any derivable range therein) of different bacterial species, different bacterial genus, or different bacterial family.

[0214] In some aspects, the therapeutically effective or sufficient amount of each of the at least one isolated or purified population of bacteria or each of the at least two, 3, 4, 5, 6, 7, 8, 9, 10 11, 12, 13, 14, or 15 isolated or purified populations of bacteria of the microbial modulator compositions of the embodiments that is administered to a human will be at least about 1×10³ cells of bacteria or at least about 1×10⁴, 1×10⁵, 1×10⁶, 1×10⁷, 1×10⁸, 1×10⁹, 1×10¹⁰, 1×10¹¹, 1×10¹², 1×10¹³, 1×10¹⁴, 1×10¹⁵ cells (or any derivable range therein). In some aspects, a single dose will contain an amount of bacteria (such as a specific bacteria or species, genus, or family described herein) of at least, at most, or exactly 1×10⁴, 1×10⁵, 1×10⁶, 1×10⁷, 1×10⁸, 1×10⁹, 1×10¹⁰, 1×10¹¹, 1×10¹², 1×10¹³, 1×10¹⁴, 1×10¹⁵ cells (or any derivable range therein) of a specified bacteria. In some aspects, a single dose will contain at least, at most, or exactly 1×10⁴, 1×10⁵, 1×10⁶, 1×10⁷, 1×10⁸, 1×10⁹, 1×10¹⁰, 1×10¹¹, 1×10¹², 1×10¹³, 1×10¹⁴, 1×10¹⁵ cells (or any derivable range therein) of total bacteria. In specific aspects, the bacteria are provided in spore form or as sporulated bacteria. In particular aspects, the concentration of spores of each isolated or purified population of bacteria, for example of each species, subspecies or strain, is at least, at most, or exactly 1×10⁴, 1×10⁵, 1×10⁶, 1×10⁷, 1×10⁸, 1×10⁹, 1×10¹⁰, 1×10¹¹, 1×10¹², 1×10¹³, 1×10¹⁴, 1×10¹⁵ or greater than 1×10¹⁵ (or any derivable range therein) viable bacterial spores per gram of composition or per administered dose. In some aspects, the composition comprises or the method comprises administration of at least, at most, or exactly 1, 2, 3, 4, 5, 6, 7, 8, 9, 10, 11, 12, 13, 14, 15, 20, 25, 30, 40, or 50 (or any derivable range therein) of different bacterial species, different bacterial genus, or different bacterial family.

[0215] The treatments may include various “unit doses.” Unit dose is defined as containing a predetermined-quantity of the therapeutic composition. The quantity to be administered, and the particular route and formulation, is within the skill of determination of those in the clinical arts. A unit dose need not be administered as a single injection but may comprise continuous infusion over a set period of time. In some aspects, a unit dose comprises a single administrable dose.

[0216] The quantity to be administered, both according to number of treatments and unit dose, depends on the treatment effect desired. An effective dose, for example, of CPI, is understood to refer to an amount necessary to achieve a particular effect. In some aspects, it is contemplated that doses in the range from 10 mg/kg to 200 mg/kg can affect the protective capability of these agents. Thus, it is contemplated that the doses include doses of about 0.1, 0.5, 1, 5, 10, 15, 20, 25, 30, 35, 40, 45, 50, 55, 60, 65, 70, 75, 80, 85, 90, 100, 105, 110, 115, 120, 125, 130, 135, 140, 145, 150, 155, 160, 165, 170, 175, 180, 185, 190, 195, and 200, 300, 400, 500, 1000 μg/kg, mg/kg, μg/day, or mg/day or any range derivable therein. Furthermore, such doses can be administered at multiple times during a day, and/or on multiple days, weeks, or months.

[0217] In some aspects, the therapeutically effective or sufficient amount of a therapeutic composition comprising for example, a CPI, that is administered to a human will be in the range of about 0.01 to about 50 mg/kg of patient body weight whether by one or more administrations. In some aspects, the therapeutic agent used is about 0.01 to about 45 mg/kg, about 0.01 to about 40 mg/kg, about 0.01 to about 35 mg/kg, about 0.01 to about 30 mg/kg, about 0.01 to about 25 mg/kg, about 0.01 to about 20 mg/kg, about 0.01 to about 15 mg/kg, about 0.01 to about 10 mg/kg, about 0.01 to about 5 mg/kg, or about 0.01 to about 1 mg/kg administered daily, for example. In some aspects, the therapeutic agent is administered at 15 mg/kg. However, other dosage regimens may be useful. In one embodiment, a therapeutic agent described herein is administered to a subject at a dose of about 100 mg, about 200 mg, about 300 mg, about 400 mg, about 500 mg, about 600 mg, about 700 mg, about 800 mg, about 900 mg, about 1000 mg, about 1100 mg, about 1200 mg, about 1300 mg or about 1400 mg on day 1 of 21-day cycles. The dose may be administered as a single dose or as multiple doses (e.g., 2 or 3 doses), such as infusions. The progress of this therapy is easily monitored by conventional techniques.

[0218] In some aspects, the effective dose of the therapeutic composition comprising for example, a CPI, is one which can provide a blood level of about 1 μM to 150 μM. In another aspect, the effective dose provides a blood level of about 4 μM to 100 μM; or about 1 μM to 100 μM; or about 1 μM to 50 μM; or about 1 μM to 40 μM; or about 1 μM to 30 μM; or about 1 μM to 20 μM; or about 1 μM to 10 μM; or about 10 μM to 150 μM; or about 10 μM to 100 μM; or about 10 μM to 50 μM; or about 25 μM to 150 μM; or about 25 μM to 100 μM; or about 25 μM to 50 μM; or about 50 μM to 150 μM; or about 50 μM to 100 μM (or any range derivable therein). In other aspects, the dose can provide the following blood level of the agent, for example, a CPI, that results from a therapeutic agent being administered to a subject: about, at least about, or at most about 1, 2, 3, 4, 5, 6, 7, 8, 9, 10, 11, 12, 13, 14, 15, 16, 17, 18, 19, 20, 21, 22, 23, 24, 25, 26, 27, 28, 29, 30, 31, 32, 33, 34, 35, 36, 37, 38, 39, 40, 41, 42, 43, 44, 45, 46, 47, 48, 49, 50, 51, 52, 53, 54, 55, 56, 57, 58, 59, 60, 61, 62, 63, 64, 65, 66, 67, 68, 69, 70, 71, 72, 73, 74, 75, 76, 77, 78, 79, 80, 81, 82, 83, 84, 85, 86, 87, 88, 89, 90, 91, 92, 93, 94, 95, 96, 97, 98, 99, or 100 μM or any range derivable therein. In some aspects, the therapeutic agent that is administered to a subject is metabolized in the body to a metabolized therapeutic agent, in which case the blood levels may refer to the amount of that agent. Alternatively, to the extent the therapeutic agent is not metabolized by a subject, the blood levels discussed herein may refer to the unmetabolized therapeutic agent.

[0219] Precise amounts of the therapeutic composition also depend on the judgment of the practitioner and are peculiar to each individual. Factors affecting dose include physical and clinical state of the patient, the route of administration, the intended goal of treatment (alleviation of symptoms versus cure) and the potency, stability and toxicity of the particular therapeutic substance or other therapies a subject may be undergoing.

[0220] It will be understood by those skilled in the art and made aware that dosage units of μg/kg or mg/kg of body weight can be converted and expressed in comparable concentration units of μg/ml or mM (blood levels), such as 4 μM to 100 μM. It is also understood that uptake is species and organ/tissue dependent. The applicable conversion factors and physiological assumptions to be made concerning uptake and concentration measurement are well-known and would permit those of skill in the art to convert one concentration measurement to another and make reasonable comparisons and conclusions regarding the doses, efficacies and results described herein.

### IV. Methods for Evaluating Bacteria

[0221] A. Determining Bacterial Genera and Species

[0222] In some aspects, the bacterial genera or species for use in a therapeutic composition is as described in this disclosure.

[0223] In some aspects, the bacterial genera or species for use in a therapeutic composition are those genera or species that are found to be prevalent in the microbiome of subjects that respond to an anti-cancer therapy, e.g., subjects who are responders. In some aspects, the genera or species are more prevalent in the microbiome of a responder compared to the microbiome of a subject who does not respond to an anti-cancer therapy, e.g., a non-responder. In other aspects, the genera or species are more prevalent in the microbiome of a responder compared to the microbiome of a healthy subject that does not have a cancer and thus has not been treated with an anti-cancer therapy.

[0224] In some aspects, the bacterial genera or species for use in a therapeutic composition are those genera or species that are found to be more abundant in the microbiome of subjects that respond to an anti-cancer therapy, e.g., subjects who are responders. In some aspects, the genera or species are more abundant in the microbiome of a responder compared to the microbiome of a subject who does not respond to an anti-cancer therapy, e.g., a non-responder. In other aspects, the genera or species are more abundant in the microbiome of a responder compared to the microbiome of a healthy subject that does not have a cancer and thus has not been treated with an anti-cancer therapy.

[0225] In some aspects, the subject is considered a responder if, following treatment with an anti-cancer therapy, the subject shows a complete response to the therapy, e.g., a complete remission of the cancer. In other aspects, the subject is considered a responder if, following treatment with an anti-cancer therapy, the subject shows a complete response to the therapy or a partial response to the therapy, e.g., a reduction in tumor size or tumor load. In other aspects, the subject is considered a responder if, following treatment with an anti-cancer therapy, the subject shows a complete response to the therapy, a partial response to the therapy, or a stable response to the therapy, e.g. the subject's tumor size or tumor load does not increase.

[0226] B. 16S rDNA Sequence Identity

[0227] In some embodiments, the 16S rDNA sequence is obtained or determined for a bacterial species to be classified. A percent identity between the query sequence and the compared sequences is determined. If the percent identify of the query sequence is determined to be above a defined threshold, then the bacterial species to be classified is classified as member of the same family of the compared sequences.

[0228] In some aspects, the threshold sequence identity is 94.5%. In some aspects, the threshold sequence identity is 98%, 98.7%. In some aspects, the threshold sequence identity is 94.8%. In some aspects, the threshold sequence identity is 94.5%, 94.6%, 94.7%, 94.8%, 94.9%, 95.0%, 95.1%, 95.2%, 95.3%, 95.4%, 95.5%, 95.6%, 95.7%, 95.8%, 95.9%, 96.0%, 96.1%, 96.2%, 96.3%, 96.4%, 96.5%, 96.6%, 96.7%, 96.8%, 96.9%, 97.0%, 97.1%, 97.2%, 97.3%, 97.4%, 97.5%, 97.6%, 97.7%, 97.8%, 97.9%, 98.0%, 98.1%, 98.2%, 98.3%, 98.4%, 98.5%, 98.6%, 98%, 98.7%, 98.8%, 98.9% 99.0%, 99.1%, 99.2%, 99.3%, 99.4%, 99.5%. 99.6%, 99.7%, 99.8%, 99.9% or 100%. In some aspects, the threshold sequence identify is at least 94.5%, 95%, 97%, 98%, 98.7% or 99%.

[0229] C. Methods for Determining 16S rDNA Sequences

[0230] Operational taxonomic units (OTUs) can be identified, for example, by sequencing of the 16S rRNA gene, by sequencing of a specific hypervariable region of this gene (i.e., V1, V2, V3, V4, V5, V6, V7, V8, or V9), or by sequencing of any combination of hypervariable regions from this gene (e.g., V1-3 or V3-5). The bacterial 16S rDNA is approximately 1500 nucleotides in length and is used in reconstructing the evolutionary relationships and sequence similarity of one bacterial isolate to another using phylogenetic approaches. 16S rDNA sequences are used for phylogenetic reconstruction as they are in general highly conserved, but contain specific hypervariable regions that harbor sufficient nucleotide diversity to differentiate genera and species of most microbes. Using well known techniques to determine a full 16S rDNA sequence or the sequence of any hypervariable region of the 16S rDNA sequence, genomic DNA is extracted from a bacterial sample, the 16S rDNA (full region or specific hypervariable regions) amplified using polymerase chain reaction (PCR), the PCR products cleaned, and nucleotide sequences delineated to determine the genetic composition of 16S rDNA gene or subdomain of the gene. If full 16S rDNA sequencing is performed, the sequencing method used may be, but is not limited to, Sanger sequencing or a next-generation sequencing method, such as an Illumina (sequencing by synthesis) method using barcoded primers allowing for multiplex reactions. If one or more hypervariable regions are used, such as the V4 region, the sequencing may be, but is not limited to being, performed using the Sanger method or using a next-generation sequencing method, such as an Illumina (sequencing by synthesis) method using barcoded primers allowing for multiplex reactions. In some cases, the 16S rDNA sequence associated with an OTU, species, or strain of bacteria is a composite of multiple 16S rDNA sequences harbored by the OTU, species, or strain.

[0231] In some aspects, bacterial species identified as described herein are identified by sequence identity to 16S rDNA sequences as known in the art and described herein.

### V. Methods for Preparing a Bacterial Composition for Administration to a Subject

[0232] Methods for producing bacterial compositions are known in the art. For example, a composition can be produced generally via three main processes, combined with one or more methods of mixing. The steps are: organism banking, organism production, and preservation.

[0233] For banking, the strains included in the bacterial composition can be, for example isolated directly from a specimen, obtained from a banked stock, optionally cultured on a nutrient agar or in broth that supports growth to generate viable biomass, and the biomass optionally preserved in multiple aliquots in long-term storage.

[0234] Stocks of organisms may prepared for storage, e.g., by adding cryoprotectants, lyoprotectants, and/or osmoprotectants.

[0235] In general, such methods described for producing bacterial compositions and for banking, production, and preservation, are identified in U.S. Pat. Nos. 10,864,235; 10,064,900; 10,064,901; U.S. Patent Application Publication No. US20160158295A1; US20160243172A1; and published PCT application No. WO2020118054A1, each of which is incorporated by reference herein.

### VI. Immuno-Oncology (Immunotherapy) Drugs that can be Used in Conjunction with the Therapeutic Compositions

[0236] In some aspects of the disclosure, the therapeutic composition is an adjunct treatment administered in combination with an immunotherapy drug, generally an immune checkpoint inhibitor (e.g., an antibody, such as a monoclonal antibody). The terms “immune checkpoint inhibitor,” “immune checkpoint blockade,” and “immune checkpoint therapy” are used interchangeably. Examples of such immunotherapy drugs include PD-1 inhibitors (e.g., nivolumab, and pembrolizumab), PD-L1 inhibitors (e.g., atezolizumab, avelumab, and durvalumab), and CTLA-4 inhibitors (e.g., ipilimumab and tremelimumab). In some aspects, more than one checkpoint inhibitor is administered. As is known in the art, dosing of checkpoint inhibitors can be repeated at, for example, 2-3 week intervals, for as long as the patient continues to have a response or stable disease, or as otherwise determined to be appropriate by those of skill in the art.

[0237] Examples of cancers that can benefit from treatment with the therapeutic compositions in conjunction with a checkpoint inhibitor, e.g., an inhibitor of PD-1, PD-L1, or CTLA-4, include but are not limited to a metastatic melanoma, a melanoma of the skin, a non-small cell lung cancer, a kidney cancer, a bladder cancer, a head and neck cancer, a Merkel cell skin cancer (Merkel cell carcinoma), and a Hodgkin lymphoma.

[0238] In some aspects, the checkpoint inhibitor is selected from an anti-PD-1 antibody, an anti-CTLA-4 antibody, an anti-PD-L1 antibody or combinations thereof.

[0239] In some aspects, the immune checkpoint inhibitors are blocking antibodies that bind to PD-1, e.g., nivolumab, cemiplimab (REGN2810), geptanolimab (CBT-501), pacmilimab (CX-072), dostarlimab (TSR-042), sintilimab, tislelizumab, and pembrolizumab; PD-L1, e.g., durvalumab (MEDI4736), avelumab, lodapolimab (LY-3300054), CX-188, and atezolizumab; or CTLA-4, e.g., ipilimumab and tremelimumab. In some aspect, combination of one or more of such antibodies can be used. In some aspects, the checkpoint inhibitor is selected from pembrolizumab, nivolumab, atezolizumab, avelumab, durvalumab, ipilimumab, pidilizumab, AMP-224, AMP-514, STI-A1110, TSR-042, RG-7446, BMS-936559, BMS-936558, MK-3475, CT O11, MPDL3280A, MEDI-4736, MSB-0020718C, AUR-012, LAG-3, OX40 inhibitors, OX40L inhibitors, TIGIT inhibitors, STI-A1010 or combinations thereof.

[0240] Tremelimumab, nivolumab, durvalumab and atezolizumab are described, for example, in U.S. Pat. Nos. 6,682,736, 8,008,449, 8,779,108 and 8,217,149, respectively. In some aspects, atezolizumab can be replaced by another immune checkpoint antibody, such as another blocking antibody that binds to CTLA-4, PD-1 (e.g., sintilimab, tislelizumab, pembrolizumab, or an antigen binding portion thereof), PD-L1, or a bispecific blocking antibody that binds to any checkpoint inhibitor. In selecting a different blocking antibody, those of ordinary skill in the art will know the suitable dose and administration schedule from the literature. Suitable examples of anti-CTLA-4 antibodies are those described in U.S. Pat. No. 6,207,156. Other suitable examples of anti-PD-L1 antibodies are those described in U.S. Pat. No. 8,168,179, which particularly concerns treating PD-L1 over-expressing cancers with human anti-PD-L1 antibodies, including chemotherapy combinations; U.S. Pat. No. 9,402,899, which particularly concerns treating tumors with antibodies to PD-L1, including chimeric, humanized and human antibodies; and U.S. Pat. No. 9,439,962, which particularly concerns treating cancers with anti-PD-L1 antibodies and chemotherapy.

[0241] In some aspects, the anticancer agent is a combination of a checkpoint inhibitor and a chemotherapy agent.

[0242] The term “chemotherapy” refers to various treatment modalities affecting cell proliferation and/or survival. The treatment may include administration of alkylating agents, antimetabolites, anthracyclines, plant alkaloids, topoisomerase inhibitors, and other antitumor agents, including monoclonal antibodies and kinase inhibitors. The term “neoadjuvant chemotherapy” relates to a preoperative therapy regimen consisting of a panel of hormonal, chemotherapeutic and/or antibody agents, which is aimed to shrink the primary tumor, thereby rendering local therapy (surgery or radiotherapy) less destructive or more effective, enabling breast conserving surgery and evaluation of responsiveness of tumor sensitivity towards specific agents in vivo.

[0243] Chemotherapeutic drugs can kill proliferating tumor cells, enhancing the necrotic areas created by the overall treatment. The drugs can thus enhance the action of the primary therapeutic agents of the present disclosure.

[0244] Chemotherapeutic agents used in cancer treatment can be divided into several groups, depending on their mechanism of action. Some chemotherapeutic agents directly damage DNA and RNA. By disrupting replication of the DNA such chemotherapeutics either completely halt replication, or result in the production of nonsense DNA or RNA. This category includes, for example, cisplatin (PLATINOL®), daunorubicin (CERUBIDINE®), doxorubicin (ADRIAMYCIN®), and etoposide (VEPESID®). Another group of cancer chemotherapeutic agents interferes with the formation of nucleotides or deoxyribonucleotides, so that RNA synthesis and cell replication is blocked. Examples of drugs in this class include methotrexate (ABITREXATE®), mercaptopurine (PURINETHOL®), fluorouracil (ADRUCIL®), and hydroxyurea (HYDREA®). A third class of chemotherapeutic agents affects the synthesis or breakdown of mitotic spindles, and, as a result, interrupts cell division. Examples of drugs in this class include vinblastine (VELBAN®), vincristine (ONCOVIN®) and taxenes, such as, paclitaxel (TAXOL®), and docetaxel (TAXOTERE®).

[0245] In some aspects, the anticancer agents include, and methods disclosed herein include treatment with, a taxane derivative, e.g., paclitaxel or docetaxel. In some aspects, the anticancer agents include, and methods disclosed herein include treatment with, an anthracycline derivative, such as, for example, doxorubicin, daunorubicin, and aclacinomycin. In some aspects, the anticancer agents include, and methods disclosed herein include treatment with, a topoisomerase inhibitor, such as, for example, camptothecin, topotecan, irinotecan, 20-S camptothecin, 9-nitro-camptothecin, 9-amino-camptothecin, or water soluble camptothecin analog G1147211. Anticancer agents and treatment with any combination of these and other chemotherapeutic drugs is specifically contemplated.

[0246] Patients can receive chemotherapy immediately following surgical removal of a tumor. This approach is commonly referred to as adjuvant chemotherapy. However, chemotherapy can be administered also before surgery, as so-called neoadjuvant chemotherapy.

### VII. Methods of Treating

[0247] In general, the therapeutic compositions are administered to a patient diagnosed with a cancer, e.g., melanoma, for example, metastasized melanoma in conjunction with an immunotherapy drug such as checkpoint inhibitor, e.g., an inhibitor of PD-1, PD-L1, or CTLA-4. A therapeutic composition can be administered prior to checkpoint inhibitor (e.g., PD-1/PD-L1 inhibitor or CTLA-4 inhibitor) treatment, for example, at least one week, two weeks, or three weeks in advance of the treatment. In some cases, administration of the therapeutic composition is continued after the initiation of checkpoint inhibitor (e.g., PD-1/PD-L1 or CTLA-4 inhibitor) treatment. The therapeutic compositions may be administered daily, weekly, or monthly to induce and/or maintain an appropriate microbiome in the patient's GI tract.

[0248] Prior to initiating administration of a therapeutic composition, the patient may be subject to antibiotic treatment (e.g., with vancomycin, neomycin, rifaximin, or other antibiotic) and/or a bowel cleanse. In some cases, the antibiotic is a non-absorbable or minimally absorbable antibiotic. In some cases, no bowel preparation is performed. Such preparation may increase the speed and or efficacy of engraftment of one or more species in the therapeutic compositions that are associated with an improvement in checkpoint inhibitor (e.g., PD-1/PD-L1 inhibitor) efficacy.

[0249] This disclosure also relates to methods of treating or preventing or reducing risk of a cancer in a mammalian subject in need thereof comprising administering to the subject a therapeutic composition comprising an effective amount of a purified or isolated population of bacteria that have 16S rDNA sequence identity of at least 94.5% to 16S rDNA sequences of species belonging to one or more of the families Sutterellaceae, Coriobacteriaceae, Akkermansiaceae, Desulfovibrionaceae, Odoribacteraceae, or Rikenellaceae.

[0250] In some aspects, the bacteria have 16S rDNA sequence identity of at least 95%, 97%, 98%, 98.7% or 99% to 16S rDNA sequences of species belonging to one or more of the families Sutterellaceae, Coriobacteriaceae, Akkermansiaceae, Desulfovibrionaceae, Odoribacteraceae, or Rikenellaceae.

[0251] In some aspects, the therapeutic composition of the provided methods comprises bacteria belonging to two, three, four or more families.

[0252] The disclosure also relates to methods of treating or preventing or reducing risk of a cancer in a mammalian subject in need thereof comprising administering to the subject a therapeutic composition comprising an effective amount of a purified or isolated population of bacteria comprising one or more bacteria selected from Intestinimonas butyriciproducens and Anaerotruncus colihominis, or bacteria having 16S rDNA having at least 94.5%, 95%, 97%, 98%, 98.7% or 99% sequence identity to any one of the 16S rDNA thereof. In some aspects, the 16S rDNA sequence of Intestinimonas butyriciproducens is selected from SEQ ID NOs: 1369, 1370, 1371, 1372, 1373, 1374, 1375, 1376, 1377, 1378, 1379, 1380, 1381, 1382, 1383, 1384, 1385, 1386, 1387, 1388, 1389, 1390, 1391, 1392, 1393, and 1394, and the 16S rDNA sequence of Anaerotruncus colihominis is selected from SEQ ID NOs: 1066, 1067, 1068, 1069, 1070, 1071, 1072, 1073, 1074, 1075, 1076, 1077, 1078, 1079, 1080, 1081, 1082, 1083, 1084, and 1085.

[0253] The disclosure also relates to methods of treating or preventing or reducing risk of a cancer in a mammalian subject in need thereof comprising administering to the subject a therapeutic composition comprising an effective amount of a purified or isolated population of bacteria comprising one or more bacteria selected from Murimonas intestini and Faecalicatena orotica, or bacteria having 16S rDNA having at least 94.5%, 95%, 97%, 98%, 98.7% or 99% sequence identity to any one of the 16S rDNA thereof. In some aspects, the 16S rDNA sequence of Murimonas intestini is SEQ ID NO: 1621 and the 16S rDNA sequence of Faecalicatena orotica is selected from SEQ ID NOs: 800, 801, 802, 803, 804, 805, 806, 807, 808, 809, and 810.

[0254] The disclosure also relates to methods of treating or preventing or reducing risk of a cancer in a mammalian subject in need thereof comprising administering to the subject a therapeutic composition comprising an effective amount of a purified or isolated population of bacteria comprising one or more bacteria selected from Anaerostipes hadrus, Christensenella timonensis, Desulfovibrio desulfuricans, Dialister invisus, Lachnoclostridium edouardi, Lachnospira pectinoschiza, Lachnospiraceae NG18_sp7, Lawsonibacter sp7, Merdimonas faecis, Negativibacillus sp1, Odoribacter splanchnicus, Roseburia faecis, Roseburia intestinalis, Ruminococcaceae NG11_sp5, Ruthenibacterium lactatiformans, or bacteria having 16S rDNA having at least 94.5%, 95%, 97%, 98%, 98.7% or 99% sequence identity to any one of the 16S rDNA thereof. In some aspects, the 16S rDNA sequence of Anaerostipes hadrus is selected from SEQ ID NOs: 1018, 1019, 1020, 1021, 1022, 1023, 1024, 1025, 1026, 1027, 1028, 1029, 1030, 1031, 1032, 1033, 1034, 1035, 1036, 1037, 1038, 1039, 1040, 1041, 1042, 1043, 1044, 1045, 1046, 1047, 1048, 1049, 1050, 1051, 1052, 1053, 1054, 1055, 1056, and 1057, the 16S rDNA sequence of Christensenella timonensis is selected from SEQ ID NOs: 1283, 1284, and 1285, the 16S rDNA sequence of Desulfovibrio desulfuricans is selected from SEQ ID NOs: 1293, 1294, 1295, and 1296, the 16S rDNA sequence of Dialister invisus is selected from SEQ ID NOs: 1297, 1298, and 1299, the 16S rDNA sequence of Lachnoclostridium edouardi is selected from SEQ ID NOs: 1405, 1406, 1407, 1408, 1409, and 1410, the 16S rDNA sequence of Lachnospira pectinoschiza is selected from SEQ ID NOs: 1411, 1412, 1413, 1414, 1415, and 1416, the 16S rDNA sequence of Lachnospiraceae NG18_sp7 is selected from SEQ ID NOs: 1419, 1420, 1421, 1422, 1423, 1424, 1425, and 1426, the 16S rDNA sequence of Lawsonibacter sp7 is selected from SEQ ID NOs: 1608, 1609, 1610, 1611, 1612, 1613, 1614, and 1615, the 16S rDNA sequence of Merdimonas faecis is SEQ ID NO: 1010, the 16S rDNA sequence of Odoribacter splanchnicus is selected from SEQ ID NOs: 1622, 1623, 1624, 1625, 1626, 1627, 1628, 1629, 1630, 1631, 1632, 1633, 1634, 1635, 1636, 1637, 1638, 1639, 1640, 1641, 1642, 1643, 1644, 1645, 1646, 1647, and 1648, the 16S rDNA sequence of Roseburia faecis is selected from SEQ ID NOs: 1696, 1697, 1698, 1699, 1700, 1701, 1702, 1703, and 1704, the 16S rDNA sequence of Roseburia intestinalis is selected from SEQ ID NOs: 1705, 1706, 1707, 1708, 1709, 1710, 1711, 1712, 1713, 1714, 1715, 1716, 1717, 1718, 1719, 1720, 1721, 1722, 1723, 1724, 1725, 1726, 1727, 1728, 1729, 1730, 1731, and 1732, or the 16S rDNA sequence of Ruthenibacterium lactatiformans is selected from SEQ ID NOs: 1733, 1734, 1735, 1736, 1737, 1738, 1739, 1740, 1741, 1742, 1743, 1744, 1745, 1746, 1747, 1748, and 1749.

[0255] The disclosure also relates to methods of treating or preventing or reducing risk of a cancer in a mammalian subject in need thereof comprising administering to the subject a therapeutic composition comprising an effective amount of a purified or isolated population of bacteria comprising one or more bacteria selected from Anaerostipes hadrus, Dialister invisus, Merdimonas faecis, Roseburia faecis, Roseburia intestinalis, Ruminococcaceae NG11_sp5, or bacteria having 16S rDNA having at least 94.5%, 95%, 97%, 98%, 98.7% or 99% sequence identity to any one of the 16S rDNA thereof. In some aspects, the 16S rDNA sequence of Anaerostipes hadrus is selected from SEQ ID NOs: 1018, 1019, 1020, 1021, 1022, 1023, 1024, 1025, 1026, 1027, 1028, 1029, 1030, 1031, 1032, 1033, 1034, 1035, 1036, 1037, 1038, 1039, 1040, 1041, 1042, 1043, 1044, 1045, 1046, 1047, 1048, 1049, 1050, 1051, 1052, 1053, 1054, 1055, 1056, and 1057, the 16S rDNA sequence of Dialister invisus is selected from SEQ ID NOs: 1297, 1298, and 1299, the 16S rDNA sequence of Merdimonas faecis is SEQ ID NO: 1010, the 16S rDNA sequence of Roseburia faecis is selected from SEQ ID NOs: 1696, 1697, 1698, 1699, 1700, 1701, 1702, 1703, and 1704, or the 16S rDNA sequence of Roseburia intestinalis is selected from SEQ ID NOs: 1705, 1706, 1707, 1708, 1709, 1710, 1711, 1712, 1713, 1714, 1715, 1716, 1717, 1718, 1719, 1720, 1721, 1722, 1723, 1724, 1725, 1726, 1727, 1728, 1729, 1730, 1731, and 1732.

[0256] The disclosure also relates to methods of treating or preventing or reducing risk of a cancer in a mammalian subject in need thereof comprising administering to the subject a therapeutic composition comprising an effective amount of a purified or isolated population of bacteria comprising one or more bacteria selected from Desulfovibrio desulfuricans, Roseburia intestinalis, or bacteria having 16S rDNA having at least 94.5%, 95%, 97%, 98%, 98.7% or 99% sequence identity to any one of the 16S rDNA thereof. In some aspects, the 16S rDNA sequence of Desulfovibrio desulfuricans is selected from SEQ ID NOs: 1293, 1294, 1295, and 1296 or the 16S rDNA sequence of Roseburia intestinalis is selected from SEQ ID NOs: 1705, 1706, 1707, 1708, 1709, 1710, 1711, 1712, 1713, 1714, 1715, 1716, 1717, 1718, 1719, 1720, 1721, 1722, 1723, 1724, 1725, 1726, 1727, 1728, 1729, 1730, 1731, and 1732.

[0257] The disclosure also relates to methods of treating or preventing or reducing risk of a cancer in a mammalian subject in need thereof comprising administering to the subject a therapeutic composition comprising an effective amount of a purified or isolated population of bacteria comprising one or more bacteria selected from Lachnoclostridium edouardi, Lachnospira pectinoschiza, Lawsonibacter sp7, Odoribacter splanchnicus, Ruthenibacterium lactatiformans, or bacteria having 16S rDNA having at least 94.5%, 95%, 97%, 98%, 98.7% or 99% sequence identity to any one of the 16S rDNA thereof. In some aspects, the 16S rDNA sequence of Lachnoclostridium edouardi is selected from SEQ ID NOs: 1405, 1406, 1407, 1408, 1409, and 1410, the 16S rDNA sequence of Lachnospira pectinoschiza is selected from SEQ ID NOs: 1411, 1412, 1413, 1414, 1415, and 1416, the 16S rDNA sequence of Lawsonibacter sp7 is selected from SEQ ID NOs: 1608, 1609, 1610, 1611, 1612, 1613, 1614, and 1615, the 16S rDNA sequence of Odoribacter splanchnicus is selected from SEQ ID NOs: 1622, 1623, 1624, 1625, 1626, 1627, 1628, 1629, 1630, 1631, 1632, 1633, 1634, 1635, 1636, 1637, 1638, 1639, 1640, 1641, 1642, 1643, 1644, 1645, 1646, 1647, and 1648, or the 16S rDNA sequence of Ruthenibacterium lactatiformans is selected from SEQ ID NOs: 1733, 1734, 1735, 1736, 1737, 1738, 1739, 1740, 1741, 1742, 1743, 1744, 1745, 1746, 1747, 1748, and 1749.

[0258] The disclosure also relates to methods of treating or preventing or reducing risk of a cancer in a mammalian subject in need thereof comprising administering to the subject a therapeutic composition comprising an effective amount of a purified or isolated population of bacteria comprising one or more bacteria selected from Anaerotignum lactatifermentans, Anaerotruncus colihominis, Angelakisella sp1, Bacteroides cellulosilyticus, Bacteroides gallinarum, Bacteroides plebeius, Blautia coccoides group, Christensenella minuta, Christensenellaceae NG16_sp1, Clostridium hylemonae, Collinsella bouchesdurhonensis, Coprobacter secundus group, Eisenbergiella massiliensis, Emergencia timonensis, Faecalicatena orotica, Fusicatenibacter sp1, Intestinimonas butyriciproducens, Intestinimonas timonensis, Lachnospiraceae NG17_sp3, Lawsonibacter sp3, Oxalobacter formigenes, Peptoniphilaceae NG4_sp2, Prochlorotrichaceae NG20_sp1, or bacteria having 16S rDNA having at least 94.5%, 95%, 97%, 98%, 98.7% or 99% sequence identity to any one of the 16S rDNA thereof. In some aspects, the 16S rDNA sequence of Anaerotignum lactatifermentans is selected from SEQ ID NOs: 1058, 1059, 1060, 1061, 1062, 1063, 1064, and 1065, the 16S rDNA sequence of Anaerotruncus colihominis is selected from SEQ ID NOs: 1066, 1067, 1068, 1069, 1070, 1071, 1072, 1073, 1074, 1075, 1076, 1077, 1078, 1079, 1080, 1081, 1082, 1083, 1084, and 1085, the 16S rDNA sequence of Bacteroides cellulosilyticus is selected from SEQ ID NOs: 1086, 1087, 1088, 1089, 1090, 1091, 1092, 1093, 1094, 1095, 1096, 1097, 1098, 1099, 1100, 1101, 1102, 1103, 1104, 1105, and 1106, the 16S rDNA sequence of Bacteroides gallinarum is selected from SEQ ID NOs: 1128 and 1129, the 16S rDNA sequence of Bacteroides plebeius is selected from SEQ ID NOs: 1136, 1137, 1138, 1139, 1140, 1141, 1142, 1143, 1144, 1145, 1146, 1147, 1148, 1149, 1150, 1151, 1152, 1153, 1154, and 1155, the 16S rDNA sequence of Blautia coccoides group is selected from SEQ ID NOs: 1219, 1220, 1221, 1222, 1223, 1224, 1225, 1226, 1227, 1228, 1229, 1230, 1231, 1232, 1233, 1234, 1235, 1236, 1237, 1238, 1239, 1240, 1241, 1242, 1243, 1244, 1245, 1246, 1247, 1248, 1249, 1250, 1251, 1252, 1253, 1254, 1255, 1256, 1257, 1258, 1259, 1260, 1261, 1262, 1263, 1264, 1265, 1266, 1267, 1268, 1269, 1270, 1271, and 1272, the 16S rDNA sequence of Christensenella minuta is selected from SEQ ID NOs: 1275, 1276, 1277, 1278, 1279, 1280, 1281, and 1282, the 16S rDNA sequence of Christensenellaceae NG16_sp1 is selected from SEQ ID NOs: 1286, 1287, and 1288, the 16S rDNA sequence of Clostridium hylemonae is selected from SEQ ID NOs: 790, 791, 792, 793, 794, 795, and 796, the 16S rDNA sequence of Collinsella bouchesdurhonensis is selected from SEQ ID NOs: 1289, 1290, 1291, and 1292, the 16S rDNA sequence of Coprobacter secundus group is selected from SEQ ID NOs: 797, 798, and 799, the 16S rDNA sequence of Eisenbergiella massiliensis is selected from SEQ ID NOs: 1300, 1301, 1302, 1303, 1304, 1305, 1306, 1307, and 1308, the 16S rDNA sequence of Emergencia timonensis is selected from SEQ ID NOs: 1309, 1310, 1311, 1312, 1313, 1314, 1315, 1316, 1317, 1318, 1319, and 1320, the 16S rDNA sequence of Faecalicatena orotica is selected from SEQ ID NOs: 800, 801, 802, 803, 804, 805, 806, 807, 808, 809, and 810, the 16S rDNA sequence of Fusicatenibacter sp1 is selected from SEQ ID NOs: 1350, 1351, 1352, 1353, 1354, and 1355, the 16S rDNA sequence of Intestinimonas butyriciproducens is selected from SEQ ID NOs: 1369, 1370, 1371, 1372, 1373, 1374, 1375, 1376, 1377, 1378, 1379, 1380, 1381, 1382, 1383, 1384, 1385, 1386, 1387, 1388, 1389, 1390, 1391, 1392, 1393, and 1394, the 16S rDNA sequence of Intestinimonas timonensis is selected from SEQ ID NOs: 1403 and, 1404, the 16S rDNA sequence of Lachnospiraceae NG17_sp3 is selected from SEQ ID NOs: 1417 and 1418, the 16S rDNA sequence of Lawsonibacter sp3 is selected from SEQ ID NOs: 1604, 1605, 1606, and 1607, the 16S rDNA sequence of Oxalobacter formigenes is selected from SEQ ID NOs: 1649, 1650, 1651, 1652, and 1653, the 16S rDNA sequence of Peptoniphilaceae NG4_sp2 is SEQ ID NO: 172, or the 16S rDNA sequence of Prochlorotrichaceae NG20_sp1 is SEQ ID NO: 1661.

[0259] This disclosure also relates to methods of treating or preventing or reducing risk of a cancer in a mammalian subject in need thereof comprising administering to the subject a therapeutic composition comprising an effective amount of a purified or isolated population of bacteria comprising one or more bacteria selected from Akkermansia muciniphila, Dysosmobacter welbionis, Anaerobutyricum hallii, Blautia caecimuris, Holdemania filiformis, Acetatifactor sp1, Ruminococcaceae NG14 sp1, Hungatella sp2, Bifidobacterium catenulatum group, Blautia wexlerae, Hungatella sp1, Intestinibacter bartlettii, Lachnospiraceae NG31 sp1, Lactonifactor longoviformis, Leuconostoc gelidum, Sutterella wadsworthensis, [Extibacter] muris, Alistipes onderdonkii, Collinsella intestinalis, Collinsella stercoris, Muricomes sp1, Neobitarella massiliensis, Prevotellamassilia sp2, Ruminococcaceae NG33 sp1, [Adlercreutzia] equolifaciens group, [Anaerotruncus] rubiinfantis, [Romboutsia] timonensis, Alistipes finegoldii, Alistipes indistinctus, Alistipes obesi, Alistipes putredinis, Alistipes shahii, Anaerofustis stercorihominis, Anaeromassilibacillus sp3, Barnesiella intestinihominis, Bilophila wadsworthia, Blautia faecis, Coriobacteriaceae NG5 sp1, Frisingicoccus sp3, Gordonibacter pamelaeae, Harryflintia acetispora, Lachnospiraceae NG29 sp1, Marvinbryantia sp8, Massilimaliae massiliensis, Massilimaliae timonensis, Neglecta timonensis, Parabacteroides merdae, Peptoniphilaceae NG4 sp1, Peptoniphilaceae NG4 sp3, Pseudoflavonifractor capillosus, Ruminococcaceae NG12 sp1, Ruminococcaceae NG15 sp3, Ruminococcaceae NG17 sp3, Ruthenibacterium sp1, Anaerostipes hadrus, Christensenella timonensis, Desulfovibrio desulfuricans, Dialister invisus, Lachnoclostridium edouardi, Lachnospira pectinoschiza, Lachnospiraceae NG18_sp7, Lawsonibacter sp7, Merdimonas faecis, Negativibacillus sp1, Odoribacter splanchnicus, Roseburia faecis, Roseburia intestinalis, Ruminococcaceae NG11_sp5, Ruthenibacterium lactatiformans, or bacteria having 16S rDNA having at least 94.5%, 95%, 97%, 98%, 98.7% or 99% sequence identity to any one of the 16S rDNA thereof.

[0260] This disclosure also relates to methods of treating or preventing or reducing risk of a cancer in a mammalian subject in need thereof comprising administering to the subject a therapeutic composition comprising an effective amount of a purified or isolated population of bacteria comprising one or more bacteria selected from Akkermansia muciniphila, Bifidobacterium catenulatum group, Blautia wexlerae, Hungatella sp1, Intestinibacter bartlettii, Lachnospiraceae NG31 sp1, Lactonifactor longoviformis, Leuconostoc gelidum, Sutterella wadsworthensis, [Extibacter] muris, Collinsella intestinalis, Collinsella stercoris, Muricomes sp1, Neobitarella massiliensis, Prevotellamassilia sp2, Ruminococcaceae NG33 sp1, [Adlercreutzia] equolifaciens group, [Anaerotruncus] rubiinfantis, Alistipes finegoldii, Alistipes indistinctus, Alistipes obesi, Alistipes putredinis, Alistipes shahii, Anaerofustis stercorihominis, Anaeromassilibacillus sp3, Barnesiella intestinihominis, Bilophila wadsworthia, Blautia faecis, Coriobacteriaceae NG5 sp1, Frisingicoccus sp3, Gordonibacter pamelaeae, Harryflintia acetispora, Lachnospiraceae NG29 sp1, Marvinbryantia sp8, Massilimaliae massiliensis, Massilimaliae timonensis, Neglecta timonensis, Parabacteroides merdae, Peptoniphilaceae NG4 sp1, Peptoniphilaceae NG4 sp3, Pseudoflavonifractor capillosus, Ruminococcaceae NG12 sp1, Ruminococcaceae NG15 sp3, Ruminococcaceae NG17 sp3, Ruthenibacterium sp1, or bacteria having 16S rDNA having at least 94.5%, 95%, 97%, 98%, 98.7% or 99% sequence identity to any one of the 16S rDNA thereof.

[0261] In some aspects, the bacteria comprises one or more bacteria selected from Akkermansia muciniphila, Dysosmobacter welbionis, Anaerobutyricum hallii, Blautia caecimuris, Holdemania filiformis, or bacteria having 16S rDNA having at least 94.5%, 95%, 97%, 98%, 98.7% or 99% sequence identity to any one of the 16S rDNA thereof. In some aspects, the bacteria comprises one or more bacteria selected from Akkermansia muciniphila or bacteria having 16S rDNA having at least 94.5%, 95%, 97%, 98%, 98.7% or 99% sequence identity to any one of the 16S rDNA thereof.

[0262] In some aspects, the bacteria comprises one or more bacteria selected from Acetatifactor sp1, Blautia wexlerae, Ruminococcaceae NG14 sp1, Hungatella sp2, Holdemania filiformis, or bacteria having 16S rDNA having at least 94.5%, 95%, 97%, 98%, 98.7% or 99% sequence identity to any one of the 16S rDNA thereof.

[0263] In some aspects, the bacteria comprises one or more bacteria selected from Bifidobacterium catenulatum group, Blautia wexlerae, Hungatella sp1, Intestinibacter bartlettii, Lachnospiraceae NG31 sp1, Lactonifactor longoviformis, Leuconostoc gelidum, Sutterella wadsworthensis, Anaerostipes hadrus, Dialister invisus, Merdimonas faecis, Roseburia faecis, Roseburia intestinalis, Ruminococcaceae NG11_sp5, or bacteria having 16S rDNA having at least 94.5%, 95%, 97%, 98%, 98.7% or 99% sequence identity to any one of the 16S rDNA thereof. In some aspects, the cancer is a bladder cancer.

[0264] In some aspects, the bacteria comprises one or more bacteria selected from [Extibacter] muris, Alistipes onderdonkii, Collinsella intestinalis, Collinsella stercoris, Muricomes sp1, Neobitarella massiliensis, Prevotellamassilia sp2, Ruminococcaceae NG33 sp1, Desulfovibrio desulfuricans, Roseburia intestinalis, or bacteria having 16S rDNA having at least 94.5%, 95%, 97%, 98%, 98.7% or 99% sequence identity to any one of the 16S rDNA thereof. In some aspects, the bacteria comprises one or more bacteria selected from [Extibacter] muris, Collinsella intestinalis, Collinsella stercoris, Muricomes sp1, Neobitarella massiliensis, Prevotellamassilia sp2, Ruminococcaceae NG33 sp1, or bacteria having 16S rDNA having at least 94.5%, 95%, 97%, 98%, 98.7% or 99% sequence identity to any one of the 16S rDNA thereof. In some aspects, the cancer is a non-small cell lung cancer.

[0265] In some aspects, the bacteria comprises one or more bacteria selected from [Adlercreutzia] equolifaciens group, [Anaerotruncus] rubiinfantis, [Romboutsia] timonensis, Alistipes finegoldii, Alistipes indistinctus, Alistipes obesi, Alistipes putredinis, Alistipes shahii, Anaerofustis stercorihominis, Anaeromassilibacillus sp3, Barnesiella intestinihominis, Bilophila wadsworthia, Blautia faecis, Coriobacteriaceae NG5 sp1, Frisingicoccus sp3, Gordonibacter pamelaeae, Harryflintia acetispora, Lachnospiraceae NG29 sp1, Marvinbryantia sp8, Massilimaliae massiliensis, Massilimaliae timonensis, Neglecta timonensis, Parabacteroides merdae, Peptoniphilaceae NG4 sp1, Peptoniphilaceae NG4 sp3, Pseudoflavonifractor capillosus, Ruminococcaceae NG12 sp1, Ruminococcaceae NG15 sp3, Ruminococcaceae NG17 sp3, Ruthenibacterium sp1, Lachnoclostridium edouardi, Lachnospira pectinoschiza, Lawsonibacter sp7, Odoribacter splanchnicus, Ruthenibacterium lactatiformans, or bacteria having 16S rDNA having at least 94.5%, 95%, 97%, 98%, 98.7% or 99% sequence identity to any one of the 16S rDNA thereof. In some aspects, the bacteria comprises one or more bacteria selected from [Adlercreutzia] equolifaciens group, [Anaerotruncus] rubiinfantis, Alistipes finegoldii, Alistipes indistinctus, Alistipes obesi, Alistipes putredinis, Alistipes shahii, Anaerofustis stercorihominis, Anaeromassilibacillus sp3, Barnesiella intestinihominis, Bilophila wadsworthia, Blautia faecis, Coriobacteriaceae NG5 sp1, Frisingicoccus sp3, Gordonibacter pamelaeae, Harryflintia acetispora, Lachnospiraceae NG29 sp1, Marvinbryantia sp8, Massilimaliae massiliensis, Massilimaliae timonensis, Neglecta timonensis, Parabacteroides merdae, Peptoniphilaceae NG4 sp1, Peptoniphilaceae NG4 sp3, Pseudoflavonifractor capillosus, Ruminococcaceae NG12 sp1, Ruminococcaceae NG15 sp3, Ruminococcaceae NG17 sp3, Ruthenibacterium sp1, or bacteria having 16S rDNA having at least 94.5%, 95%, 97%, 98%, 98.7% or 99% sequence identity to any one of the 16S rDNA thereof. In some aspects, the cancer is a metastatic melanoma.

[0266] This disclosure also relates to methods of treating or preventing or reducing risk of a cancer in a mammalian subject in need thereof comprising administering to the subject a therapeutic composition comprising an effective amount of a purified or isolated population of bacteria comprising one or more bacteria having a 16S rDNA sequence that is at least 85%, at least 90%, at least 95%, at least 96%, at least 97%, at least 98%, at least 99%, or 100% identical to a 16S rDNA sequence set forth in SEQ ID NOs: 1, 2, 3, 4, 5, 6, 7, 8, 9, 10, 11, 12, 13, 14, 15, 16, 17, 18, 19, 20, 21, 22, 23, 24, 25, 26, 27, 28, 29, 30, 31, 32, 33, 34, 35, 36, 37, 38, 39, 40, 41, 42, 43, 44, 45, 46, 47, 48, 49, 50, 51, 52, 53, 54, 55, 56, 57, 58, 59, 60, 61, 62, 63, 64, 65, 66, 67, 68, 69, 70, 71, 72, 73, 74, 75, 76, 77, 78, 79, 80, 81, 82, 83, 84, 85, 86, 87, 88, 89, 90, 91, 92, 93, 94, 95, 96, 97, 98, 99, 100, 101, 102, 103, 104, 105, 106, 107, 108, 109, 110, 111, 112, 113, 114, 115, 116, 117, 118, 119, 120, 121, 122, 123, 124, 125, 126, 127, 128, 129, 130, 131, 132, 133, 134, 135, 136, 137, 138, 139, 140, 141, 142, 143, 144, 145, 146, 147, 148, 149, 150, 151, 152, 153, 154, 155, 156, 157, 158, 159, 160, 161, 162, 163, 164, 165, 166, 167, 168, 169, 170, 171, 172, 173, 174, 175, 176, 177, 178, 179, 180, 181, 182, 183, 184, 185, 186, 601, 602, 603, 604, 605, 606, 607, 613, 614, 615, 616, 617, 618, 619, 622, 623, 640, 641, 643, 662, 663, 664, 665, 666, 667, 675, 676, 681, 688, 690, 691, 693, 696, 697, 699, 700, 702, 703, 704, 705, 706, 707, 708, 709, 710, 711, 712, 713, 714, 715, 716, 717, 718, 719, 720, 721, 722, 723, 724, 725, 726, 727, 728, 729, 730, 732, 733, 734, 735, 736, 737, 738, 739, 740, 741, 742, 743, 744, 746, 747, 748, 749, 750, 751, 752, 753, 754, 755, 756, 757, 758, 759, 760, 761, 762, 763, 765, 766, 767, 768, 769, 770, 771, 772, 773, 1018, 1019, 1020, 1021, 1022, 1023, 1024, 1025, 1026, 1027, 1028, 1029, 1030, 1031, 1032, 1033, 1034, 1035, 1036, 1037, 1038, 1039, 1040, 1041, 1042, 1043, 1044, 1045, 1046, 1047, 1048, 1049, 1050, 1051, 1052, 1053, 1054, 1055, 1056, 1057, 1283, 1284, 1285, 1293, 1294, 1295, 1296, 1297, 1298, 1299, 1405, 1406, 1407, 1408, 1409, 1410, 1411, 1412, 1413, 1414, 1415, 1416, 1419, 1420, 1421, 1422, 1423, 1424, 1425, 1426, 1608, 1609, 1610, 1611, 1612, 1613, 1614, 1615, 1010, 1622, 1623, 1624, 1625, 1626, 1627, 1628, 1629, 1630, 1631, 1632, 1633, 1634, 1635, 1636, 1637, 1638, 1639, 1640, 1641, 1642, 1643, 1644, 1645, 1646, 1647, 1648, 1696, 1697, 1698, 1699, 1700, 1701, 1702, 1703, 1704, 1705, 1706, 1707, 1708, 1709, 1710, 1711, 1712, 1713, 1714, 1715, 1716, 1717, 1718, 1719, 1720, 1721, 1722, 1723, 1724, 1725, 1726, 1727, 1728, 1729, 1730, 1731, 1732, 1733, 1734, 1735, 1736, 1737, 1738, 1739, 1740, 1741, 1742, 1743, 1744, 1745, 1746, 1747, 1748, and 1749.

[0267] In some aspects, bacteria comprises one or more bacteria having a 16S rDNA sequence that is at least 85%, at least 90%, at least 95%, at least 96%, at least 97%, at least 98%, at least 99%, or 100% identical to a 16S rDNA sequence set forth in SEQ ID NOs: 605, 613, 640, 641, 643, 662, 663, 664, 665, 666, 667, 681, 688, 690, 703, 732, 733, 736, 737, 738, 739, 740, 741, 742, 743, 744, 749, 754, 755, 756, 758, 765, 766, 767 and 773.

[0268] In some aspects, bacteria comprises one or more bacteria having a 16S rDNA sequence that is at least 85%, at least 90%, at least 95%, at least 96%, at least 97%, at least 98%, at least 99%, or 100% identical to a 16S rDNA sequence set forth in SEQ ID NOs: 601, 602, 603, 604, 606, 607, 613, 614, 615, 616, 617, 618, 619, 622, 623, 675, 676, 681, 691, 693, 696, 697, 699, 700, 702, 704, 705, 706, 707, 708, 709, 710, 711, 712, 713, 714, 715, 716, 717, 718, 719, 720, 721, 722, 723, 724, 725, 726, 727, 728, 729, 730, 734, 735, 736, 746, 747, 748, 749, 750, 751, 752, 753, 757, 759, 760, 761, 762, 763, 768, 769, 770, 771 and 772.

[0269] In some aspects, bacteria comprises one or more bacteria having a 16S rDNA sequence that is at least 85%, at least 90%, at least 95%, at least 96%, at least 97%, at least 98%, at least 99%, or 100% identical to a 16S rDNA sequence set forth in SEQ ID NOs: 2, 3, 6, 10, 12, 13, 19, 20, 21, 22, 23, 24, 34, 37, 38, 39, 42, 43, 44, 45, 46, 47, 48, 50, 51, 52, 55, 57, 58, 59, 64, 65, 66, 67, 73, 74, 75, 80, 82, 83, 84, 85, 86, 87, 88, 89, 90, 91, 92, 93, 94, 95, 96, 97, 98, 99, 100, 101, 104, 105, 106, 107, 108, 109, 110, 111, 112, 114, 115, 116, 120, 123, 129, 135, 136, 138, 139, 140, 141, 142, 143, 145, 146, 148, 153, 156, 157, 158, 161, 168, 169, 170, 173, 176, 178, 180, 182, 1018, 1019, 1020, 1021, 1022, 1023, 1024, 1025, 1026, 1027, 1028, 1029, 1030, 1031, 1032, 1033, 1034, 1035, 1036, 1037, 1038, 1039, 1040, 1041, 1042, 1043, 1044, 1045, 1046, 1047, 1048, 1049, 1050, 1051, 1052, 1053, 1054, 1055, 1056, 1057, 1297, 1298, 1299, 1010, 1696, 1697, 1698, 1699, 1700, 1701, 1702, 1703, 1704, 1705, 1706, 1707, 1708, 1709, 1710, 1711, 1712, 1713, 1714, 1715, 1716, 1717, 1718, 1719, 1720, 1721, 1722, 1723, 1724, 1725, 1726, 1727, 1728, 1729, 1730, 1731, and 1732.

[0270] In some aspects, bacteria comprises one or more bacteria having a 16S rDNA sequence that is at least 85%, at least 90%, at least 95%, at least 96%, at least 97%, at least 98%, at least 99%, or 100% identical to a 16S rDNA sequence set forth in SEQ ID NOs: 16, 17, 18, 53, 54, 60, 77, 79, 81, 103, 119, 125, 132, 133, 134, 164, 175, 179, 184, 1293, 1294, 1295, 1296, 1705, 1706, 1707, 1708, 1709, 1710, 1711, 1712, 1713, 1714, 1715, 1716, 1717, 1718, 1719, 1720, 1721, 1722, 1723, 1724, 1725, 1726, 1727, 1728, 1729, 1730, 1731, and 1732.

[0271] In some aspects, bacteria comprises one or more bacteria having a 16S rDNA sequence that is at least 85%, at least 90%, at least 95%, at least 96%, at least 97%, at least 98%, at least 99%, or 100% identical to a 16S rDNA sequence set forth in SEQ ID NOs: 1, 4, 5, 7, 8, 9, 11, 14, 15, 25, 26, 27, 28, 29, 30, 31, 32, 33, 35, 36, 40, 41, 61, 62, 68, 69, 70, 71, 72, 76, 78, 117, 118, 121, 122, 124, 127, 128, 130, 131, 137, 144, 147, 149, 150, 151, 152, 154, 155, 159, 160, 162, 163, 165, 166, 167, 171, 174, 177, 181, 183, 186, 1405, 1406, 1407, 1408, 1409, 1410, 1411, 1412, 1413, 1414, 1415, 1416, 1608, 1609, 1610, 1611, 1612, 1613, 1614, 1615, 1622, 1623, 1624, 1625, 1626, 1627, 1628, 1629, 1630, 1631, 1632, 1633, 1634, 1635, 1636, 1637, 1638, 1639, 1640, 1641, 1642, 1643, 1644, 1645, 1646, 1647, 1648, 1733, 1734, 1735, 1736, 1737, 1738, 1739, 1740, 1741, 1742, 1743, 1744, 1745, 1746, 1747, 1748, and 1749.

[0272] In some aspects, the therapeutic composition of the provided methods comprises two, three, four, five, six, seven, eight, nine, ten, eleven, twelve, thirteen, fourteen, fifteen, sixteen, seventeen, eighteen or more bacterial species.

[0273] In some aspects, the therapeutic composition of the provided methods does not comprise one or more bacteria selected from Holdemania massiliensis, Rothia mucilaginosa, Hungatella sp2, Prevotella copri, Campylobacter concisus, [Atopobium] parvulum, Alistipes onderdonkii, Angelakisella massiliensis, Christensenellaceae NG5 sp2, Cuneatibacter caecimuris, Desulfovibrio fairfieldensis, Ruminococcaceae NG13 sp1, Ruminococcaceae NG16 sp1, [Coprococcus] catus, [Lactobacillus] fermentum, [Romboutsia] timonensis, [Ruminococcus] bromii, [Ruminococcus] gauvreauii, Actinomyces graevenitzii, Agathobaculum butyriciproducens group, Bacteroides caccae, Bacteroides intestinalis, Bittarella massiliensis, Blautia luti group, Clostridium saudiense, Corynebacterium durum, Fusicatenibacter sp2, Lachnospiraceae NG30 sp3, Massilimaliae sp1, Monoglobus pectinilyticus, Rothia dentocariosa, Rothia mucilaginosa, Ruminococcaceae NG17 sp1, Schaalia odontolytica, Streptococcus australis, Streptococcus gordonii, Streptococcus infantis group, Streptococcus parasanguinis, Streptococcus salivarius group, [Atopobium] parvulum, [Ruminococcus] gnavus, Bacteroides dorei group, Blautia sp1, Schaalia sp2, Actinomycetaceae_NG7 sp1, Allisonella histaminiformans, Bacteroides coprocola, Bacteroides faecis, Bacteroides massiliensis, Bifidobacterium animalis, Clostridium asparagiforme group, Desulfovibrionaceae NG5_sp1, Faecalibacterium prausnitzii, Gemmiger sp2, Granulicatella adiacens, Intestinimonas massiliensis, Lactobacillus delbrueckii, Lactobacillus paracasei, Lactobacillus reuteri, Lactococcus lactis, Marvinbryantia sp5, Prevotella buccalis, Propionibacterium freudenreichii, Ruminococcaceae NG18_sp7, Scardovia wiggsiae, Slackia isoflavoniconvertens, Thermodesulfobiaceae NG1_sp1, or bacteria having 16S rDNA having at least 94.5%, 95%, 97%, 98%, 98.7% or 99% sequence identity to any one of the 16S rDNA thereof.

[0274] In some aspects, the therapeutic composition of the provided methods does not comprise one or more bacteria selected from Actinomycetaceae_NG7 sp1, Allisonella histaminiformans, Bacteroides coprocola, Bacteroides faecis, Bacteroides massiliensis, Bifidobacterium animalis, Clostridium asparagiforme group, Desulfovibrionaceae NG5_sp1, Faecalibacterium prausnitzii, Gemmiger sp2, Granulicatella adiacens, Intestinimonas massiliensis, Lactobacillus delbrueckii, Lactobacillus paracasei, Lactobacillus reuteri, Lactococcus lactis, Marvinbryantia sp5, Prevotella buccalis, Propionibacterium freudenreichii, Ruminococcaceae NG18_sp7, Scardovia wiggsiae, Slackia isoflavoniconvertens, Thermodesulfobiaceae NG1_sp1, or bacteria having 16S rDNA having at least 94.5%, 95%, 97%, 98%, 98.7% or 99% sequence identity to any one of the 16S rDNA thereof.

[0275] In some aspects, the therapeutic composition of the provided methods does not comprise one or more bacteria selected from Allisonella histaminiformans, Bacteroides faecis, Bacteroides massiliensis, Desulfovibrionaceae NG5_sp1, Gemmiger sp2, Intestinimonas massiliensis, Marvinbryantia sp5, Propionibacterium freudenreichii, Slackia isoflavoniconvertens, Thermodesulfobiaceae NG1_sp1, or bacteria having 16S rDNA having at least 94.5%, 95%, 97%, 98%, 98.7% or 99% sequence identity to any one of the 16S rDNA thereof.

[0276] In some aspects, the therapeutic composition of the provided methods does not comprise one or more bacteria selected from Bifidobacterium animalis, Faecalibacterium prausnitzii, or bacteria having 16S rDNA having at least 94.5%, 95%, 97%, 98%, 98.7% or 99% sequence identity to any one of the 16S rDNA thereof.

[0277] In some aspects, the therapeutic composition of the provided methods does not comprise one or more bacteria selected from Granulicatella adiacens, Lactococcus lactis, Scardovia wiggsiae, or bacteria having 16S rDNA having at least 94.5%, 95%, 97%, 98%, 98.7% or 99% sequence identity to any one of the 16S rDNA thereof.

[0278] In some aspects, the therapeutic composition of the provided methods does not comprise one or more bacteria selected from Holdemania massiliensis, Rothia mucilaginosa, Hungatella sp2, Prevotella copri, Campylobacter concisus, [Atopobium] parvulum, Angelakisella massiliensis, Christensenellaceae NG5 sp2, Cuneatibacter caecimuris, Desulfovibrio fairfieldensis, Ruminococcaceae NG13 sp1, Ruminococcaceae NG16 sp1, [Coprococcus] catus, [Lactobacillus] fermentum, [Ruminococcus] bromii, [Ruminococcus]gauvreauii, Actinomyces graevenitzii, Agathobaculum butyriciproducens group, Bacteroides caccae, Bacteroides intestinalis, Bittarella massiliensis, Blautia luti group, Clostridium saudiense, Corynebacterium durum, Fusicatenibacter sp2, Lachnospiraceae NG30 sp3, Massilimaliae sp1, Monoglobus pectinilyticus, Rothia dentocariosa, Rothia mucilaginosa, Ruminococcaceae NG17 sp1, Schaalia odontolytica, Streptococcus australis, Streptococcus gordonii, Streptococcus infantis group, Streptococcus parasanguinis, Streptococcus salivarius group, [Atopobium] parvulum, [Ruminococcus] gnavus, Bacteroides dorei group, Blautia sp1, Schaalia sp2, or bacteria having 16S rDNA having at least 94.5%, 95%, 97%, 98%, 98.7% or 99% sequence identity to any one of the 16S rDNA thereof.

[0279] In some aspects, the therapeutic composition of the provided methods does not comprise Holdemania massiliensis, Rothia mucilaginosa, Hungatella sp2, Prevotella copri, Campylobacter concisus, or bacteria having 16S rDNA having at least 94.5%, 95%, 97%, 98%, 98.7% or 99% sequence identity to any one of the 16S rDNA thereof. In some aspects, the therapeutic composition of the provided methods does not comprise Rothia mucilaginosa, Prevotella copri, Campylobacter concisus, or bacteria having 16S rDNA having at least 94.5%, 95%, 97%, 98%, 98.7% or 99% sequence identity to any one of the 16S rDNA thereof.

[0280] In some aspects, the therapeutic composition of the provided methods does not comprise Rothia mucilaginosa, [Atopobium] parvulum, Holdemania massiliensis, Prevotella copri, Campylobacter concisus, or bacteria having 16S rDNA having at least 94.5%, 95%, 97%, 98%, 98.7% or 99% sequence identity to any one of the 16S rDNA thereof. In some aspects, the therapeutic composition of the provided methods does not comprise Rothia mucilaginosa, [Atopobium] parvulum, Prevotella copri, Campylobacter concisus, or bacteria having 16S rDNA having at least 94.5%, 95%, 97%, 98%, 98.7% or 99% sequence identity to any one of the 16S rDNA thereof.

[0281] In some aspects, the therapeutic composition of the provided methods does not comprise Alistipes onderdonkii, Angelakisella massiliensis, Christensenellaceae NG5 sp2, Cuneatibacter caecimuris, Desulfovibrio fairfieldensis, Ruminococcaceae NG13 sp1, Ruminococcaceae NG16 sp1, Bifidobacterium animalis, Faecalibacterium prausnitzii, or bacteria having 16S rDNA having at least 94.5%, 95%, 97%, 98%, 98.7% or 99% sequence identity to any one of the 16S rDNA thereof. In some aspects, the therapeutic composition of the provided methods does not comprise Angelakisella massiliensis, Christensenellaceae NG5 sp2, Cuneatibacter caecimuris, Desulfovibrio fairfieldensis, Ruminococcaceae NG13 sp1, Ruminococcaceae NG16 sp1, or bacteria having 16S rDNA having at least 94.5%, 95%, 97%, 98%, 98.7% or 99% sequence identity to any one of the 16S rDNA thereof. In some aspects, the cancer is a bladder cancer.

[0282] In some aspects, the therapeutic composition of the provided methods does not comprise [Coprococcus] catus, [Lactobacillus] fermentum, [Romboutsia] timonensis, [Ruminococcus] bromii, [Ruminococcus] gauvreaui, Actinomyces graevenitzii, Agathobaculum butyriciproducens group, Bacteroides caccae, Bacteroides intestinalis, Bittarella massiliensis, Blautia luti group, Clostridium saudiense, Corynebacterium durum, Fusicatenibacter sp2, Lachnospiraceae NG30 sp3, Massilimaliae sp1, Monoglobus pectinilyticus, Rothia dentocariosa, Rothia mucilaginosa, Ruminococcaceae NG17 sp1, Schaalia odontolytica, Streptococcus australis, Streptococcus gordonii, Streptococcus infantis group, Streptococcus parasanguinis, Streptococcus salivarius group, Allisonella histaminiformans, Bacteroides faecis, Bacteroides massiliensis, Desulfovibrionaceae NG5_sp1, Gemmiger sp2, Intestinimonas massiliensis, Marvinbryantia sp5, Propionibacterium freudenreichii, Slackia isoflavoniconvertens, Thermodesulfobiaceae NG1_sp1, or bacteria having 16S rDNA having at least 94.5%, 95%, 97%, 98%, 98.7% or 99% sequence identity to any one of the 16S rDNA thereof. In some aspects, the therapeutic composition of the provided methods does not comprise [Coprococcus] catus, [Lactobacillus] fermentum, [Ruminococcus] bromii, [Ruminococcus] gauvreauii, Actinomyces graevenitzii, Agathobaculum butyriciproducens group, Bacteroides caccae, Bacteroides intestinalis, Bittarella massiliensis, Blautia luti group, Clostridium saudiense, Corynebacterium durum, Fusicatenibacter sp2, Lachnospiraceae NG30 sp3, Massilimaliae sp1, Monoglobus pectinilyticus, Rothia dentocariosa, Rothia mucilaginosa, Ruminococcaceae NG17 sp1, Schaalia odontolytica, Streptococcus australis, Streptococcus gordonii, Streptococcus infantis group, Streptococcus parasanguinis, Streptococcus salivarius group, or bacteria having 16S rDNA having at least 94.5%, 95%, 97%, 98%, 98.7% or 99% sequence identity to any one of the 16S rDNA thereof. In some aspects, the cancer is a non-small cell lung cancer.

[0283] In some aspects, the therapeutic composition of the provided methods does not comprise [Atopobium] parvulum, [Ruminococcus] gnavus, Bacteroides dorei group, Blautia sp1, Schaalia sp2, Granulicatella adiacens, Lactococcus lactis, Scardovia wiggsiae, or bacteria having 16S rDNA having at least 94.5%, 95%, 97%, 98%, 98.7% or 99% sequence identity to any one of the 16S rDNA thereof. In some aspects, the cancer is a metastatic melanoma.

[0284] In some aspects, the therapeutic composition of the provided methods does not comprise one or more bacteria having a 16S rDNA sequence that is at least 85%, at least 90%, at least 95%, at least 96%, at least 97%, at least 98%, at least 99%, or 100% identical to a 16S rDNA sequence set forth in SEQ ID NOs: 187, 188, 189, 190, 191, 192, 193, 194, 195, 196, 197, 198, 199, 200, 201, 202, 203, 204, 205, 206, 207, 208, 209, 210, 211, 212, 213, 214, 215, 216, 217, 218, 219, 220, 221, 222, 223, 224, 225, 226, 227, 228, 229, 230, 231, 232, 233, 234, 235, 236, 237, 238, 239, 240, 241, 242, 243, 244, 245, 246, 247, 248, 249, 250, 251, 252, 253, 254, 255, 256, 257, 258, 259, 260, 261, 262, 263, 264, 265, 266, 267, 268, 269, 270, 271, 272, 273, 274, 275, 276, 277, 278, 279, 280, 281, 282, 283, 284, 285, 286, 287, 288, 289, 290, 291, 292, 293, 294, 295, 296, 297, 298, 299, 300, 301, 302, 303, 304, 305, 306, 307, 308, 309, 310, 311, 312, 313, 314, 315, 316, 317, 318, 319, 320, 321, 322, 323, 324, 325, 326, 327, 328, 329, 330, 331, 332, 333, 334, 335, 336, 337, 338, 339, 340, 341, 342, 343, 344, 345, 346, 347, 348, 349, 350, 351, 352, 353, 354, 355, 356, 357, 358, 359, 360, 361, 362, 363, 364, 365, 366, 367, 368, 369, 370, 371, 372, 373, 374, 375, 376, 377, 378, 379, 380, 381, 382, 383, 384, 385, 386, 387, 388, 389, 390, 391, 392, 393, 394, 395, 396, 397, 398, 399, 400, 401, 402, 403, 404, 405, 406, 407, 408, 409, 410, 411, 412, 413, 414, 415, 416, 417, 418, 419, 420, 421, 422, 423, 424, 425, 426, 427, 428, 429, 430, 431, 432, 433, 434, 435, 436, 437, 438, 439, 440, 441, 442, 443, 444, 445, 446, 447, 448, 449, 450, 451, 452, 453, 454, 455, 456, 457, 458, 459, 460, 461, 462, 463, 464, 465, 466, 467, 468, 469, 470, 471, 472, 473, 474, 475, 476, 477, 478, 479, 480, 481, 482, 483, 484, 485, 486, 487, 488, 489, 490, 491, 492, 493, 494, 495, 496, 497, 498, 499, 500, 501, 502, 503, 504, 505, 506, 507, 508, 509, 510, 511, 512, 513, 514, 515, 516, 517, 518, 519, 520, 521, 522, 523, 524, 525, 526, 527, 528, 529, 530, 531, 532, 533, 534, 535, 536, 537, 538, 539, 540, 541, 542, 543, 544, 545, 546, 547, 548, 549, 550, 551, 552, 553, 554, 555, 556, 557, 558, 559, 560, 561, 562, 563, 564, 565, 566, 567, 568, 569, 570, 571, 572, 573, 574, 575, 576, 577, 578, 579, 580, 581, 582, 583, 584, 585, 586, 587, 588, 589, 590, 591, 592, 593, 594, 595, 596, 597, 598, 599, 600, 608, 609, 610, 611, 612, 620, 621, 622, 623, 624, 625, 626, 627, 628, 629, 630, 631, 632, 633, 634, 635, 636, 637, 638, 639, 642, 644, 645, 646, 647, 648, 649, 650, 651, 652, 653, 654, 655, 656, 657, 658, 659, 660, 661, 668, 669, 670, 671, 672, 673, 674, 677, 678, 679, 680, 682, 683, 684, 685, 686, 687, 689, 692, 694, 695, 698, 701, 731, 734, 764, 1011, 1012, 1013, 1014, 1015, 1016, 1017, 774, 1107, 1108, 1109, 1110, 1111, 1112, 1113, 1114, 1115, 1116, 1117, 1118, 1119, 1120, 1121, 1122, 1123, 1124, 1125, 1126, 1127, 1130, 1131, 1132, 1133, 1134, 1135, 1156, 1157, 1158, 1159, 1160, 1161, 1162, 1163, 1164, 1165, 1166, 1167, 1168, 1169, 1170, 1171, 1172, 1173, 1174, 1175, 1176, 1177, 1178, 1179, 1180, 1181, 1182, 1183, 1184, 1185, 1186, 1187, 1188, 1189, 1190, 1191, 1192, 1193, 1194, 1195, 1196, 1197, 1198, 1199, 1200, 1201, 1202, 1203, 1204, 1205, 1206, 1207, 1208, 1209, 1210, 1211, 1212, 1213, 1214, 1215, 1216, 1217, 1218, 775, 776, 777, 778, 779, 780, 781, 782, 783, 784, 785, 786, 787, 788, 789, 1321, 1322, 1323, 1324, 1325, 1326, 1327, 1328, 1329, 1330, 1331, 1332, 1333, 1334, 1335, 1336, 1337, 1338, 1339, 1340, 1341, 1342, 1343, 1344, 1345, 1346, 1347, 1348, 1349, 1356, 1357, 1358, 1359, 1360, 1361, 1362, 1363, 1364, 1365, 1366, 1367, 1368, 1395, 1396, 1397, 1398, 1399, 1400, 1401, 1402, 1427, 1428, 1429, 1430, 1431, 1432, 1433, 1434, 1435, 1436, 1437, 1438, 1439, 1440, 1441, 1442, 1443, 1444, 1445, 1446, 1447, 1448, 1449, 1450, 1451, 1452, 1453, 1454, 1455, 1456, 1457, 1458, 1459, 1460, 1461, 1462, 1463, 1464, 1465, 1466, 1467, 1468, 1469, 1470, 1471, 1472, 1473, 1474, 1475, 1476, 1477, 1478, 1479, 1480, 1481, 1482, 1483, 1484, 1485, 1486, 1487, 1488, 1489, 1490, 1491, 1492, 1493, 1494, 1495, 1496, 1497, 1498, 1499, 1500, 1501, 1502, 1503, 1504, 1505, 931, 932, 933, 934, 935, 936, 937, 938, 939, 940, 941, 942, 943, 944, 945, 946, 947, 948, 949, 950, 951, 952, 953, 954, 955, 956, 957, 958, 959, 960, 961, 962, 963, 964, 965, 966, 967, 968, 969, 970, 971, 972, 973, 974, 975, 976, 977, 978, 979, 980, 981, 982, 983, 984, 985, 986, 987, 988, 989, 990, 991, 992, 993, 994, 995, 996, 997, 998, 999, 1000, 1001, 1002, 1003, 1004, 1005, 1006, 1007, 1008, 1009, 1506, 1507, 1508, 1509, 1510, 1511, 1512, 1513, 1514, 1515, 1516, 1517, 1518, 1519, 1520, 1521, 1522, 1523, 1524, 1525, 1526, 1527, 1528, 1529, 1530, 1531, 1532, 1533, 1534, 1535, 1536, 1537, 1538, 1539, 1540, 1541, 1542, 1543, 1544, 1545, 1546, 1547, 1548, 1549, 1550, 1551, 1552, 1553, 1554, 1555, 1556, 1557, 1558, 1559, 1560, 1561, 1562, 1563, 1564, 1565, 1566, 1567, 1568, 1569, 1570, 1571, 1572, 1573, 1574, 1575, 1576, 1577, 1578, 1579, 1580, 1581, 1582, 1583, 1584, 1585, 1586, 1587, 1588, 1589, 1590, 1591, 1592, 1593, 1594, 1595, 1596, 1597, 1598, 1599, 1600, 1601, 1602, 1603, 1616, 1617, 1618, 1619, 1620, 1654, 1655, 1656, 1657, 1658, 1659, 1660, 1662, 1663, 1664, 1665, 1666, 1667, 1668, 1669, 1670, 1671, 1672, 1673, 1674, 1675, 1676, 1677, 1678, 1679, 1680, 1681, 1682, 1683, 1684, 1685, 1686, 1687, 1688, 1689, 1690, 1691, 1692, 1693, 1694, 1695, 1750, 1751, 1752, 1753, 1754, 1755, and 1756.

[0285] In some aspects, the therapeutic composition of the provided methods does not comprise one or more bacteria having a 16S rDNA sequence that is at least 85%, at least 90%, at least 95%, at least 96%, at least 97%, at least 98%, at least 99%, or 100% identical to a 16S rDNA sequence set forth in SEQ ID NOs: 608, 610, 611, 612, 620, 621, 622, 623, 624, 625, 626, 630, 631, 632, 633, 634, 635, 636, 637, 638, 639, 642, 644, 645, 646, 647, 648, 649, 650, 651, 652, 653, 654, 655, 656, 657, 658, 659, 660, 661, 668, 669, 670, 671, 672, 673, 674, 677, 678, 679, 680, 682, 683, 684, 685, 686, 687, 689, 692, 694, 695, 698, 701, 731, 734 and 764.

[0286] In some aspects, the therapeutic composition of the provided methods does not comprise one or more bacteria having a 16S rDNA sequence that is at least 85%, at least 90%, at least 95%, at least 96%, at least 97%, at least 98%, at least 99%, or 100% identical to a 16S rDNA sequence set forth in SEQ ID NOs: 608, 609, 610, 611, 612, 620, 621, 624, 625, 626, 627, 628, 629, 630, 631, 632, 633, 634, 635, 636, 637, 638, 639, 642, 644, 645, 646, 647, 648, 649, 650, 651, 652, 653, 654, 655, 656, 657, 658, 659, 660, 661, 668, 669, 670, 671, 672, 673, 674, 677, 678, 679, 680, 682, 683, 684, 685, 686, 687, 689, 692, 694, 695, 698, 701, 731 and 764.

[0287] In some aspects, the therapeutic composition of the provided methods does not comprise one or more bacteria having a 16S rDNA sequence that is at least 85%, at least 90%, at least 95%, at least 96%, at least 97%, at least 98%, at least 99%, or 100% identical to a 16S rDNA sequence set forth in SEQ ID NOs: 188, 213, 245, 323, 331, 332, 376, 455, 509, 516, 538, 582, 1156, 1157, 1158, 1159, 1160, 1161, 1162, 1163, 1164, 1165, 1166, 1167, 1168, 1169, 1170, 1171, 1172, 1173, 1174, 1175, 1176, 1177, 1178, 1179, 1180, 1181, 1182, 1183, 1184, 1185, 1186, 1187, 1188, 1189, 1190, 1191, 1192, 1193, 1194, 1195, 1196, 1197, 1198, 1199, 1200, 1201, 1202, 1203, 1204, 1205, 1206, 1207, 1208, 1209, 1210, 1211, 1212, 1213, 1214, 1215, 1216, 1217, 1218, o1321, 1322, 1323, 1324, 1325, 1326, 1327, 1328, 1329, 1330, 1331, 1332, 1333, 1334, 1335, 1336, 1337, 1338, 1339, 1340, 1341, 1342, 1343, 1344, 1345, 1346, 1347, 1348, and 1349. In some aspects, the cancer is a bladder cancer.

[0288] In some aspects, the therapeutic composition of the provided methods does not comprise one or more bacteria having a 16S rDNA sequence that is at least 85%, at least 90%, at least 95%, at least 96%, at least 97%, at least 98%, at least 99%, or 100% identical to a 16S rDNA sequence set forth in SEQ ID NOs: 187, 189, 190, 191, 192, 193, 194, 195, 196, 197, 198, 199, 200, 201, 202, 203, 204, 205, 211, 214, 216, 217, 218, 219, 220, 221, 222, 224, 225, 226, 227, 228, 229, 230, 231, 232, 233, 234, 235, 236, 237, 238, 239, 240, 241, 242, 243, 244, 246, 247, 248, 253, 254, 255, 257, 258, 259, 263, 264, 265, 267, 268, 269, 270, 271, 272, 273, 277, 283, 286, 289, 290, 291, 292, 293, 294, 295, 296, 297, 298, 299, 300, 301, 302, 303, 304, 305, 306, 307, 308, 309, 310, 311, 312, 313, 314, 315, 316, 317, 318, 319, 320, 321, 322, 324, 325, 326, 327, 328, 329, 330, 333, 334, 335, 336, 337, 338, 339, 340, 341, 342, 343, 344, 345, 346, 347, 348, 349, 350, 351, 352, 353, 354, 355, 356, 357, 358, 359, 360, 361, 362, 363, 364, 365, 366, 367, 368, 369, 370, 371, 372, 373, 374, 375, 377, 378, 379, 380, 381, 382, 383, 384, 385, 386, 387, 389, 390, 391, 392, 393, 394, 395, 396, 397, 398, 399, 400, 401, 402, 403, 409, 410, 411, 412, 413, 414, 415, 418, 421, 424, 425, 428, 429, 430, 431, 432, 433, 434, 435, 436, 437, 438, 439, 440, 441, 442, 443, 444, 445, 447, 449, 450, 452, 453, 454, 456, 457, 458, 460, 462, 463, 464, 465, 466, 467, 468, 469, 471, 472, 473, 474, 475, 476, 478, 479, 480, 481, 483, 484, 486, 487, 488, 489, 490, 491, 492, 493, 494, 495, 496, 497, 498, 499, 500, 501, 502, 503, 504, 505, 506, 507, 508, 510, 511, 512, 513, 514, 515, 520, 521, 522, 523, 524, 525, 526, 527, 528, 529, 530, 531, 537, 539, 540, 542, 543, 544, 545, 546, 547, 548, 550, 551, 552, 553, 554, 555, 560, 561, 564, 565, 566, 573, 574, 577, 579, 581, 583, 584, 585, 586, 587, 588, 589, 591, 594, 595, 596, 597, 598, 599, 600, 774, 1113, 1114, 1115, 1116, 1117, 1118, 1119, 1120, 1121, 1122, 1123, 1124, 1125, 1126, 1127, 1130, 1131, 1132, 1133, 1134, 1135, 1356, 1357, 1358, 1359, 1360, 1361, 1362, 1395, 1396, 1397, 1398, 1399, 1400, 1401, 1402, 1616, 1617, 1618, 1619, 1620, 1662, 1663, 1664, 1665, 1666, 1667, 1668, 1669, 1670, 1671, 1672, 1673, 1674, 1675, 1676, 1677, 1678, 1679, 1680, 1681, 1682, 1683, 1684, 1685, 1686, 1687, 1688, 1689, 1690, 1691, 1692, 1693, 1694, 1695, 1755, and 1756. In some aspects, the cancer is a non-small cell lung cancer.

[0289] In some aspects, the therapeutic composition of the provided methods does not comprise one or more bacteria having a 16S rDNA sequence that is at least 85%, at least 90%, at least 95%, at least 96%, at least 97%, at least 98%, at least 99%, or 100% identical to a 16S rDNA sequence set forth in SEQ ID NOs: 206, 207, 208, 209, 210, 212, 215, 223, 249, 250, 251, 252, 256, 260, 261, 262, 266, 274, 275, 276, 278, 279, 280, 281, 282, 284, 285, 287, 388, 404, 405, 406, 407, 408, 416, 417, 419, 420, 422, 423, 426, 427, 446, 448, 451, 459, 461, 482, 485, 517, 518, 519, 532, 533, 534, 535, 536, 549, 556, 557, 558, 559, 562, 563, 567, 568, 569, 570, 571, 572, 575, 576, 580, 590, 593, 1363, 1364, 1365, 1366, 1367, 1368, 1506, 1507, 1508, 1509, 1510, 1511, 1512, 1513, 1514, 1515, 1516, 1517, 1518, 1519, 1520, 1521, 1522, 1523, 1524, 1525, 1526, 1527, 1528, 1529, 1530, 1531, 1532, 1533, 1534, 1535, 1536, 1537, 1538, 1539, 1540, 1541, 1542, 1543, 1544, 1545, 1546, 1547, 1548, 1549, 1550, 1551, 1552, 1553, 1554, 1555, 1556, 1557, 1558, 1559, 1560, 1561, 1562, 1563, 1564, 1565, 1566, 1567, 1568, 1569, 1570, 1571, 1572, 1573, 1574, 1575, 1576, 1577, 1578, 1579, 1580, 1581, 1582, 1583, 1584, 1585, 1586, 1587, 1588, 1589, 1590, 1591, 1592, 1593, 1594, 1595, 1596, 1597, 1598, 1599, 1600, 1601, 1602, 1603, 1750, 1751, 1752, 1753, and 1754. In some aspects, the cancer is a metastatic melanoma.

[0290] This disclosure further provides methods of treating or preventing or reducing risk of a cancer comprising administering at least one anticancer treatment to a subject determined to have a microbiome sample comprising bacteria have 16S rDNA sequence identity of at least 94.5% to 16S rDNA sequences of species belonging to one or more of the families Sutterellaceae, Coriobacteriaceae, Akkermansiaceae, Desulfovibrionaceae, Odoribacteraceae, or Rikenellaceae.

[0291] In some aspects, the bacteria have 16S rDNA sequence identity of at least 95%, 97%, 98%, 98.7% or 99% to 16S rDNA sequences of species belonging to one or more of the families Sutterellaceae, Coriobacteriaceae, Akkermansiaceae, Desulfovibrionaceae, Odoribacteraceae, or Rikenellaceae.

[0292] This disclosure further provides methods of treating or preventing or reducing risk of a cancer comprising administering an anticancer treatment to a subject determined to have a microbiome sample comprising bacteria selected from Intestinimonas butyriciproducens and Anaerotruncus colihominis or bacteria having a 16S rDNA sequence having at least 97%, 98%, 98.7% or 99% sequence identity to any one 16S rDNA sequence thereof. In some aspects, the 16S rDNA sequence of Intestinimonas butyriciproducens is selected from SEQ ID NOs: 1369, 1370, 1371, 1372, 1373, 1374, 1375, 1376, 1377, 1378, 1379, 1380, 1381, 1382, 1383, 1384, 1385, 1386, 1387, 1388, 1389, 1390, 1391, 1392, 1393, and 1394, and the 16S rDNA sequence of Anaerotruncus colihominis is selected from SEQ ID NOs: 1066, 1067, 1068, 1069, 1070, 1071, 1072, 1073, 1074, 1075, 1076, 1077, 1078, 1079, 1080, 1081, 1082, 1083, 1084, and 1085.

[0293] This disclosure further provides methods of treating or preventing or reducing risk of a cancer comprising administering an anticancer treatment to a subject determined to have a microbiome sample comprising bacteria selected from Murimonas intestini and Faecalicatena orotica, or bacteria having a 16S rDNA sequence having at least 97%, 98%, 98.7% or 99% sequence identity to any one 16S rDNA sequence thereof. In some aspects, the 16S rDNA sequence of Murimonas intestini is SEQ ID NO: 1621 and the 16S rDNA sequence of Faecalicatena orotica is selected from SEQ ID NOs: 800, 801, 802, 803, 804, 805, 806, 807, 808, 809, and 810.

[0294] This disclosure further provides methods of treating or preventing or reducing risk of a cancer comprising administering an anticancer treatment to a subject determined to have a microbiome sample comprising bacteria selected from Anaerotignum lactatifermentans, Anaerotruncus colihominis, Angelakisella sp1, Bacteroides cellulosilyticus, Bacteroides gallinarum, Bacteroides plebeius, Blautia coccoides group, Christensenella minuta, Christensenellaceae NG16_sp1, Clostridium hylemonae, Collinsella bouchesdurhonensis, Coprobacter secundus group, Eisenbergiella massiliensis, Emergencia timonensis, Faecalicatena orotica, Fusicatenibacter sp1, Intestinimonas butyriciproducens, Intestinimonas timonensis, Lachnospiraceae NG17_sp3, Lawsonibacter sp3, Oxalobacter formigenes, Peptoniphilaceae NG4_sp2, Prochlorotrichaceae NG20_sp1, or bacteria having a 16S rDNA sequence having at least 97%, 98%, 98.7% or 99% sequence identity to any one 16S rDNA sequence thereof. In some aspects, the 16S rDNA sequence of Anaerotignum lactatifermentans is selected from SEQ ID NOs: 1058, 1059, 1060, 1061, 1062, 1063, 1064, and 1065, the 16S rDNA sequence of Anaerotruncus colihominis is selected from SEQ ID NOs: 1066, 1067, 1068, 1069, 1070, 1071, 1072, 1073, 1074, 1075, 1076, 1077, 1078, 1079, 1080, 1081, 1082, 1083, 1084, and 1085, the 16S rDNA sequence of Bacteroides cellulosilyticus is selected from SEQ ID NOs: 1086, 1087, 1088, 1089, 1090, 1091, 1092, 1093, 1094, 1095, 1096, 1097, 1098, 1099, 1100, 1101, 1102, 1103, 1104, 1105, and 1106, the 16S rDNA sequence of Bacteroides gallinarum is selected from SEQ ID NOs: 1128 and 1129, the 16S rDNA sequence of Bacteroides plebeius is selected from SEQ ID NOs: 1136, 1137, 1138, 1139, 1140, 1141, 1142, 1143, 1144, 1145, 1146, 1147, 1148, 1149, 1150, 1151, 1152, 1153, 1154, and 1155, the 16S rDNA sequence of Blautia coccoides group is selected from SEQ ID NOs: 1219, 1220, 1221, 1222, 1223, 1224, 1225, 1226, 1227, 1228, 1229, 1230, 1231, 1232, 1233, 1234, 1235, 1236, 1237, 1238, 1239, 1240, 1241, 1242, 1243, 1244, 1245, 1246, 1247, 1248, 1249, 1250, 1251, 1252, 1253, 1254, 1255, 1256, 1257, 1258, 1259, 1260, 1261, 1262, 1263, 1264, 1265, 1266, 1267, 1268, 1269, 1270, 1271, and 1272, the 16S rDNA sequence of Christensenella minuta is selected from SEQ ID NOs: 1275, 1276, 1277, 1278, 1279, 1280, 1281, and 1282, the 16S rDNA sequence of Christensenellaceae NG16_sp1 is selected from SEQ ID NOs: 1286, 1287, and 1288, the 16S rDNA sequence of Clostridium hylemonae is selected from SEQ ID NOs: 790, 791, 792, 793, 794, 795, and 796, the 16S rDNA sequence of Collinsella bouchesdurhonensis is selected from SEQ ID NOs: 1289, 1290, 1291, and 1292, the 16S rDNA sequence of Coprobacter secundus group is selected from SEQ ID NOs: 797, 798, and 799, the 16S rDNA sequence of Eisenbergiella massiliensis is selected from SEQ ID NOs: 1300, 1301, 1302, 1303, 1304, 1305, 1306, 1307, and 1308, the 16S rDNA sequence of Emergencia timonensis is selected from SEQ ID NOs: 1309, 1310, 1311, 1312, 1313, 1314, 1315, 1316, 1317, 1318, 1319, and 1320, the 16S rDNA sequence of Faecalicatena orotica is selected from SEQ ID NOs: 800, 801, 802, 803, 804, 805, 806, 807, 808, 809, and 810, the 16S rDNA sequence of Fusicatenibacter sp1 is selected from SEQ ID NOs: 1350, 1351, 1352, 1353, 1354, and 1355, the 16S rDNA sequence of Intestinimonas butyriciproducens is selected from SEQ ID NOs: 1369, 1370, 1371, 1372, 1373, 1374, 1375, 1376, 1377, 1378, 1379, 1380, 1381, 1382, 1383, 1384, 1385, 1386, 1387, 1388, 1389, 1390, 1391, 1392, 1393, and 1394, the 16S rDNA sequence of Intestinimonas timonensis is selected from SEQ ID NOs: 1403 and, 1404, the 16S rDNA sequence of Lachnospiraceae NG17_sp3 is selected from SEQ ID NOs: 1417 and 1418, the 16S rDNA sequence of Lawsonibacter sp3 is selected from SEQ ID NOs: 1604, 1605, 1606, and 1607, the 16S rDNA sequence of Oxalobacter formigenes is selected from SEQ ID NOs: 1649, 1650, 1651, 1652, and 1653, the 16S rDNA sequence of Peptoniphilaceae NG4_sp2 is SEQ ID NO: 172, or the 16S rDNA sequence of Prochlorotrichaceae NG20_sp1 is SEQ ID NO: 1661.

[0295] This disclosure further provides methods of treating or preventing or reducing risk of a cancer comprising administering an anticancer treatment to a subject determined to have a microbiome sample comprising bacteria selected from Akkermansia muciniphila, Dysosmobacter welbionis, Anaerobutyricum hallii, Blautia caecimuris, Holdemania filiformis, Acetatifactor sp1, Ruminococcaceae NG14 sp1, Hungatella sp2, Bifidobacterium catenulatum group, Blautia wexlerae, Hungatella sp1, Intestinibacter bartlettii, Lachnospiraceae NG31 sp1, Lactonifactor longoviformis, Leuconostoc gelidum, Sutterella wadsworthensis, [Extibacter] muris, Alistipes onderdonkii, Collinsella intestinalis, Collinsella stercoris, Muricomes sp1, Neobitarella massiliensis, Prevotellamassilia sp2, Ruminococcaceae NG33 sp1, [Adlercreutzia] equolifaciens group, [Anaerotruncus] rubiinfantis, [Romboutsia]timonensis, Alistipes finegoldii, Alistipes indistinctus, Alistipes obesi, Alistipes putredinis, Alistipes shahii, Anaerofustis stercorihominis, Anaeromassilibacillus sp3, Barnesiella intestinihominis, Bilophila wadsworthia, Blautia faecis, Coriobacteriaceae NG5 sp1, Frisingicoccus sp3, Gordonibacter pamelaeae, Harryflintia acetispora, Lachnospiraceae NG29 sp1, Marvinbryantia sp8, Massilimaliae massiliensis, Massilimaliae timonensis, Neglecta timonensis, Parabacteroides merdae, Peptoniphilaceae NG4 sp1, Peptoniphilaceae NG4 sp3, Pseudoflavonifractor capillosus, Ruminococcaceae NG12 sp1, Ruminococcaceae NG15 sp3, Ruminococcaceae NG17 sp3, Ruthenibacterium sp1, Anaerostipes hadrus, Christensenella timonensis, Desulfovibrio desulfuricans, Dialister invisus, Lachnoclostridium edouardi, Lachnospira pectinoschiza, Lachnospiraceae NG18_sp7, Lawsonibacter sp7, Merdimonas faecis, Negativibacillus sp1, Odoribacter splanchnicus, Roseburia faecis, Roseburia intestinalis, Ruminococcaceae NG11_sp5, Ruthenibacterium lactatiformans, or bacteria having 16S rDNA having at least 94.5%, 95%, 97%, 98%, 98.7% or 99% sequence identity to any one of the 16S rDNA thereof.

[0296] This disclosure further provides methods of treating or preventing or reducing risk of a cancer comprising administering an anticancer treatment to a subject determined to have a microbiome sample comprising bacteria selected from Akkermansia muciniphila, Bifidobacterium catenulatum group, Blautia wexlerae, Hungatella sp1, Intestinibacter bartlettii, Lachnospiraceae NG31 sp1, Lactonifactor longoviformis, Leuconostoc gelidum, Sutterella wadsworthensis, [Extibacter] muris, Collinsella intestinalis, Collinsella stercoris, Muricomes sp1, Neobitarella massiliensis, Prevotellamassilia sp2, Ruminococcaceae NG33 sp1, [Adlercreutzia] equolifaciens group, [Anaerotruncus] rubiinfantis, Alistipes finegoldii, Alistipes indistinctus, Alistipes obesi, Alistipes putredinis, Alistipes shahii, Anaerofustis stercorihominis, Anaeromassilibacillus sp3, Barnesiella intestinihominis, Bilophila wadsworthia, Blautia faecis, Coriobacteriaceae NG5 sp1, Frisingicoccus sp3, Gordonibacter pamelaeae, Harryflintia acetispora, Lachnospiraceae NG29 sp1, Marvinbryantia sp8, Massilimaliae massiliensis, Massilimaliae timonensis, Neglecta timonensis, Parabacteroides merdae, Peptoniphilaceae NG4 sp1, Peptoniphilaceae NG4 sp3, Pseudoflavonifractor capillosus, Ruminococcaceae NG12 sp1, Ruminococcaceae NG15 sp3, Ruminococcaceae NG17 sp3, Ruthenibacterium sp1, or bacteria having 16S rDNA having at least 94.5%, 95%, 97%, 98%, 98.7% or 99% sequence identity to any one of the 16S rDNA thereof.

[0297] In some aspects, the bacteria comprises one or more bacteria selected from Akkermansia muciniphila, Dysosmobacter welbionis, Anaerobutyricum hallii, Blautia caecimuris, Holdemania filiformis, or bacteria having 16S rDNA having at least 94.5%, 95%, 97%, 98%, 98.7% or 99% sequence identity to any one of the 16S rDNA thereof. In some aspects, the bacteria in the composition can comprise one or more bacteria selected from Akkermansia muciniphila or bacteria having 16S rDNA having at least 94.5%, 95%, 97%, 98%, 98.7% or 99% sequence identity to any one of the 16S rDNA thereof.

[0298] In some aspects, the bacteria comprises one or more bacteria selected from Acetatifactor sp1, Blautia wexlerae, Ruminococcaceae NG14 sp1, Hungatella sp2, Holdemania filiformis, or bacteria having 16S rDNA having at least 94.5%, 95%, 97%, 98%, 98.7% or 99% sequence identity to any one of the 16S rDNA thereof.

[0299] In some aspects, the bacteria comprises one or more bacteria selected from Bifidobacterium catenulatum group, Blautia wexlerae, Hungatella sp1, Intestinibacter bartlettii, Lachnospiraceae NG31 sp1, Lactonifactor longoviformis, Leuconostoc gelidum, Sutterella wadsworthensis, Anaerostipes hadrus, Dialister invisus, Merdimonas faecis, Roseburia faecis, Roseburia intestinalis, Ruminococcaceae NG11_sp5, or bacteria having 16S rDNA having at least 94.5%, 95%, 97%, 98%, 98.7% or 99% sequence identity to any one of the 16S rDNA thereof. In some aspects, the cancer is a bladder cancer.

[0300] In some aspects, the bacteria comprises one or more bacteria selected from [Extibacter] muris, Alistipes onderdonkii, Collinsella intestinalis, Collinsella stercoris, Muricomes sp1, Neobitarella massiliensis, Prevotellamassilia sp2, Ruminococcaceae NG33 sp1, Desulfovibrio desulfuricans, Roseburia intestinalis, or bacteria having 16S rDNA having at least 94.5%, 95%, 97%, 98%, 98.7% or 99% sequence identity to any one of the 16S rDNA thereof. In some aspects, the bacteria comprises one or more bacteria selected from [Extibacter] muris, Collinsella intestinalis, Collinsella stercoris, Muricomes sp1, Neobitarella massiliensis, Prevotellamassilia sp2, Ruminococcaceae NG33 sp1, or bacteria having 16S rDNA having at least 94.5%, 95%, 97%, 98%, 98.7% or 99% sequence identity to any one of the 16S rDNA thereof. In some aspects, the cancer is a non-small cell lung cancer.

[0301] In some aspects, the bacteria comprises one or more bacteria selected from [Adlercreutzia] equolifaciens group, [Anaerotruncus] rubiinfantis, [Romboutsia] timonensis, Alistipes finegoldii, Alistipes indistinctus, Alistipes obesi, Alistipes putredinis, Alistipes shahii, Anaerofustis stercorihominis, Anaeromassilibacillus sp3, Barnesiella intestinihominis, Bilophila wadsworthia, Blautia faecis, Coriobacteriaceae NG5 sp1, Frisingicoccus sp3, Gordonibacter pamelaeae, Harryflintia acetispora, Lachnospiraceae NG29 sp1, Marvinbryantia sp8, Massilimaliae massiliensis, Massilimaliae timonensis, Neglecta timonensis, Parabacteroides merdae, Peptoniphilaceae NG4 sp1, Peptoniphilaceae NG4 sp3, Pseudoflavonifractor capillosus, Ruminococcaceae NG12 sp1, Ruminococcaceae NG15 sp3, Ruminococcaceae NG17 sp3, Ruthenibacterium sp1, Lachnoclostridium edouardi, Lachnospira pectinoschiza, Lawsonibacter sp7, Odoribacter splanchnicus, Ruthenibacterium lactatiformans, or bacteria having 16S rDNA having at least 94.5%, 95%, 97%, 98%, 98.7% or 99% sequence identity to any one of the 16S rDNA thereof. In some aspects, the bacteria comprises one or more bacteria selected from [Adlercreutzia] equolifaciens group, [Anaerotruncus] rubiinfantis, Alistipes finegoldii, Alistipes indistinctus, Alistipes obesi, Alistipes putredinis, Alistipes shahii, Anaerofustis stercorihominis, Anaeromassilibacillus sp3, Barnesiella intestinihominis, Bilophila wadsworthia, Blautia faecis, Coriobacteriaceae NG5 sp1, Frisingicoccus sp3, Gordonibacter pamelaeae, Harryflintia acetispora, Lachnospiraceae NG29 sp1, Marvinbryantia sp8, Massilimaliae massiliensis, Massilimaliae timonensis, Neglecta timonensis, Parabacteroides merdae, Peptoniphilaceae NG4 sp1, Peptoniphilaceae NG4 sp3, Pseudoflavonifractor capillosus, Ruminococcaceae NG12 sp1, Ruminococcaceae NG15 sp3, Ruminococcaceae NG17 sp3, Ruthenibacterium sp1, or bacteria having 16S rDNA having at least 94.5%, 95%, 97%, 98%, 98.7% or 99% sequence identity to any one of the 16S rDNA thereof. In some aspects, the cancer is a metastatic melanoma.

[0302] This disclosure further provides methods of treating or preventing or reducing risk of a cancer comprising administering an anticancer treatment to a subject determined to have a microbiome sample comprising one or more bacteria having a 16S rDNA sequence that is at least 85%, at least 90%, at least 95%, at least 96%, at least 97%, at least 98%, at least 99%, or 100% identical to a 16S rDNA sequence set forth in SEQ ID NOs: 1, 2, 3, 4, 5, 6, 7, 8, 9, 10, 11, 12, 13, 14, 15, 16, 17, 18, 19, 20, 21, 22, 23, 24, 25, 26, 27, 28, 29, 30, 31, 32, 33, 34, 35, 36, 37, 38, 39, 40, 41, 42, 43, 44, 45, 46, 47, 48, 49, 50, 51, 52, 53, 54, 55, 56, 57, 58, 59, 60, 61, 62, 63, 64, 65, 66, 67, 68, 69, 70, 71, 72, 73, 74, 75, 76, 77, 78, 79, 80, 81, 82, 83, 84, 85, 86, 87, 88, 89, 90, 91, 92, 93, 94, 95, 96, 97, 98, 99, 100, 101, 102, 103, 104, 105, 106, 107, 108, 109, 110, 111, 112, 113, 114, 115, 116, 117, 118, 119, 120, 121, 122, 123, 124, 125, 126, 127, 128, 129, 130, 131, 132, 133, 134, 135, 136, 137, 138, 139, 140, 141, 142, 143, 144, 145, 146, 147, 148, 149, 150, 151, 152, 153, 154, 155, 156, 157, 158, 159, 160, 161, 162, 163, 164, 165, 166, 167, 168, 169, 170, 171, 172, 173, 174, 175, 176, 177, 178, 179, 180, 181, 182, 183, 184, 185, 186, 601, 602, 603, 604, 605, 606, 607, 613, 614, 615, 616, 617, 618, 619, 622, 623, 640, 641, 643, 662, 663, 664, 665, 666, 667, 675, 676, 681, 688, 690, 691, 693, 696, 697, 699, 700, 702, 703, 704, 705, 706, 707, 708, 709, 710, 711, 712, 713, 714, 715, 716, 717, 718, 719, 720, 721, 722, 723, 724, 725, 726, 727, 728, 729, 730, 732, 733, 734, 735, 736, 737, 738, 739, 740, 741, 742, 743, 744, 746, 747, 748, 749, 750, 751, 752, 753, 754, 755, 756, 757, 758, 759, 760, 761, 762, 763, 765, 766, 767, 768, 769, 770, 771, 772, 773, 1018, 1019, 1020, 1021, 1022, 1023, 1024, 1025, 1026, 1027, 1028, 1029, 1030, 1031, 1032, 1033, 1034, 1035, 1036, 1037, 1038, 1039, 1040, 1041, 1042, 1043, 1044, 1045, 1046, 1047, 1048, 1049, 1050, 1051, 1052, 1053, 1054, 1055, 1056, 1057, 1283, 1284, 1285, 1293, 1294, 1295, 1296, 1297, 1298, 1299, 1405, 1406, 1407, 1408, 1409, 1410, 1411, 1412, 1413, 1414, 1415, 1416, 1419, 1420, 1421, 1422, 1423, 1424, 1425, 1426, 1608, 1609, 1610, 1611, 1612, 1613, 1614, 1615, 1010, 1622, 1623, 1624, 1625, 1626, 1627, 1628, 1629, 1630, 1631, 1632, 1633, 1634, 1635, 1636, 1637, 1638, 1639, 1640, 1641, 1642, 1643, 1644, 1645, 1646, 1647, 1648, 1696, 1697, 1698, 1699, 1700, 1701, 1702, 1703, 1704, 1705, 1706, 1707, 1708, 1709, 1710, 1711, 1712, 1713, 1714, 1715, 1716, 1717, 1718, 1719, 1720, 1721, 1722, 1723, 1724, 1725, 1726, 1727, 1728, 1729, 1730, 1731, 1732, 1733, 1734, 1735, 1736, 1737, 1738, 1739, 1740, 1741, 1742, 1743, 1744, 1745, 1746, 1747, 1748, and 1749.

[0303] In some aspects, the bacteria comprises one or more bacteria having a 16S rDNA sequence that is at least 85%, at least 90%, at least 95%, at least 96%, at least 97%, at least 98%, at least 99%, or 100% identical to a 16S rDNA sequence set forth in SEQ ID NOs: 605, 613, 640, 641, 643, 662, 663, 664, 665, 666, 667, 681, 688, 690, 703, 732, 733, 736, 737, 738, 739, 740, 741, 742, 743, 744, 749, 754, 755, 756, 758, 765, 766, 767 and 773.

[0304] In some aspects, the bacteria comprises one or more bacteria having a 16S rDNA sequence that is at least 85%, at least 90%, at least 95%, at least 96%, at least 97%, at least 98%, at least 99%, or 100% identical to a 16S rDNA sequence set forth in SEQ ID NOs: 601, 602, 603, 604, 606, 607, 613, 614, 615, 616, 617, 618, 619, 622, 623, 675, 676, 681, 691, 693, 696, 697, 699, 700, 702, 704, 705, 706, 707, 708, 709, 710, 711, 712, 713, 714, 715, 716, 717, 718, 719, 720, 721, 722, 723, 724, 725, 726, 727, 728, 729, 730, 734, 735, 736, 746, 747, 748, 749, 750, 751, 752, 753, 757, 759, 760, 761, 762, 763, 768, 769, 770, 771 and 772.

[0305] In some aspects, the bacteria comprises one or more bacteria having a 16S rDNA sequence that is at least 85%, at least 90%, at least 95%, at least 96%, at least 97%, at least 98%, at least 99%, or 100% identical to a 16S rDNA sequence set forth in SEQ ID NOs: 2, 3, 6, 10, 12, 13, 19, 20, 21, 22, 23, 24, 34, 37, 38, 39, 42, 43, 44, 45, 46, 47, 48, 50, 51, 52, 55, 57, 58, 59, 64, 65, 66, 67, 73, 74, 75, 80, 82, 83, 84, 85, 86, 87, 88, 89, 90, 91, 92, 93, 94, 95, 96, 97, 98, 99, 100, 101, 104, 105, 106, 107, 108, 109, 110, 111, 112, 114, 115, 116, 120, 123, 129, 135, 136, 138, 139, 140, 141, 142, 143, 145, 146, 148, 153, 156, 157, 158, 161, 168, 169, 170, 173, 176, 178, 180, 182, 1018, 1019, 1020, 1021, 1022, 1023, 1024, 1025, 1026, 1027, 1028, 1029, 1030, 1031, 1032, 1033, 1034, 1035, 1036, 1037, 1038, 1039, 1040, 1041, 1042, 1043, 1044, 1045, 1046, 1047, 1048, 1049, 1050, 1051, 1052, 1053, 1054, 1055, 1056, 1057, 1297, 1298, 1299, 1010, 1696, 1697, 1698, 1699, 1700, 1701, 1702, 1703, 1704, 1705, 1706, 1707, 1708, 1709, 1710, 1711, 1712, 1713, 1714, 1715, 1716, 1717, 1718, 1719, 1720, 1721, 1722, 1723, 1724, 1725, 1726, 1727, 1728, 1729, 1730, 1731, and 1732. In some aspects, the cancer is a bladder cancer.

[0306] In some aspects, the bacteria comprises one or more bacteria having a 16S rDNA sequence that is at least 85%, at least 90%, at least 95%, at least 96%, at least 97%, at least 98%, at least 99%, or 100% identical to a 16S rDNA sequence set forth in SEQ ID NOs: 16, 17, 18, 53, 54, 60, 77, 79, 81, 103, 119, 125, 132, 133, 134, 164, 175, 179, 184, 1293, 1294, 1295, 1296, 1705, 1706, 1707, 1708, 1709, 1710, 1711, 1712, 1713, 1714, 1715, 1716, 1717, 1718, 1719, 1720, 1721, 1722, 1723, 1724, 1725, 1726, 1727, 1728, 1729, 1730, 1731, and 1732. In some aspects, the cancer is a non-small cell lung cancer.

[0307] In some aspects, the bacteria comprises one or more bacteria having a 16S rDNA sequence that is at least 85%, at least 90%, at least 95%, at least 96%, at least 97%, at least 98%, at least 99%, or 100% identical to a 16S rDNA sequence set forth in SEQ ID NOs: 1, 4, 5, 7, 8, 9, 11, 14, 15, 25, 26, 27, 28, 29, 30, 31, 32, 33, 35, 36, 40, 41, 61, 62, 68, 69, 70, 71, 72, 76, 78, 117, 118, 121, 122, 124, 127, 128, 130, 131, 137, 144, 147, 149, 150, 151, 152, 154, 155, 159, 160, 162, 163, 165, 166, 167, 171, 174, 177, 181, 183, 186, 1405, 1406, 1407, 1408, 1409, 1410, 1411, 1412, 1413, 1414, 1415, 1416, 1608, 1609, 1610, 1611, 1612, 1613, 1614, 1615, 1622, 1623, 1624, 1625, 1626, 1627, 1628, 1629, 1630, 1631, 1632, 1633, 1634, 1635, 1636, 1637, 1638, 1639, 1640, 1641, 1642, 1643, 1644, 1645, 1646, 1647, 1648, 1733, 1734, 1735, 1736, 1737, 1738, 1739, 1740, 1741, 1742, 1743, 1744, 1745, 1746, 1747, 1748, and 1749. In some aspects, the cancer is a metastatic melanoma.

[0308] In some aspects, the subject is determined to not have a microbiome sample that comprises one or more bacteria selected from Holdemania massiliensis, Rothia mucilaginosa, Hungatella sp2, Prevotella copri, Campylobacter concisus, [Atopobium] parvulum, Alistipes onderdonkii, Angelakisella massiliensis, Christensenellaceae NG5 sp2, Cuneatibacter caecimuris, Desulfovibrio fairfieldensis, Ruminococcaceae NG13 sp1, Ruminococcaceae NG16 sp1, [Coprococcus] catus, [Lactobacillus] fermentum, [Romboutsia] timonensis, [Ruminococcus] bromii, [Ruminococcus] gauvreauii, Actinomyces graevenitzii, Agathobaculum butyriciproducens group, Bacteroides caccae, Bacteroides intestinalis, Bittarella massiliensis, Blautia luti group, Clostridium saudiense, Corynebacterium durum, Fusicatenibacter sp2, Lachnospiraceae NG30 sp3, Massilimaliae sp1, Monoglobus pectinilyticus, Rothia dentocariosa, Rothia mucilaginosa, Ruminococcaceae NG17 sp1, Schaalia odontolytica, Streptococcus australis, Streptococcus gordonii, Streptococcus infantis group, Streptococcus parasanguinis, Streptococcus salivarius group, [Atopobium] parvulum, [Ruminococcus] gnavus, Bacteroides dorei group, Blautia sp1, Schaalia sp2, Actinomycetaceae_NG7 sp1, Allisonella histaminiformans, Bacteroides coprocola, Bacteroides faecis, Bacteroides massiliensis, Bifidobacterium animalis, Clostridium asparagiforme group, Desulfovibrionaceae NG5_sp1, Faecalibacterium prausnitzii, Gemmiger sp2, Granulicatella adiacens, Intestinimonas massiliensis, Lactobacillus delbrueckii, Lactobacillus paracasei, Lactobacillus reuteri, Lactococcus lactis, Marvinbryantia sp5, Prevotella buccalis, Propionibacterium freudenreichii, Ruminococcaceae NG18_sp7, Scardovia wiggsiae, Slackia isoflavoniconvertens, Thermodesulfobiaceae NG1_sp1, or bacteria having 16S rDNA having at least 94.5%, 95%, 97%, 98%, 98.7% or 99% sequence identity to any one of the 16S rDNA thereof.

[0309] In some aspects, the subject is determined to not have a microbiome sample that comprises one or more bacteria selected from Rothia mucilaginosa, Prevotella copri, Campylobacter concisus, [Atopobium] parvulum, Angelakisella massiliensis, Christensenellaceae NG5 sp2, Cuneatibacter caecimuris, Desulfovibrio fairfieldensis, Ruminococcaceae NG13 sp1, Ruminococcaceae NG16 sp1, [Coprococcus] catus, [Lactobacillus] fermentum, [Ruminococcus] bromii, [Ruminococcus] gauvreauii, Actinomyces graevenitzii, Agathobaculum butyriciproducens group, Bacteroides caccae, Bacteroides intestinalis, Bittarella massiliensis, Blautia luti group, Clostridium saudiense, Corynebacterium durum, Fusicatenibacter sp2, Lachnospiraceae NG30 sp3, Massilimaliae sp1, Monoglobus pectinilyticus, Rothia dentocariosa, Rothia mucilaginosa, Ruminococcaceae NG17 sp1, Schaalia odontolytica, Streptococcus australis, Streptococcus gordonii, Streptococcus infantis group, Streptococcus parasanguinis, Streptococcus salivarius group, [Atopobium] parvulum, [Ruminococcus] gnavus, Bacteroides dorei group, Blautia sp1, Schaalia sp2, or bacteria having 16S rDNA having at least 94.5%, 95%, 97%, 98%, 98.7% or 99% sequence identity to any one of the 16S rDNA thereof.

[0310] In some aspects, the subject is determined to not have a microbiome sample that comprises one or more bacteria selected from Holdemania massiliensis, Rothia mucilaginosa, Hungatella sp2, Prevotella copri, Campylobacter concisus, or bacteria having 16S rDNA having at least 94.5%, 95%, 97%, 98%, 98.7% or 99% sequence identity to any one of the 16S rDNA thereof. In some aspects, the subject is determined to not have a microbiome sample that comprises one or more bacteria selected from Rothia mucilaginosa, Prevotella copri, Campylobacter concisus, or bacteria having 16S rDNA having at least 94.5%, 95%, 97%, 98%, 98.7% or 99% sequence identity to any one of the 16S rDNA thereof.

[0311] In some aspects, the subject is determined to not have a microbiome sample that comprises one or more bacteria selected from Rothia mucilaginosa, [Atopobium] parvulum, Holdemania massiliensis, Prevotella copri, Campylobacter concisus, or bacteria having 16S rDNA having at least 94.5%, 95%, 97%, 98%, 98.7% or 99% sequence identity to any one of the 16S rDNA thereof. In some aspects, the subject is determined to not have a microbiome sample that comprises one or more bacteria selected from Rothia mucilaginosa, [Atopobium]parvulum, Prevotella copri, Campylobacter concisus, or bacteria having 16S rDNA having at least 94.5%, 95%, 97%, 98%, 98.7% or 99% sequence identity to any one of the 16S rDNA thereof.

[0312] In some aspects, the subject is determined to not have a microbiome sample that comprises one or more bacteria selected from Alistipes onderdonkii, Angelakisella massiliensis, Christensenellaceae NG5 sp2, Cuneatibacter caecimuris, Desulfovibrio fairfieldensis, Ruminococcaceae NG13 sp1, Ruminococcaceae NG16 sp1, Bifidobacterium animalis, Faecalibacterium prausnitzii, or bacteria having 16S rDNA having at least 94.5%, 95%, 97%, 98%, 98.7% or 99% sequence identity to any one of the 16S rDNA thereof. In some aspects, the subject is determined to not have a microbiome sample that comprises one or more bacteria selected from Angelakisella massiliensis, Christensenellaceae NG5 sp2, Cuneatibacter caecimuris, Desulfovibrio fairfieldensis, Ruminococcaceae NG13 sp1, Ruminococcaceae NG16 sp1, or bacteria having 16S rDNA having at least 94.5%, 95%, 97%, 98%, 98.7% or 99% sequence identity to any one of the 16S rDNA thereof. In some aspects, the cancer is a bladder cancer.

[0313] In some aspects, the subject is determined to not have a microbiome sample that comprises one or more bacteria selected from [Coprococcus] catus, [Lactobacillus] fermentum, [Romboutsia] timonensis, [Ruminococcus] bromii, [Ruminococcus] gauvreauii, Actinomyces graevenitzii, Agathobaculum butyriciproducens group, Bacteroides caccae, Bacteroides intestinalis, Bittarella massiliensis, Blautia luti group, Clostridium saudiense, Corynebacterium durum, Fusicatenibacter sp2, Lachnospiraceae NG30 sp3, Massilimaliae sp1, Monoglobus pectinilyticus, Rothia dentocariosa, Rothia mucilaginosa, Ruminococcaceae NG17 sp1, Schaalia odontolytica, Streptococcus australis, Streptococcus gordonii, Streptococcus infantis group, Streptococcus parasanguinis, Streptococcus salivarius group, Allisonella histaminiformans, Bacteroides faecis, Bacteroides massiliensis, Desulfovibrionaceae NG5_sp1, Gemmiger sp2, Intestinimonas massiliensis, Marvinbryantia sp5, Propionibacterium freudenreichii, Slackia isoflavoniconvertens, Thermodesulfobiaceae NG1_sp1, or bacteria having 16S rDNA having at least 94.5%, 95%, 97%, 98%, 98.7% or 99% sequence identity to any one of the 16S rDNA thereof. In some aspects, the subject is determined to not have a microbiome sample that comprises one or more bacteria selected from [Coprococcus] catus, [Lactobacillus] fermentum, [Ruminococcus] bromii, [Ruminococcus]gauvreauii, Actinomyces graevenitzii, Agathobaculum butyriciproducens group, Bacteroides caccae, Bacteroides intestinalis, Bittarella massiliensis, Blautia luti group, Clostridium saudiense, Corynebacterium durum, Fusicatenibacter sp2, Lachnospiraceae NG30 sp3, Massilimaliae sp1, Monoglobus pectinilyticus, Rothia dentocariosa, Rothia mucilaginosa, Ruminococcaceae NG17 sp1, Schaalia odontolytica, Streptococcus australis, Streptococcus gordonii, Streptococcus infantis group, Streptococcus parasanguinis, Streptococcus salivarius group, or bacteria having 16S rDNA having at least 94.5%, 95%, 97%, 98%, 98.7% or 99% sequence identity to any one of the 16S rDNA thereof. In some aspects, the cancer is a non-small cell lung cancer.

[0314] In some aspects, the subject is determined to not have a microbiome sample that comprises one or more bacteria selected from [Atopobium] parvulum, [Ruminococcus] gnavus, Bacteroides dorei group, Blautia sp1, Schaalia sp2, Granulicatella adiacens, Lactococcus lactis, Scardovia wiggsiae, or bacteria having 16S rDNA having at least 94.5%, 95%, 97%, 98%, 98.7% or 99% sequence identity to any one of the 16S rDNA thereof. In some aspects, the cancer is a metastatic melanoma.

[0315] In some aspects, the subject is determined to not have a microbiome sample that comprises one or more bacteria having a 16S rDNA sequence that is at least 85%, at least 90%, at least 95%, at least 96%, at least 97%, at least 98%, at least 99%, or 100% identical to a 16S rDNA sequence set forth in SEQ ID NOs: 187, 188, 189, 190, 191, 192, 193, 194, 195, 196, 197, 198, 199, 200, 201, 202, 203, 204, 205, 206, 207, 208, 209, 210, 211, 212, 213, 214, 215, 216, 217, 218, 219, 220, 221, 222, 223, 224, 225, 226, 227, 228, 229, 230, 231, 232, 233, 234, 235, 236, 237, 238, 239, 240, 241, 242, 243, 244, 245, 246, 247, 248, 249, 250, 251, 252, 253, 254, 255, 256, 257, 258, 259, 260, 261, 262, 263, 264, 265, 266, 267, 268, 269, 270, 271, 272, 273, 274, 275, 276, 277, 278, 279, 280, 281, 282, 283, 284, 285, 286, 287, 288, 289, 290, 291, 292, 293, 294, 295, 296, 297, 298, 299, 300, 301, 302, 303, 304, 305, 306, 307, 308, 309, 310, 311, 312, 313, 314, 315, 316, 317, 318, 319, 320, 321, 322, 323, 324, 325, 326, 327, 328, 329, 330, 331, 332, 333, 334, 335, 336, 337, 338, 339, 340, 341, 342, 343, 344, 345, 346, 347, 348, 349, 350, 351, 352, 353, 354, 355, 356, 357, 358, 359, 360, 361, 362, 363, 364, 365, 366, 367, 368, 369, 370, 371, 372, 373, 374, 375, 376, 377, 378, 379, 380, 381, 382, 383, 384, 385, 386, 387, 388, 389, 390, 391, 392, 393, 394, 395, 396, 397, 398, 399, 400, 401, 402, 403, 404, 405, 406, 407, 408, 409, 410, 411, 412, 413, 414, 415, 416, 417, 418, 419, 420, 421, 422, 423, 424, 425, 426, 427, 428, 429, 430, 431, 432, 433, 434, 435, 436, 437, 438, 439, 440, 441, 442, 443, 444, 445, 446, 447, 448, 449, 450, 451, 452, 453, 454, 455, 456, 457, 458, 459, 460, 461, 462, 463, 464, 465, 466, 467, 468, 469, 470, 471, 472, 473, 474, 475, 476, 477, 478, 479, 480, 481, 482, 483, 484, 485, 486, 487, 488, 489, 490, 491, 492, 493, 494, 495, 496, 497, 498, 499, 500, 501, 502, 503, 504, 505, 506, 507, 508, 509, 510, 511, 512, 513, 514, 515, 516, 517, 518, 519, 520, 521, 522, 523, 524, 525, 526, 527, 528, 529, 530, 531, 532, 533, 534, 535, 536, 537, 538, 539, 540, 541, 542, 543, 544, 545, 546, 547, 548, 549, 550, 551, 552, 553, 554, 555, 556, 557, 558, 559, 560, 561, 562, 563, 564, 565, 566, 567, 568, 569, 570, 571, 572, 573, 574, 575, 576, 577, 578, 579, 580, 581, 582, 583, 584, 585, 586, 587, 588, 589, 590, 591, 592, 593, 594, 595, 596, 597, 598, 599, 600, 608, 609, 610, 611, 612, 620, 621, 622, 623, 624, 625, 626, 627, 628, 629, 630, 631, 632, 633, 634, 635, 636, 637, 638, 639, 642, 644, 645, 646, 647, 648, 649, 650, 651, 652, 653, 654, 655, 656, 657, 658, 659, 660, 661, 668, 669, 670, 671, 672, 673, 674, 677, 678, 679, 680, 682, 683, 684, 685, 686, 687, 689, 692, 694, 695, 698, 701, 731, 734, 764, 1011, 1012, 1013, 1014, 1015, 1016, 1017, 774, 1107, 1108, 1109, 1110, 1111, 1112, 1113, 1114, 1115, 1116, 1117, 1118, 1119, 1120, 1121, 1122, 1123, 1124, 1125, 1126, 1127, 1130, 1131, 1132, 1133, 1134, 1135, 1156, 1157, 1158, 1159, 1160, 1161, 1162, 1163, 1164, 1165, 1166, 1167, 1168, 1169, 1170, 1171, 1172, 1173, 1174, 1175, 1176, 1177, 1178, 1179, 1180, 1181, 1182, 1183, 1184, 1185, 1186, 1187, 1188, 1189, 1190, 1191, 1192, 1193, 1194, 1195, 1196, 1197, 1198, 1199, 1200, 1201, 1202, 1203, 1204, 1205, 1206, 1207, 1208, 1209, 1210, 1211, 1212, 1213, 1214, 1215, 1216, 1217, 1218, 775, 776, 777, 778, 779, 780, 781, 782, 783, 784, 785, 786, 787, 788, 789, 1321, 1322, 1323, 1324, 1325, 1326, 1327, 1328, 1329, 1330, 1331, 1332, 1333, 1334, 1335, 1336, 1337, 1338, 1339, 1340, 1341, 1342, 1343, 1344, 1345, 1346, 1347, 1348, 1349, 1356, 1357, 1358, 1359, 1360, 1361, 1362, 1363, 1364, 1365, 1366, 1367, 1368, 1395, 1396, 1397, 1398, 1399, 1400, 1401, 1402, 1427, 1428, 1429, 1430, 1431, 1432, 1433, 1434, 1435, 1436, 1437, 1438, 1439, 1440, 1441, 1442, 1443, 1444, 1445, 1446, 1447, 1448, 1449, 1450, 1451, 1452, 1453, 1454, 1455, 1456, 1457, 1458, 1459, 1460, 1461, 1462, 1463, 1464, 1465, 1466, 1467, 1468, 1469, 1470, 1471, 1472, 1473, 1474, 1475, 1476, 1477, 1478, 1479, 1480, 1481, 1482, 1483, 1484, 1485, 1486, 1487, 1488, 1489, 1490, 1491, 1492, 1493, 1494, 1495, 1496, 1497, 1498, 1499, 1500, 1501, 1502, 1503, 1504, 1505, 931, 932, 933, 934, 935, 936, 937, 938, 939, 940, 941, 942, 943, 944, 945, 946, 947, 948, 949, 950, 951, 952, 953, 954, 955, 956, 957, 958, 959, 960, 961, 962, 963, 964, 965, 966, 967, 968, 969, 970, 971, 972, 973, 974, 975, 976, 977, 978, 979, 980, 981, 982, 983, 984, 985, 986, 987, 988, 989, 990, 991, 992, 993, 994, 995, 996, 997, 998, 999, 1000, 1001, 1002, 1003, 1004, 1005, 1006, 1007, 1008, 1009, 1506, 1507, 1508, 1509, 1510, 1511, 1512, 1513, 1514, 1515, 1516, 1517, 1518, 1519, 1520, 1521, 1522, 1523, 1524, 1525, 1526, 1527, 1528, 1529, 1530, 1531, 1532, 1533, 1534, 1535, 1536, 1537, 1538, 1539, 1540, 1541, 1542, 1543, 1544, 1545, 1546, 1547, 1548, 1549, 1550, 1551, 1552, 1553, 1554, 1555, 1556, 1557, 1558, 1559, 1560, 1561, 1562, 1563, 1564, 1565, 1566, 1567, 1568, 1569, 1570, 1571, 1572, 1573, 1574, 1575, 1576, 1577, 1578, 1579, 1580, 1581, 1582, 1583, 1584, 1585, 1586, 1587, 1588, 1589, 1590, 1591, 1592, 1593, 1594, 1595, 1596, 1597, 1598, 1599, 1600, 1601, 1602, 1603, 1616, 1617, 1618, 1619, 1620, 1654, 1655, 1656, 1657, 1658, 1659, 1660, 1662, 1663, 1664, 1665, 1666, 1667, 1668, 1669, 1670, 1671, 1672, 1673, 1674, 1675, 1676, 1677, 1678, 1679, 1680, 1681, 1682, 1683, 1684, 1685, 1686, 1687, 1688, 1689, 1690, 1691, 1692, 1693, 1694, 1695, 1750, 1751, 1752, 1753, 1754, 1755, and 1756.

[0316] In some aspects, the subject is determined to not have a microbiome sample that comprises one or more bacteria having a 16S rDNA sequence that is at least 85%, at least 90%, at least 95%, at least 96%, at least 97%, at least 98%, at least 99%, or 100% identical to a 16S rDNA sequence set forth in SEQ ID NOs: 608, 610, 611, 612, 620, 621, 622, 623, 624, 625, 626, 630, 631, 632, 633, 634, 635, 636, 637, 638, 639, 642, 644, 645, 646, 647, 648, 649, 650, 651, 652, 653, 654, 655, 656, 657, 658, 659, 660, 661, 668, 669, 670, 671, 672, 673, 674, 677, 678, 679, 680, 682, 683, 684, 685, 686, 687, 689, 692, 694, 695, 698, 701, 731, 734 and 764.

[0317] In some aspects, the subject is determined to not have a microbiome sample that comprises one or more bacteria having a 16S rDNA sequence that is at least 85%, at least 90%, at least 95%, at least 96%, at least 97%, at least 98%, at least 99%, or 100% identical to a 16S rDNA sequence set forth in SEQ ID NOs: 608, 609, 610, 611, 612, 620, 621, 624, 625, 626, 627, 628, 629, 630, 631, 632, 633, 634, 635, 636, 637, 638, 639, 642, 644, 645, 646, 647, 648, 649, 650, 651, 652, 653, 654, 655, 656, 657, 658, 659, 660, 661, 668, 669, 670, 671, 672, 673, 674, 677, 678, 679, 680, 682, 683, 684, 685, 686, 687, 689, 692, 694, 695, 698, 701, 731 and 764.

[0318] In some aspects, the subject is determined to not have a microbiome sample that comprises one or more bacteria having a 16S rDNA sequence that is at least 85%, at least 90%, at least 95%, at least 96%, at least 97%, at least 98%, at least 99%, or 100% identical to a 16S rDNA sequence set forth in SEQ ID NOs: 188, 213, 245, 323, 331, 332, 376, 455, 509, 516, 538, 582, 1156, 1157, 1158, 1159, 1160, 1161, 1162, 1163, 1164, 1165, 1166, 1167, 1168, 1169, 1170, 1171, 1172, 1173, 1174, 1175, 1176, 1177, 1178, 1179, 1180, 1181, 1182, 1183, 1184, 1185, 1186, 1187, 1188, 1189, 1190, 1191, 1192, 1193, 1194, 1195, 1196, 1197, 1198, 1199, 1200, 1201, 1202, 1203, 1204, 1205, 1206, 1207, 1208, 1209, 1210, 1211, 1212, 1213, 1214, 1215, 1216, 1217, 1218, o1321, 1322, 1323, 1324, 1325, 1326, 1327, 1328, 1329, 1330, 1331, 1332, 1333, 1334, 1335, 1336, 1337, 1338, 1339, 1340, 1341, 1342, 1343, 1344, 1345, 1346, 1347, 1348, and 1349. In some aspects, the cancer is a bladder cancer.

[0319] In some aspects, the subject is determined to not have a microbiome sample that comprises one or more bacteria having a 16S rDNA sequence that is at least 85%, at least 90%, at least 95%, at least 96%, at least 97%, at least 98%, at least 99%, or 100% identical to a 16S rDNA sequence set forth in SEQ ID NOs: 187, 189, 190, 191, 192, 193, 194, 195, 196, 197, 198, 199, 200, 201, 202, 203, 204, 205, 211, 214, 216, 217, 218, 219, 220, 221, 222, 224, 225, 226, 227, 228, 229, 230, 231, 232, 233, 234, 235, 236, 237, 238, 239, 240, 241, 242, 243, 244, 246, 247, 248, 253, 254, 255, 257, 258, 259, 263, 264, 265, 267, 268, 269, 270, 271, 272, 273, 277, 283, 286, 289, 290, 291, 292, 293, 294, 295, 296, 297, 298, 299, 300, 301, 302, 303, 304, 305, 306, 307, 308, 309, 310, 311, 312, 313, 314, 315, 316, 317, 318, 319, 320, 321, 322, 324, 325, 326, 327, 328, 329, 330, 333, 334, 335, 336, 337, 338, 339, 340, 341, 342, 343, 344, 345, 346, 347, 348, 349, 350, 351, 352, 353, 354, 355, 356, 357, 358, 359, 360, 361, 362, 363, 364, 365, 366, 367, 368, 369, 370, 371, 372, 373, 374, 375, 377, 378, 379, 380, 381, 382, 383, 384, 385, 386, 387, 389, 390, 391, 392, 393, 394, 395, 396, 397, 398, 399, 400, 401, 402, 403, 409, 410, 411, 412, 413, 414, 415, 418, 421, 424, 425, 428, 429, 430, 431, 432, 433, 434, 435, 436, 437, 438, 439, 440, 441, 442, 443, 444, 445, 447, 449, 450, 452, 453, 454, 456, 457, 458, 460, 462, 463, 464, 465, 466, 467, 468, 469, 471, 472, 473, 474, 475, 476, 478, 479, 480, 481, 483, 484, 486, 487, 488, 489, 490, 491, 492, 493, 494, 495, 496, 497, 498, 499, 500, 501, 502, 503, 504, 505, 506, 507, 508, 510, 511, 512, 513, 514, 515, 520, 521, 522, 523, 524, 525, 526, 527, 528, 529, 530, 531, 537, 539, 540, 542, 543, 544, 545, 546, 547, 548, 550, 551, 552, 553, 554, 555, 560, 561, 564, 565, 566, 573, 574, 577, 579, 581, 583, 584, 585, 586, 587, 588, 589, 591, 594, 595, 596, 597, 598, 599, 600, 774, 1113, 1114, 1115, 1116, 1117, 1118, 1119, 1120, 1121, 1122, 1123, 1124, 1125, 1126, 1127, 1130, 1131, 1132, 1133, 1134, 1135, 1356, 1357, 1358, 1359, 1360, 1361, 1362, 1395, 1396, 1397, 1398, 1399, 1400, 1401, 1402, 1616, 1617, 1618, 1619, 1620, 1662, 1663, 1664, 1665, 1666, 1667, 1668, 1669, 1670, 1671, 1672, 1673, 1674, 1675, 1676, 1677, 1678, 1679, 1680, 1681, 1682, 1683, 1684, 1685, 1686, 1687, 1688, 1689, 1690, 1691, 1692, 1693, 1694, 1695, 1755, and 1756. In some aspects, the cancer is a non-small cell lung cancer.

[0320] In some aspects, the subject is determined to not have a microbiome sample that comprises one or more bacteria having a 16S rDNA sequence that is at least 85%, at least 90%, at least 95%, at least 96%, at least 97%, at least 98%, at least 99%, or 100% identical to a 16S rDNA sequence set forth in SEQ ID NOs: 206, 207, 208, 209, 210, 212, 215, 223, 249, 250, 251, 252, 256, 260, 261, 262, 266, 274, 275, 276, 278, 279, 280, 281, 282, 284, 285, 287, 388, 404, 405, 406, 407, 408, 416, 417, 419, 420, 422, 423, 426, 427, 446, 448, 451, 459, 461, 482, 485, 517, 518, 519, 532, 533, 534, 535, 536, 549, 556, 557, 558, 559, 562, 563, 567, 568, 569, 570, 571, 572, 575, 576, 580, 590, 593, 1363, 1364, 1365, 1366, 1367, 1368, 1506, 1507, 1508, 1509, 1510, 1511, 1512, 1513, 1514, 1515, 1516, 1517, 1518, 1519, 1520, 1521, 1522, 1523, 1524, 1525, 1526, 1527, 1528, 1529, 1530, 1531, 1532, 1533, 1534, 1535, 1536, 1537, 1538, 1539, 1540, 1541, 1542, 1543, 1544, 1545, 1546, 1547, 1548, 1549, 1550, 1551, 1552, 1553, 1554, 1555, 1556, 1557, 1558, 1559, 1560, 1561, 1562, 1563, 1564, 1565, 1566, 1567, 1568, 1569, 1570, 1571, 1572, 1573, 1574, 1575, 1576, 1577, 1578, 1579, 1580, 1581, 1582, 1583, 1584, 1585, 1586, 1587, 1588, 1589, 1590, 1591, 1592, 1593, 1594, 1595, 1596, 1597, 1598, 1599, 1600, 1601, 1602, 1603, 1750, 1751, 1752, 1753, and 1754. In some aspects, the cancer is a metastatic melanoma.

[0321] In some aspects, the cancer is selected from a metastatic melanoma, a melanoma of the skin, a non-small cell lung cancer, a kidney cancer, a bladder cancer, a head and neck cancers, a Merkel cell skin cancer (Merkel cell carcinoma), or a Hodgkin lymphoma.

[0322] In some aspects, the cancer is a metastatic melanoma. In some aspects, the cancer is a non-small cell lung cancer. In some aspects, the cancer is a bladder cancer.

[0323] In some aspects, prior to administration of the population of bacteria the subject is subjected to antibiotic treatment and/or a bowel cleanse.

[0324] In some aspects, the subject has previously been treated for the cancer. In some aspects, the subject has been determined to be a non-responder to the previous treatment. In some aspects, the subject has been determined to have a toxic response to the previous treatment.

[0325] In some aspects, the previous treatment comprises immune checkpoint blockade monotherapy or immune checkpoint blockade combination therapy.

[0326] In some aspects, the cancer is recurrent cancer.

[0327] In some aspects, the provided methods further comprising administering at least one anticancer agent to the subject.

[0328] In some aspects, the anticancer agent is a checkpoint inhibitor.

[0329] In some aspects, the checkpoint inhibitor is selected from an anti-PD-1 antibody, an anti-CTLA-4 antibody, an anti-PD-L1 antibody or combinations thereof.

[0330] In some aspects, the checkpoint inhibitor is selected from pembrolizumab, nivolumab, atezolizumab, avelumab, durvalumab, ipilimumab, pidilizumab, AMP-224, AMP-514, STI-A1110, TSR-042, RG-7446, BMS-936559, BMS-936558, MK-3475, CT O11, MPDL3280A, MEDI-4736, MSB-0020718C, AUR-012, LAG-3, OX40 inhibitors, OX40L inhibitors, TIGIT inhibitors, STI-A1010 or combinations thereof.

[0331] In some aspects, the anticancer agent comprises a chemotherapy agent.

[0332] In some aspects, the anticancer agent is a combination of a checkpoint inhibitor and a chemotherapy agent.

### VIII. Models for Testing

[0333] Animal models suitable for testing the efficacy of a microbiome composition for use in immunotherapy are known in the art, for example, as described in Cooper et al. (2014, Cancer Immunol Res 2:643-654) and Gopalakrishnan et al (2018, Science 359(6371):97-103) using the BP cell line, and reviewed in Li et al. (2017, Pharmacol & Therapeutics, dx.doi.org/10.1016/j.pharmthera.2017.02.002). Other useful models include germ-free mouse models (e.g., Matson et al. Science 359:104-108 (2018), Routy et al Science 59(6371):91-97 (2018)).

### IX. Formulations

[0334] A microbiome therapeutic composition for use as described herein can be prepared and administered using methods known in the art. In general, compositions are formulated for oral, colonoscopic, or nasogastric delivery although any appropriate method can be used.

[0335] A formulation containing a therapeutic composition can contain one or more pharmaceutical excipients suitable for the preparation of such formulations. In some aspects, the formulation is a liquid formulation. In some aspects, a formulation comprising the therapeutic compositions can comprise one or more of surfactants, adjuvants, buffers, antioxidants, tonicity adjusters, thickeners or viscosity modifiers and the like.

[0336] In some aspects, treatment includes administering the therapeutic compositions in a formulation that includes a pharmaceutically acceptable carrier. In some aspects, the excipient includes a capsule or other format suitable for providing the therapeutic compositions as an oral dosage form. When an excipient serves as a diluent, it can be a solid, semi-solid, or liquid material, which acts as a vehicle, carrier or medium for the active ingredient. Thus, the formulations can be in the form of tablets, pills, powders, lozenges, sachets, cachets, elixirs, suspensions, emulsions, solutions, syrups, soft or hard capsules, suppositories, or packaged powders.

[0337] Some examples of suitable excipients include lactose, dextrose, sucrose, sorbitol, mannitol, starches, gum acacia, calcium phosphate, alginates, tragacanth, gelatin, calcium silicate, microcrystalline cellulose, polyvinylpyrrolidone, cellulose, water, syrup, polyethylene glycol, glycerol, and methyl cellulose. The compositions can be formulated so as to provide quick, sustained or delayed release of the active ingredient after administration to the patient by employing procedures known in the art.

[0338] In some aspects, the therapeutic composition can be incorporated into a food product. In some aspects the food product is a drink for oral administration. Non-limiting examples of a suitable drink include fruit juice, a fruit drink, an artificially flavored drink, an artificially sweetened drink, a carbonated beverage, a sports drink, a liquid diary product, a shake, an alcoholic beverage, a caffeinated beverage, infant formula and so forth. Other suitable means for oral administration include aqueous and nonaqueous solutions, emulsions, suspensions and solutions and/or suspensions reconstituted from non-effervescent granules, containing at least one of suitable solvents, preservatives, emulsifying agents, suspending agents, diluents, sweeteners, coloring agents, and flavoring agents.

[0339] In some aspects, the food product is a solid foodstuff. Suitable examples of a solid foodstuff include without limitation a food bar, a snack bar, a cookie, a brownie, a muffin, a cracker, an ice cream bar, a frozen yogurt bar, and the like.

[0340] In some aspects, the therapeutic compositions are incorporated into a therapeutic food. In some aspects, the therapeutic food is a ready-to-use food that optionally contains some or all essential macronutrients and micronutrients. In some aspects, the compositions disclosed herein are incorporated into a supplementary food that is designed to be blended into an existing meal. In some aspects, the supplemental food contains some or all essential macronutrients and micronutrients. In some aspects, the bacterial compositions disclosed herein are blended with or added to an existing food to fortify the food's protein nutrition. Examples include food staples (grain, salt, sugar, cooking oil, margarine), beverages (juice, coffee, tea, soda, beer, liquor, sports drinks), snacks, sweets and other foods.

[0341] The therapeutic compositions can be formulated in a unit dosage form. In general, a dosage comprises about 1×10² to 1×10⁹ viable colony forming units (CFU). The term “unit dosage forms” refers to physically discrete units suitable as unitary dosages for human subjects and/or other mammals, each unit containing a predetermined quantity of active material calculated to produce the desired therapeutic effect, in association with a suitable pharmaceutical excipient. A dosage may be administered in multiple delivery vehicles, e.g., multiple pills, capsules, foodstuffs or beverages.

[0342] The amount and frequency of administering the therapeutic compositions to a patient can vary depending upon the specific composition being administered, the purpose of the administration (such as prophylaxis or therapy), the state of the patient, the manner of administration, and the like. In therapeutic applications, compositions can be administered to a patient already suffering from a disease in an amount sufficient to cure or at least partially arrest or mitigate the symptoms of the disease and its complications. An effective dose can depend on the disease condition being treated as well as by the judgment of the attending clinician depending upon factors such as the severity of the disease, the age, weight and general condition of the patient, and the like.

[0343] In some aspects, at least one dose of the therapeutic composition is administered by the attending clinician or a person acting on behalf of the attending clinician. In some aspects, the subject may self-administer some or all of the subsequent doses. In other aspects, all doses of the therapeutic composition are administered by the attending clinician or a person acting on behalf of the attending clinician. In these aspects, prior to the administration of a first dose of the therapeutic composition the attending clinician or a person acting on behalf of the attending clinician may administer an antibiotic treatment and/or a bowel cleanse.

[0344] The dosage can refer, for example, to the total number of viable colony forming units (CFUs) of each individual species or strain; or can refer to the total number of microorganisms in the dose. It is understood in the art that determining the number of organisms in a dosage is not exact and can depend on the method used to determine the number of organisms present. If the composition includes spores, for example, the number of spores in a composition may be determined using a dipicolinic acid assay (Fichtel et al, 2007, FEMS Microbiol Ecol, 61:522-32). In some cases, the number of organisms is determined using a culture assay.

[0345] Effective doses can be extrapolated from dose-response curves derived from in vitro or animal model test systems.

[0346] In some aspects, the purified or isolated population of bacteria is administered at a concentration of at least about 1×10² viable colony forming units.

[0347] In some aspects, the purified or isolated population of bacteria is administered at a concentration of at a concentration of about 1×10² to 1×10⁹ viable colony forming units.

[0348] In some aspects, a fraction of the purified or isolated population of bacteria comprises a spore-forming bacteria. In some aspects, a fraction of the purified or isolated population of bacteria is in spore form. In some aspects, a fraction of the purified or isolated population of bacteria is in vegetative form.

[0349] In some aspects, the composition of the provided methods further comprises a pharmaceutically acceptable excipient. In some aspects, the composition of the provided methods is formulated for delivery to the intestine. In some aspects, the composition of the provided methods is enterically coated. In some aspects, the composition of the provided methods is formulated for oral administration. In some aspects, the composition of the provided methods is formulated into a food or beverage.

### X. Methods of Identifying a Candidate for Immune Checkpoint Therapy in Combination with Microbiome Therapy

[0350] This disclosure further relates to methods of identifying a mammalian subject as a candidate for immune checkpoint therapy in combination with microbiome therapy to treat a cancer, the method comprising:
[0351] a) obtaining a microbiome sample from the subject,
[0352] b) determining the prevalence and/or abundance of the family of bacteria in the microbiome sample, and
[0353] c) determining that the subject is a candidate for treatment if the microbiome sample comprises bacteria that have 16S rDNA sequence identity of at least 94.5% to 16S rDNA sequences of species belonging to one or more of the families Sutterellaceae, Coriobacteriaceae, Akkermansiaceae, or Desulfovibrionaceae.

[0354] In some aspects, the bacteria have 16S rDNA sequence identity of at least 95%, 97%, 98%, 98.7% or 99% to 16S rDNA sequences of species belonging to one or more of the families Sutterellaceae, Coriobacteriaceae, Akkermansiaceae, Desulfovibrionaceae, Odoribacteraceae, or Rikenellaceae.

[0355] This disclosure further relates to methods of identifying a mammalian subject as a candidate for immune checkpoint therapy in combination with microbiome therapy to treat a cancer, the method comprising:
[0356] a) obtaining a microbiome sample from the subject,
[0357] b) determining the prevalence and/or abundance of the family of bacteria in the microbiome sample, and
[0358] c) determining that the subject is a candidate for treatment if the microbiome sample comprises bacteria comprising one or more bacteria selected from Intestinimonas butyriciproducens and Anaerotruncus colihominis, or bacteria having 16S rDNA having at least 94.5%, 95%, 97%, 98%, 98.7% or 99% sequence identity to any one of the 16S rDNA thereof.

[0359] This disclosure further relates to methods of identifying a mammalian subject as a candidate for immune checkpoint therapy in combination with microbiome therapy to treat a cancer, the method comprising:
[0360] a) obtaining a microbiome sample from the subject,
[0361] b) determining the prevalence and/or abundance of the family of bacteria in the microbiome sample, and
[0362] c) determining that the subject is a candidate for treatment if the microbiome sample comprises bacteria comprising one or more bacteria selected from Murimonas intestini and Faecalicatena orotica, or bacteria having 16S rDNA having at least 94.5%, 95%, 97%, 98%, 98.7% or 99% sequence identity to any one of the 16S rDNA thereof.

[0363] This disclosure further relates to methods of identifying a mammalian subject as a candidate for immune checkpoint therapy in combination with microbiome therapy to treat a cancer, the method comprising:
[0364] a) obtaining a microbiome sample from the subject,
[0365] b) determining the prevalence and/or abundance of the family of bacteria in the microbiome sample, and
[0366] c) determining that the subject is a candidate for treatment if the microbiome sample comprises bacteria comprising one or more bacteria selected from Anaerotignum lactatifermentans, Anaerotruncus colihominis, Angelakisella sp1, Bacteroides cellulosilyticus, Bacteroides gallinarum, Bacteroides plebeius, Blautia coccoides group, Christensenella minuta, Christensenellaceae NG16_sp1, Clostridium hylemonae, Collinsella bouchesdurhonensis, Coprobacter secundus group, Eisenbergiella massiliensis, Emergencia timonensis, Faecalicatena orotica, Fusicatenibacter sp1, Intestinimonas butyriciproducens, Intestinimonas timonensis, Lachnospiraceae NG17_sp3, Lawsonibacter sp3, Oxalobacter formigenes, Peptoniphilaceae NG4_sp2, Prochlorotrichaceae NG20_sp1, or bacteria having 16S rDNA having at least 94.5%, 95%, 97%, 98%, 98.7% or 99% sequence identity to any one of the 16S rDNA thereof.

[0367] This disclosure further relates to methods of identifying a mammalian subject as a candidate for immune checkpoint therapy in combination with microbiome therapy to treat a cancer, the method comprising:
[0368] a) obtaining a microbiome sample from the subject,
[0369] b) determining the prevalence and/or abundance of the family of bacteria in the microbiome sample, and
[0370] c) determining that the subject is a candidate for treatment if the microbiome sample comprises bacteria comprising one or more bacteria selected from Akkermansia muciniphila, Dysosmobacter welbionis, Anaerobutyricum hallii, Blautia caecimuris, Holdemania filiformis, Acetatifactor sp1, Ruminococcaceae NG14 sp1, Hungatella sp2, Bifidobacterium catenulatum group, Blautia wexlerae, Hungatella sp1, Intestinibacter bartlettii, Lachnospiraceae NG31 sp1, Lactonifactor longoviformis, Leuconostoc gelidum, Sutterella wadsworthensis, [Extibacter] muris, Alistipes onderdonkii, Collinsella intestinalis, Collinsella stercoris, Muricomes sp1, Neobitarella massiliensis, Prevotellamassilia sp2, Ruminococcaceae NG33 sp1, [Adlercreutzia] equolifaciens group, [Anaerotruncus] rubiinfantis, [Romboutsia] timonensis, Alistipes finegoldii, Alistipes indistinctus, Alistipes obesi, Alistipes putredinis, Alistipes shahii, Anaerofustis stercorihominis, Anaeromassilibacillus sp3, Barnesiella intestinihominis, Bilophila wadsworthia, Blautia faecis, Coriobacteriaceae NG5 sp1, Frisingicoccus sp3, Gordonibacter pamelaeae, Harryflintia acetispora, Lachnospiraceae NG29 sp1, Marvinbryantia sp8, Massilimaliae massiliensis, Massilimaliae timonensis, Neglecta timonensis, Parabacteroides merdae, Peptoniphilaceae NG4 sp1, Peptoniphilaceae NG4 sp3, Pseudoflavonifractor capillosus, Ruminococcaceae NG12 sp1, Ruminococcaceae NG15 sp3, Ruminococcaceae NG17 sp3, Ruthenibacterium sp1, Anaerostipes hadrus, Christensenella timonensis, Desulfovibrio desulfuricans, Dialister invisus, Lachnoclostridium edouardi, Lachnospira pectinoschiza, Lachnospiraceae NG18_sp7, Lawsonibacter sp7, Merdimonas faecis, Negativibacillus sp1, Odoribacter splanchnicus, Roseburia faecis, Roseburia intestinalis, Ruminococcaceae NG11_sp5, Ruthenibacterium lactatiformans, or bacteria having 16S rDNA having at least 94.5%, 95%, 97%, 98%, 98.7% or 99% sequence identity to any one of the 16S rDNA thereof.

[0371] This disclosure further relates to methods of identifying a mammalian subject as a candidate for immune checkpoint therapy in combination with microbiome therapy to treat a cancer, the method comprising:
[0372] a) obtaining a microbiome sample from the subject,
[0373] b) determining the prevalence and/or abundance of the family of bacteria in the microbiome sample, and
[0374] c) determining that the subject is a candidate for treatment if the microbiome sample comprises bacteria comprising one or more bacteria selected from Akkermansia muciniphila, Acetatifactor sp1, Ruminococcaceae NG14 sp1, Hungatella sp2, Bifidobacterium catenulatum group, Blautia wexlerae, Hungatella sp1, Intestinibacter bartlettii, Lachnospiraceae NG31 sp1, Lactonifactor longoviformis, Leuconostoc gelidum, Sutterella wadsworthensis, [Extibacter] muris, Collinsella intestinalis, Collinsella stercoris, Muricomes sp1, Neobitarella massiliensis, Prevotellamassilia sp2, Ruminococcaceae NG33 sp1, [Adlercreutzia] equolifaciens group, [Anaerotruncus]rubiinfantis, Alistipes finegoldii, Alistipes indistinctus, Alistipes obesi, Alistipes putredinis, Alistipes shahii, Anaerofustis stercorihominis, Anaeromassilibacillus sp3, Barnesiella intestinihominis, Bilophila wadsworthia, Blautia faecis, Coriobacteriaceae NG5 sp1, Frisingicoccus sp3, Gordonibacter pamelaeae, Harryflintia acetispora, Lachnospiraceae NG29 sp1, Marvinbryantia sp8, Massilimaliae massiliensis, Massilimaliae timonensis, Neglecta timonensis, Parabacteroides merdae, Peptoniphilaceae NG4 sp1, Peptoniphilaceae NG4 sp3, Pseudoflavonifractor capillosus, Ruminococcaceae NG12 sp1, Ruminococcaceae NG15 sp3, Ruminococcaceae NG17 sp3, Ruthenibacterium sp1, or bacteria having 16S rDNA having at least 94.5%, 95%, 97%, 98%, 98.7% or 99% sequence identity to any one of the 16S rDNA thereof.

[0375] In some aspects, the bacteria comprises one or more bacteria selected from Akkermansia muciniphila, Dysosmobacter welbionis, Anaerobutyricum hallii, Blautia caecimuris, Holdemania filiformis, or bacteria having 16S rDNA having at least 94.5%, 95%, 97%, 98%, 98.7% or 99% sequence identity to any one of the 16S rDNA thereof. In some aspects, the bacteria comprises one or more bacteria selected from Akkermansia muciniphila or bacteria having 16S rDNA having at least 94.5%, 95%, 97%, 98%, 98.7% or 99% sequence identity to any one of the 16S rDNA thereof.

[0376] In some aspects, the bacteria comprises one or more bacteria selected from Acetatifactor sp1, Blautia wexlerae, Ruminococcaceae NG14 sp1, Hungatella sp2, Holdemania filiformis, or bacteria having 16S rDNA having at least 94.5%, 95%, 97%, 98%, 98.7% or 99% sequence identity to any one of the 16S rDNA thereof.

[0377] In some aspects, the bacteria comprises one or more bacteria selected from Bifidobacterium catenulatum group, Blautia wexlerae, Hungatella sp1, Intestinibacter bartlettii, Lachnospiraceae NG31 sp1, Lactonifactor longoviformis, Leuconostoc gelidum, Sutterella wadsworthensis, Anaerostipes hadrus, Dialister invisus, Merdimonas faecis, Roseburia faecis, Roseburia intestinalis, Ruminococcaceae NG11_sp5, or bacteria having 16S rDNA having at least 94.5%, 95%, 97%, 98%, 98.7% or 99% sequence identity to any one of the 16S rDNA thereof. In some aspects, the cancer is a bladder cancer.

[0378] In some aspects, the bacteria comprises one or more bacteria selected from [Extibacter] muris, Alistipes onderdonkii, Collinsella intestinalis, Collinsella stercoris, Muricomes sp1, Neobitarella massiliensis, Prevotellamassilia sp2, Ruminococcaceae NG33 sp1, Desulfovibrio desulfuricans, Roseburia intestinalis, or bacteria having 16S rDNA having at least 94.5%, 95%, 97%, 98%, 98.7% or 99% sequence identity to any one of the 16S rDNA thereof. In some aspects, the bacteria comprises one or more bacteria selected from [Extibacter] muris, Collinsella intestinalis, Collinsella stercoris, Muricomes sp1, Neobitarella massiliensis, Prevotellamassilia sp2, Ruminococcaceae NG33 sp1, or bacteria having 16S rDNA having at least 94.5%, 95%, 97%, 98%, 98.7% or 99% sequence identity to any one of the 16S rDNA thereof. In some aspects, the cancer is a non-small cell lung cancer.

[0379] In some aspects, the bacteria comprises one or more bacteria selected from [Adlercreutzia] equolifaciens group, [Anaerotruncus] rubiinfantis, [Romboutsia] timonensis, Alistipes finegoldii, Alistipes indistinctus, Alistipes obesi, Alistipes putredinis, Alistipes shahii, Anaerofustis stercorihominis, Anaeromassilibacillus sp3, Barnesiella intestinihominis, Bilophila wadsworthia, Blautia faecis, Coriobacteriaceae NG5 sp1, Frisingicoccus sp3, Gordonibacter pamelaeae, Harryflintia acetispora, Lachnospiraceae NG29 sp1, Marvinbryantia sp8, Massilimaliae massiliensis, Massilimaliae timonensis, Neglecta timonensis, Parabacteroides merdae, Peptoniphilaceae NG4 sp1, Peptoniphilaceae NG4 sp3, Pseudoflavonifractor capillosus, Ruminococcaceae NG12 sp1, Ruminococcaceae NG15 sp3, Ruminococcaceae NG17 sp3, Ruthenibacterium sp1, Lachnoclostridium edouardi, Lachnospira pectinoschiza, Lawsonibacter sp7, Odoribacter splanchnicus, Ruthenibacterium lactatiformans, or bacteria having 16S rDNA having at least 94.5%, 95%, 97%, 98%, 98.7% or 99% sequence identity to any one of the 16S rDNA thereof. In some aspects, the bacteria comprises one or more bacteria selected from [Adlercreutzia] equolifaciens group, [Anaerotruncus] rubiinfantis, Alistipes finegoldii, Alistipes indistinctus, Alistipes obesi, Alistipes putredinis, Alistipes shahii, Anaerofustis stercorihominis, Anaeromassilibacillus sp3, Barnesiella intestinihominis, Bilophila wadsworthia, Blautia faecis, Coriobacteriaceae NG5 sp1, Frisingicoccus sp3, Gordonibacter pamelaeae, Harryflintia acetispora, Lachnospiraceae NG29 sp1, Marvinbryantia sp8, Massilimaliae massiliensis, Massilimaliae timonensis, Neglecta timonensis, Parabacteroides merdae, Peptoniphilaceae NG4 sp1, Peptoniphilaceae NG4 sp3, Pseudoflavonifractor capillosus, Ruminococcaceae NG12 sp1, Ruminococcaceae NG15 sp3, Ruminococcaceae NG17 sp3, Ruthenibacterium sp1, or bacteria having 16S rDNA having at least 94.5%, 95%, 97%, 98%, 98.7% or 99% sequence identity to any one of the 16S rDNA thereof. In some aspects, the cancer is a metastatic melanoma.

[0380] This disclosure also relates to methods of identifying a mammalian subject as a candidate for immune checkpoint therapy in combination with microbiome therapy to treat a cancer, the method comprising:
[0381] a) obtaining a microbiome sample from the subject,
[0382] b) determining the prevalence and/or abundance of the family of bacteria in the microbiome sample, and
[0383] c) determining that the subject is a candidate for treatment if the microbiome sample comprises bacteria comprising one or more bacteria having a 16S rDNA sequence that is at least 85%, at least 90%, at least 95%, at least 96%, at least 97%, at least 98%, at least 99%, or 100% identical to a 16S rDNA sequence set forth in SEQ ID NOs: 1, 2, 3, 4, 5, 6, 7, 8, 9, 10, 11, 12, 13, 14, 15, 16, 17, 18, 19, 20, 21, 22, 23, 24, 25, 26, 27, 28, 29, 30, 31, 32, 33, 34, 35, 36, 37, 38, 39, 40, 41, 42, 43, 44, 45, 46, 47, 48, 49, 50, 51, 52, 53, 54, 55, 56, 57, 58, 59, 60, 61, 62, 63, 64, 65, 66, 67, 68, 69, 70, 71, 72, 73, 74, 75, 76, 77, 78, 79, 80, 81, 82, 83, 84, 85, 86, 87, 88, 89, 90, 91, 92, 93, 94, 95, 96, 97, 98, 99, 100, 101, 102, 103, 104, 105, 106, 107, 108, 109, 110, 111, 112, 113, 114, 115, 116, 117, 118, 119, 120, 121, 122, 123, 124, 125, 126, 127, 128, 129, 130, 131, 132, 133, 134, 135, 136, 137, 138, 139, 140, 141, 142, 143, 144, 145, 146, 147, 148, 149, 150, 151, 152, 153, 154, 155, 156, 157, 158, 159, 160, 161, 162, 163, 164, 165, 166, 167, 168, 169, 170, 171, 172, 173, 174, 175, 176, 177, 178, 179, 180, 181, 182, 183, 184, 185, 186, 601, 602, 603, 604, 605, 606, 607, 613, 614, 615, 616, 617, 618, 619, 622, 623, 640, 641, 643, 662, 663, 664, 665, 666, 667, 675, 676, 681, 688, 690, 691, 693, 696, 697, 699, 700, 702, 703, 704, 705, 706, 707, 708, 709, 710, 711, 712, 713, 714, 715, 716, 717, 718, 719, 720, 721, 722, 723, 724, 725, 726, 727, 728, 729, 730, 732, 733, 734, 735, 736, 737, 738, 739, 740, 741, 742, 743, 744, 746, 747, 748, 749, 750, 751, 752, 753, 754, 755, 756, 757, 758, 759, 760, 761, 762, 763, 765, 766, 767, 768, 769, 770, 771, 772, 773, 1018, 1019, 1020, 1021, 1022, 1023, 1024, 1025, 1026, 1027, 1028, 1029, 1030, 1031, 1032, 1033, 1034, 1035, 1036, 1037, 1038, 1039, 1040, 1041, 1042, 1043, 1044, 1045, 1046, 1047, 1048, 1049, 1050, 1051, 1052, 1053, 1054, 1055, 1056, 1057, 1283, 1284, 1285, 1293, 1294, 1295, 1296, 1297, 1298, 1299, 1405, 1406, 1407, 1408, 1409, 1410, 1411, 1412, 1413, 1414, 1415, 1416, 1419, 1420, 1421, 1422, 1423, 1424, 1425, 1426, 1608, 1609, 1610, 1611, 1612, 1613, 1614, 1615, 1010, 1622, 1623, 1624, 1625, 1626, 1627, 1628, 1629, 1630, 1631, 1632, 1633, 1634, 1635, 1636, 1637, 1638, 1639, 1640, 1641, 1642, 1643, 1644, 1645, 1646, 1647, 1648, 1696, 1697, 1698, 1699, 1700, 1701, 1702, 1703, 1704, 1705, 1706, 1707, 1708, 1709, 1710, 1711, 1712, 1713, 1714, 1715, 1716, 1717, 1718, 1719, 1720, 1721, 1722, 1723, 1724, 1725, 1726, 1727, 1728, 1729, 1730, 1731, 1732, 1733, 1734, 1735, 1736, 1737, 1738, 1739, 1740, 1741, 1742, 1743, 1744, 1745, 1746, 1747, 1748, and 1749.

[0384] In some aspects, the bacteria comprises one or more bacteria having a 16S rDNA sequence that is at least 85%, at least 90%, at least 95%, at least 96%, at least 97%, at least 98%, at least 99%, or 100% identical to a 16S rDNA sequence set forth in SEQ ID NOs: 605, 613, 640, 641, 643, 662, 663, 664, 665, 666, 667, 681, 688, 690, 703, 732, 733, 736, 737, 738, 739, 740, 741, 742, 743, 744, 749, 754, 755, 756, 758, 765, 766, 767 and 773.

[0385] In some aspects, the bacteria comprises one or more bacteria having a 16S rDNA sequence that is at least 85%, at least 90%, at least 95%, at least 96%, at least 97%, at least 98%, at least 99%, or 100% identical to a 16S rDNA sequence set forth in SEQ ID NOs: 601, 602, 603, 604, 606, 607, 613, 614, 615, 616, 617, 618, 619, 622, 623, 675, 676, 681, 691, 693, 696, 697, 699, 700, 702, 704, 705, 706, 707, 708, 709, 710, 711, 712, 713, 714, 715, 716, 717, 718, 719, 720, 721, 722, 723, 724, 725, 726, 727, 728, 729, 730, 734, 735, 736, 746, 747, 748, 749, 750, 751, 752, 753, 757, 759, 760, 761, 762, 763, 768, 769, 770, 771 and 772.

[0386] In some aspects, the bacteria comprises one or more bacteria having a 16S rDNA sequence that is at least 85%, at least 90%, at least 95%, at least 96%, at least 97%, at least 98%, at least 99%, or 100% identical to a 16S rDNA sequence set forth in SEQ ID NOs: 2, 3, 6, 10, 12, 13, 19, 20, 21, 22, 23, 24, 34, 37, 38, 39, 42, 43, 44, 45, 46, 47, 48, 50, 51, 52, 55, 57, 58, 59, 64, 65, 66, 67, 73, 74, 75, 80, 82, 83, 84, 85, 86, 87, 88, 89, 90, 91, 92, 93, 94, 95, 96, 97, 98, 99, 100, 101, 104, 105, 106, 107, 108, 109, 110, 111, 112, 114, 115, 116, 120, 123, 129, 135, 136, 138, 139, 140, 141, 142, 143, 145, 146, 148, 153, 156, 157, 158, 161, 168, 169, 170, 173, 176, 178, 180, 182, 1018, 1019, 1020, 1021, 1022, 1023, 1024, 1025, 1026, 1027, 1028, 1029, 1030, 1031, 1032, 1033, 1034, 1035, 1036, 1037, 1038, 1039, 1040, 1041, 1042, 1043, 1044, 1045, 1046, 1047, 1048, 1049, 1050, 1051, 1052, 1053, 1054, 1055, 1056, 1057, 1297, 1298, 1299, 1010, 1696, 1697, 1698, 1699, 1700, 1701, 1702, 1703, 1704, 1705, 1706, 1707, 1708, 1709, 1710, 1711, 1712, 1713, 1714, 1715, 1716, 1717, 1718, 1719, 1720, 1721, 1722, 1723, 1724, 1725, 1726, 1727, 1728, 1729, 1730, 1731, and 1732.

[0387] In some aspects, the bacteria comprises one or more bacteria having a 16S rDNA sequence that is at least 85%, at least 90%, at least 95%, at least 96%, at least 97%, at least 98%, at least 99%, or 100% identical to a 16S rDNA sequence set forth in SEQ ID NOs: 16, 17, 18, 53, 54, 60, 77, 79, 81, 103, 119, 125, 132, 133, 134, 164, 175, 179, 184, 1293, 1294, 1295, 1296, 1705, 1706, 1707, 1708, 1709, 1710, 1711, 1712, 1713, 1714, 1715, 1716, 1717, 1718, 1719, 1720, 1721, 1722, 1723, 1724, 1725, 1726, 1727, 1728, 1729, 1730, 1731, and 1732.

[0388] In some aspects, the bacteria comprises one or more bacteria having a 16S rDNA sequence that is at least 85%, at least 90%, at least 95%, at least 96%, at least 97%, at least 98%, at least 99%, or 100% identical to a 16S rDNA sequence set forth in SEQ ID NOs: 1, 4, 5, 7, 8, 9, 11, 14, 15, 25, 26, 27, 28, 29, 30, 31, 32, 33, 35, 36, 40, 41, 61, 62, 68, 69, 70, 71, 72, 76, 78, 117, 118, 121, 122, 124, 127, 128, 130, 131, 137, 144, 147, 149, 150, 151, 152, 154, 155, 159, 160, 162, 163, 165, 166, 167, 171, 174, 177, 181, 183, 186, 1405, 1406, 1407, 1408, 1409, 1410, 1411, 1412, 1413, 1414, 1415, 1416, 1608, 1609, 1610, 1611, 1612, 1613, 1614, 1615, 1622, 1623, 1624, 1625, 1626, 1627, 1628, 1629, 1630, 1631, 1632, 1633, 1634, 1635, 1636, 1637, 1638, 1639, 1640, 1641, 1642, 1643, 1644, 1645, 1646, 1647, 1648, 1733, 1734, 1735, 1736, 1737, 1738, 1739, 1740, 1741, 1742, 1743, 1744, 1745, 1746, 1747, 1748, and 1749.

[0389] In some aspects, determining that the subject is a candidate for treatment further comprises determining if the microbiome sample does not comprise one or more bacteria selected from Holdemania massiliensis, Rothia mucilaginosa, Hungatella sp2, Prevotella copri, Campylobacter concisus, [Atopobium] parvulum, Alistipes onderdonkii, Angelakisella massiliensis, Christensenellaceae NG5 sp2, Cuneatibacter caecimuris, Desulfovibrio fairfieldensis, Ruminococcaceae NG13 sp1, Ruminococcaceae NG16 sp1, [Coprococcus] catus, [Lactobacillus] fermentum, [Romboutsia] timonensis, [Ruminococcus] bromii, [Ruminococcus] gauvreauii, Actinomyces graevenitzii, Agathobaculum butyriciproducens group, Bacteroides caccae, Bacteroides intestinalis, Bittarella massiliensis, Blautia luti group, Clostridium saudiense, Corynebacterium durum, Fusicatenibacter sp2, Lachnospiraceae NG30 sp3, Massilimaliae sp1, Monoglobus pectinilyticus, Rothia dentocariosa, Rothia mucilaginosa, Ruminococcaceae NG17 sp1, Schaalia odontolytica, Streptococcus australis, Streptococcus gordonii, Streptococcus infantis group, Streptococcus parasanguinis, Streptococcus salivarius group, [Atopobium] parvulum, [Ruminococcus] gnavus, Bacteroides dorei group, Blautia sp1, Schaalia sp2, Actinomycetaceae_NG7 sp1, Allisonella histaminiformans, Bacteroides coprocola, Bacteroides faecis, Bacteroides massiliensis, Bifidobacterium animalis, Clostridium asparagiforme group, Desulfovibrionaceae NG5_sp1, Faecalibacterium prausnitzii, Gemmiger sp2, Granulicatella adiacens, Intestinimonas massiliensis, Lactobacillus delbrueckii, Lactobacillus paracasei, Lactobacillus reuteri, Lactococcus lactis, Marvinbryantia sp5, Prevotella buccalis, Propionibacterium freudenreichii, Ruminococcaceae NG18_sp7, Scardovia wiggsiae, Slackia isoflavoniconvertens, Thermodesulfobiaceae NG1_sp1, or bacteria having 16S rDNA having at least 94.5%, 95%, 97%, 98%, 98.7% or 99% sequence identity to any one of the 16S rDNA thereof.

[0390] In some aspects, determining that the subject is a candidate for treatment further comprises determining if the microbiome sample does not comprise one or more bacteria selected from Rothia mucilaginosa, Prevotella copri, Campylobacter concisus, [Atopobium]parvulum, Angelakisella massiliensis, Christensenellaceae NG5 sp2, Cuneatibacter caecimuris, Desulfovibrio fairfieldensis, Ruminococcaceae NG13 sp1, Ruminococcaceae NG16 sp1, [Coprococcus] catus, [Lactobacillus] fermentum, [Ruminococcus] bromii, [Ruminococcus] gauvreaui, Actinomyces graevenitzii, Agathobaculum butyriciproducens group, Bacteroides caccae, Bacteroides intestinalis, Bittarella massiliensis, Blautia luti group, Clostridium saudiense, Corynebacterium durum, Fusicatenibacter sp2, Lachnospiraceae NG30 sp3, Massilimaliae sp1, Monoglobus pectinilyticus, Rothia dentocariosa, Rothia mucilaginosa, Ruminococcaceae NG17 sp1, Schaalia odontolytica, Streptococcus australis, Streptococcus gordonii, Streptococcus infantis group, Streptococcus parasanguinis, Streptococcus salivarius group, [Atopobium] parvulum, [Ruminococcus] gnavus, Bacteroides dorei group, Blautia sp1, Schaalia sp2, or bacteria having 16S rDNA having at least 94.5%, 95%, 97%, 98%, 98.7% or 99% sequence identity to any one of the 16S rDNA thereof.

[0391] In some aspects, determining that the subject is a candidate for treatment further comprises determining if the microbiome sample does not comprise one or more bacteria selected from Holdemania massiliensis, Rothia mucilaginosa, Hungatella sp2, Prevotella copri, Campylobacter concisus, or bacteria having 16S rDNA having at least 94.5%, 95%, 97%, 98%, 98.7% or 99% sequence identity to any one of the 16S rDNA thereof. In some aspects, determining that the subject is a candidate for treatment further comprises determining if the microbiome sample does not comprise one or more bacteria selected from Rothia mucilaginosa, Prevotella copri, Campylobacter concisus, or bacteria having 16S rDNA having at least 94.5%, 95%, 97%, 98%, 98.7% or 99% sequence identity to any one of the 16S rDNA thereof.

[0392] In some aspects, determining that the subject is a candidate for treatment further comprises determining if the microbiome sample does not comprise one or more bacteria selected from Rothia mucilaginosa, [Atopobium] parvulum, Holdemania massiliensis, Prevotella copri, Campylobacter concisus, or bacteria having 16S rDNA having at least 94.5%, 95%, 97%, 98%, 98.7% or 99% sequence identity to any one of the 16S rDNA thereof. In some aspects, determining that the subject is a candidate for treatment further comprises determining if the microbiome sample does not comprise one or more bacteria selected from Rothia mucilaginosa, [Atopobium] parvulum, Prevotella copri, Campylobacter concisus, or bacteria having 16S rDNA having at least 94.5%, 95%, 97%, 98%, 98.7% or 99% sequence identity to any one of the 16S rDNA thereof.

[0393] In some aspects, determining that the subject is a candidate for treatment further comprises determining if the microbiome sample does not comprise one or more bacteria selected from Alistipes onderdonkii, Angelakisella massiliensis, Christensenellaceae NG5 sp2, Cuneatibacter caecimuris, Desulfovibrio fairfieldensis, Ruminococcaceae NG13 sp1, Ruminococcaceae NG16 sp1, Bifidobacterium animalis, Faecalibacterium prausnitzii, or bacteria having 16S rDNA having at least 94.5%, 95%, 97%, 98%, 98.7% or 99% sequence identity to any one of the 16S rDNA thereof. In some aspects, determining that the subject is a candidate for treatment further comprises determining if the microbiome sample does not comprise one or more bacteria selected from Angelakisella massiliensis, Christensenellaceae NG5 sp2, Cuneatibacter caecimuris, Desulfovibrio fairfieldensis, Ruminococcaceae NG13 sp1, Ruminococcaceae NG16 sp1, or bacteria having 16S rDNA having at least 94.5%, 95%, 97%, 98%, 98.7% or 99% sequence identity to any one of the 16S rDNA thereof. In some aspects, the cancer is a bladder cancer.

[0394] In some aspects, determining that the subject is a candidate for treatment further comprises determining if the microbiome sample does not comprise one or more bacteria selected from [Coprococcus] catus, [Lactobacillus] fermentum, [Romboutsia] timonensis, [Ruminococcus] bromii, [Ruminococcus] gauvreauii, Actinomyces graevenitzii, Agathobaculum butyriciproducens group, Bacteroides caccae, Bacteroides intestinalis, Bittarella massiliensis, Blautia luti group, Clostridium saudiense, Corynebacterium durum, Fusicatenibacter sp2, Lachnospiraceae NG30 sp3, Massilimaliae sp1, Monoglobus pectinilyticus, Rothia dentocariosa, Rothia mucilaginosa, Ruminococcaceae NG17 sp1, Schaalia odontolytica, Streptococcus australis, Streptococcus gordonii, Streptococcus infantis group, Streptococcus parasanguinis, Streptococcus salivarius group, Allisonella histaminiformans, Bacteroides faecis, Bacteroides massiliensis, Desulfovibrionaceae NG5_sp1, Gemmiger sp2, Intestinimonas massiliensis, Marvinbryantia sp5, Propionibacterium freudenreichii, Slackia isoflavoniconvertens, Thermodesulfobiaceae NG1_sp1, or bacteria having 16S rDNA having at least 94.5%, 95%, 97%, 98%, 98.7% or 99% sequence identity to any one of the 16S rDNA thereof. In some aspects, determining that the subject is a candidate for treatment further comprises determining if the microbiome sample does not comprise one or more bacteria selected from [Coprococcus] catus, [Lactobacillus] fermentum, [Ruminococcus] bromii, [Ruminococcus] gauvreauii, Actinomyces graevenitzii, Agathobaculum butyriciproducens group, Bacteroides caccae, Bacteroides intestinalis, Bittarella massiliensis, Blautia luti group, Clostridium saudiense, Corynebacterium durum, Fusicatenibacter sp2, Lachnospiraceae NG30 sp3, Massilimaliae sp1, Monoglobus pectinilyticus, Rothia dentocariosa, Rothia mucilaginosa, Ruminococcaceae NG17 sp1, Schaalia odontolytica, Streptococcus australis, Streptococcus gordonii, Streptococcus infantis group, Streptococcus parasanguinis, Streptococcus salivarius group, or bacteria having 16S rDNA having at least 94.5%, 95%, 97%, 98%, 98.7% or 99% sequence identity to any one of the 16S rDNA thereof. In some aspects, the cancer is a non-small cell lung cancer.

[0395] In some aspects, determining that the subject is a candidate for treatment further comprises determining if the microbiome sample does not comprise one or more bacteria selected from [Atopobium] parvulum, [Ruminococcus] gnavus, Bacteroides dorei group, Blautia sp1, Schaalia sp2, Granulicatella adiacens, Lactococcus lactis, Scardovia wiggsiae, or bacteria having 16S rDNA having at least 94.5%, 95%, 97%, 98%, 98.7% or 99% sequence identity to any one of the 16S rDNA thereof. In some aspects, the cancer is a metastatic melanoma.

[0396] In some aspects, determining that the subject is a candidate for treatment further comprises determining if the microbiome sample does not comprise one or more bacteria having a 16S rDNA sequence that is at least 85%, at least 90%, at least 95%, at least 96%, at least 97%, at least 98%, at least 99%, or 100% identical to a 16S rDNA sequence set forth in SEQ ID NOs: 187, 188, 189, 190, 191, 192, 193, 194, 195, 196, 197, 198, 199, 200, 201, 202, 203, 204, 205, 206, 207, 208, 209, 210, 211, 212, 213, 214, 215, 216, 217, 218, 219, 220, 221, 222, 223, 224, 225, 226, 227, 228, 229, 230, 231, 232, 233, 234, 235, 236, 237, 238, 239, 240, 241, 242, 243, 244, 245, 246, 247, 248, 249, 250, 251, 252, 253, 254, 255, 256, 257, 258, 259, 260, 261, 262, 263, 264, 265, 266, 267, 268, 269, 270, 271, 272, 273, 274, 275, 276, 277, 278, 279, 280, 281, 282, 283, 284, 285, 286, 287, 288, 289, 290, 291, 292, 293, 294, 295, 296, 297, 298, 299, 300, 301, 302, 303, 304, 305, 306, 307, 308, 309, 310, 311, 312, 313, 314, 315, 316, 317, 318, 319, 320, 321, 322, 323, 324, 325, 326, 327, 328, 329, 330, 331, 332, 333, 334, 335, 336, 337, 338, 339, 340, 341, 342, 343, 344, 345, 346, 347, 348, 349, 350, 351, 352, 353, 354, 355, 356, 357, 358, 359, 360, 361, 362, 363, 364, 365, 366, 367, 368, 369, 370, 371, 372, 373, 374, 375, 376, 377, 378, 379, 380, 381, 382, 383, 384, 385, 386, 387, 388, 389, 390, 391, 392, 393, 394, 395, 396, 397, 398, 399, 400, 401, 402, 403, 404, 405, 406, 407, 408, 409, 410, 411, 412, 413, 414, 415, 416, 417, 418, 419, 420, 421, 422, 423, 424, 425, 426, 427, 428, 429, 430, 431, 432, 433, 434, 435, 436, 437, 438, 439, 440, 441, 442, 443, 444, 445, 446, 447, 448, 449, 450, 451, 452, 453, 454, 455, 456, 457, 458, 459, 460, 461, 462, 463, 464, 465, 466, 467, 468, 469, 470, 471, 472, 473, 474, 475, 476, 477, 478, 479, 480, 481, 482, 483, 484, 485, 486, 487, 488, 489, 490, 491, 492, 493, 494, 495, 496, 497, 498, 499, 500, 501, 502, 503, 504, 505, 506, 507, 508, 509, 510, 511, 512, 513, 514, 515, 516, 517, 518, 519, 520, 521, 522, 523, 524, 525, 526, 527, 528, 529, 530, 531, 532, 533, 534, 535, 536, 537, 538, 539, 540, 541, 542, 543, 544, 545, 546, 547, 548, 549, 550, 551, 552, 553, 554, 555, 556, 557, 558, 559, 560, 561, 562, 563, 564, 565, 566, 567, 568, 569, 570, 571, 572, 573, 574, 575, 576, 577, 578, 579, 580, 581, 582, 583, 584, 585, 586, 587, 588, 589, 590, 591, 592, 593, 594, 595, 596, 597, 598, 599, 600, 608, 609, 610, 611, 612, 620, 621, 622, 623, 624, 625, 626, 627, 628, 629, 630, 631, 632, 633, 634, 635, 636, 637, 638, 639, 642, 644, 645, 646, 647, 648, 649, 650, 651, 652, 653, 654, 655, 656, 657, 658, 659, 660, 661, 668, 669, 670, 671, 672, 673, 674, 677, 678, 679, 680, 682, 683, 684, 685, 686, 687, 689, 692, 694, 695, 698, 701, 731, 734, 764, 1011, 1012, 1013, 1014, 1015, 1016, 1017, 774, 1107, 1108, 1109, 1110, 1111, 1112, 1113, 1114, 1115, 1116, 1117, 1118, 1119, 1120, 1121, 1122, 1123, 1124, 1125, 1126, 1127, 1130, 1131, 1132, 1133, 1134, 1135, 1156, 1157, 1158, 1159, 1160, 1161, 1162, 1163, 1164, 1165, 1166, 1167, 1168, 1169, 1170, 1171, 1172, 1173, 1174, 1175, 1176, 1177, 1178, 1179, 1180, 1181, 1182, 1183, 1184, 1185, 1186, 1187, 1188, 1189, 1190, 1191, 1192, 1193, 1194, 1195, 1196, 1197, 1198, 1199, 1200, 1201, 1202, 1203, 1204, 1205, 1206, 1207, 1208, 1209, 1210, 1211, 1212, 1213, 1214, 1215, 1216, 1217, 1218, 775, 776, 777, 778, 779, 780, 781, 782, 783, 784, 785, 786, 787, 788, 789, 1321, 1322, 1323, 1324, 1325, 1326, 1327, 1328, 1329, 1330, 1331, 1332, 1333, 1334, 1335, 1336, 1337, 1338, 1339, 1340, 1341, 1342, 1343, 1344, 1345, 1346, 1347, 1348, 1349, 1356, 1357, 1358, 1359, 1360, 1361, 1362, 1363, 1364, 1365, 1366, 1367, 1368, 1395, 1396, 1397, 1398, 1399, 1400, 1401, 1402, 1427, 1428, 1429, 1430, 1431, 1432, 1433, 1434, 1435, 1436, 1437, 1438, 1439, 1440, 1441, 1442, 1443, 1444, 1445, 1446, 1447, 1448, 1449, 1450, 1451, 1452, 1453, 1454, 1455, 1456, 1457, 1458, 1459, 1460, 1461, 1462, 1463, 1464, 1465, 1466, 1467, 1468, 1469, 1470, 1471, 1472, 1473, 1474, 1475, 1476, 1477, 1478, 1479, 1480, 1481, 1482, 1483, 1484, 1485, 1486, 1487, 1488, 1489, 1490, 1491, 1492, 1493, 1494, 1495, 1496, 1497, 1498, 1499, 1500, 1501, 1502, 1503, 1504, 1505, 931, 932, 933, 934, 935, 936, 937, 938, 939, 940, 941, 942, 943, 944, 945, 946, 947, 948, 949, 950, 951, 952, 953, 954, 955, 956, 957, 958, 959, 960, 961, 962, 963, 964, 965, 966, 967, 968, 969, 970, 971, 972, 973, 974, 975, 976, 977, 978, 979, 980, 981, 982, 983, 984, 985, 986, 987, 988, 989, 990, 991, 992, 993, 994, 995, 996, 997, 998, 999, 1000, 1001, 1002, 1003, 1004, 1005, 1006, 1007, 1008, 1009, 1506, 1507, 1508, 1509, 1510, 1511, 1512, 1513, 1514, 1515, 1516, 1517, 1518, 1519, 1520, 1521, 1522, 1523, 1524, 1525, 1526, 1527, 1528, 1529, 1530, 1531, 1532, 1533, 1534, 1535, 1536, 1537, 1538, 1539, 1540, 1541, 1542, 1543, 1544, 1545, 1546, 1547, 1548, 1549, 1550, 1551, 1552, 1553, 1554, 1555, 1556, 1557, 1558, 1559, 1560, 1561, 1562, 1563, 1564, 1565, 1566, 1567, 1568, 1569, 1570, 1571, 1572, 1573, 1574, 1575, 1576, 1577, 1578, 1579, 1580, 1581, 1582, 1583, 1584, 1585, 1586, 1587, 1588, 1589, 1590, 1591, 1592, 1593, 1594, 1595, 1596, 1597, 1598, 1599, 1600, 1601, 1602, 1603, 1616, 1617, 1618, 1619, 1620, 1654, 1655, 1656, 1657, 1658, 1659, 1660, 1662, 1663, 1664, 1665, 1666, 1667, 1668, 1669, 1670, 1671, 1672, 1673, 1674, 1675, 1676, 1677, 1678, 1679, 1680, 1681, 1682, 1683, 1684, 1685, 1686, 1687, 1688, 1689, 1690, 1691, 1692, 1693, 1694, 1695, 1750, 1751, 1752, 1753, 1754, 1755, and 1756.

[0397] In some aspects, determining that the subject is a candidate for treatment further comprises determining if the microbiome sample does not comprise one or more bacteria having a 16S rDNA sequence that is at least 85%, at least 90%, at least 95%, at least 96%, at least 97%, at least 98%, at least 99%, or 100% identical to a 16S rDNA sequence set forth in SEQ ID NOs: 608, 610, 611, 612, 620, 621, 622, 623, 624, 625, 626, 630, 631, 632, 633, 634, 635, 636, 637, 638, 639, 642, 644, 645, 646, 647, 648, 649, 650, 651, 652, 653, 654, 655, 656, 657, 658, 659, 660, 661, 668, 669, 670, 671, 672, 673, 674, 677, 678, 679, 680, 682, 683, 684, 685, 686, 687, 689, 692, 694, 695, 698, 701, 731, 734 and 764.

[0398] In some aspects, determining that the subject is a candidate for treatment further comprises determining if the microbiome sample does not comprise one or more bacteria having a 16S rDNA sequence that is at least 85%, at least 90%, at least 95%, at least 96%, at least 97%, at least 98%, at least 99%, or 100% identical to a 16S rDNA sequence set forth in SEQ ID NOs: 608, 609, 610, 611, 612, 620, 621, 624, 625, 626, 627, 628, 629, 630, 631, 632, 633, 634, 635, 636, 637, 638, 639, 642, 644, 645, 646, 647, 648, 649, 650, 651, 652, 653, 654, 655, 656, 657, 658, 659, 660, 661, 668, 669, 670, 671, 672, 673, 674, 677, 678, 679, 680, 682, 683, 684, 685, 686, 687, 689, 692, 694, 695, 698, 701, 731 and 764.

[0399] In some aspects, determining that the subject is a candidate for treatment further comprises determining if the microbiome sample does not comprise one or more bacteria having a 16S rDNA sequence that is at least 85%, at least 90%, at least 95%, at least 96%, at least 97%, at least 98%, at least 99%, or 100% identical to a 16S rDNA sequence set forth in SEQ ID NOs: 188, 213, 245, 323, 331, 332, 376, 455, 509, 516, 538, 582, 1156, 1157, 1158, 1159, 1160, 1161, 1162, 1163, 1164, 1165, 1166, 1167, 1168, 1169, 1170, 1171, 1172, 1173, 1174, 1175, 1176, 1177, 1178, 1179, 1180, 1181, 1182, 1183, 1184, 1185, 1186, 1187, 1188, 1189, 1190, 1191, 1192, 1193, 1194, 1195, 1196, 1197, 1198, 1199, 1200, 1201, 1202, 1203, 1204, 1205, 1206, 1207, 1208, 1209, 1210, 1211, 1212, 1213, 1214, 1215, 1216, 1217, 1218, o1321, 1322, 1323, 1324, 1325, 1326, 1327, 1328, 1329, 1330, 1331, 1332, 1333, 1334, 1335, 1336, 1337, 1338, 1339, 1340, 1341, 1342, 1343, 1344, 1345, 1346, 1347, 1348, and 1349. In some aspects, the cancer is a bladder cancer.

[0400] In some aspects, determining that the subject is a candidate for treatment further comprises determining if the microbiome sample does not comprise one or more bacteria having a 16S rDNA sequence that is at least 85%, at least 90%, at least 95%, at least 96%, at least 97%, at least 98%, at least 99%, or 100% identical to a 16S rDNA sequence set forth in SEQ ID NOs: 187, 189, 190, 191, 192, 193, 194, 195, 196, 197, 198, 199, 200, 201, 202, 203, 204, 205, 211, 214, 216, 217, 218, 219, 220, 221, 222, 224, 225, 226, 227, 228, 229, 230, 231, 232, 233, 234, 235, 236, 237, 238, 239, 240, 241, 242, 243, 244, 246, 247, 248, 253, 254, 255, 257, 258, 259, 263, 264, 265, 267, 268, 269, 270, 271, 272, 273, 277, 283, 286, 289, 290, 291, 292, 293, 294, 295, 296, 297, 298, 299, 300, 301, 302, 303, 304, 305, 306, 307, 308, 309, 310, 311, 312, 313, 314, 315, 316, 317, 318, 319, 320, 321, 322, 324, 325, 326, 327, 328, 329, 330, 333, 334, 335, 336, 337, 338, 339, 340, 341, 342, 343, 344, 345, 346, 347, 348, 349, 350, 351, 352, 353, 354, 355, 356, 357, 358, 359, 360, 361, 362, 363, 364, 365, 366, 367, 368, 369, 370, 371, 372, 373, 374, 375, 377, 378, 379, 380, 381, 382, 383, 384, 385, 386, 387, 389, 390, 391, 392, 393, 394, 395, 396, 397, 398, 399, 400, 401, 402, 403, 409, 410, 411, 412, 413, 414, 415, 418, 421, 424, 425, 428, 429, 430, 431, 432, 433, 434, 435, 436, 437, 438, 439, 440, 441, 442, 443, 444, 445, 447, 449, 450, 452, 453, 454, 456, 457, 458, 460, 462, 463, 464, 465, 466, 467, 468, 469, 471, 472, 473, 474, 475, 476, 478, 479, 480, 481, 483, 484, 486, 487, 488, 489, 490, 491, 492, 493, 494, 495, 496, 497, 498, 499, 500, 501, 502, 503, 504, 505, 506, 507, 508, 510, 511, 512, 513, 514, 515, 520, 521, 522, 523, 524, 525, 526, 527, 528, 529, 530, 531, 537, 539, 540, 542, 543, 544, 545, 546, 547, 548, 550, 551, 552, 553, 554, 555, 560, 561, 564, 565, 566, 573, 574, 577, 579, 581, 583, 584, 585, 586, 587, 588, 589, 591, 594, 595, 596, 597, 598, 599, 600, 774, 1113, 1114, 1115, 1116, 1117, 1118, 1119, 1120, 1121, 1122, 1123, 1124, 1125, 1126, 1127, 1130, 1131, 1132, 1133, 1134, 1135, 1356, 1357, 1358, 1359, 1360, 1361, 1362, 1395, 1396, 1397, 1398, 1399, 1400, 1401, 1402, 1616, 1617, 1618, 1619, 1620, 1662, 1663, 1664, 1665, 1666, 1667, 1668, 1669, 1670, 1671, 1672, 1673, 1674, 1675, 1676, 1677, 1678, 1679, 1680, 1681, 1682, 1683, 1684, 1685, 1686, 1687, 1688, 1689, 1690, 1691, 1692, 1693, 1694, 1695, 1755, and 1756. In some aspects, the cancer is a non-small cell lung cancer.

[0401] In some aspects, determining that the subject is a candidate for treatment further comprises determining if the microbiome sample does not comprise one or more bacteria having a 16S rDNA sequence that is at least 85%, at least 90%, at least 95%, at least 96%, at least 97%, at least 98%, at least 99%, or 100% identical to a 16S rDNA sequence set forth in SEQ ID NOs: 206, 207, 208, 209, 210, 212, 215, 223, 249, 250, 251, 252, 256, 260, 261, 262, 266, 274, 275, 276, 278, 279, 280, 281, 282, 284, 285, 287, 388, 404, 405, 406, 407, 408, 416, 417, 419, 420, 422, 423, 426, 427, 446, 448, 451, 459, 461, 482, 485, 517, 518, 519, 532, 533, 534, 535, 536, 549, 556, 557, 558, 559, 562, 563, 567, 568, 569, 570, 571, 572, 575, 576, 580, 590, 593, 1363, 1364, 1365, 1366, 1367, 1368, 1506, 1507, 1508, 1509, 1510, 1511, 1512, 1513, 1514, 1515, 1516, 1517, 1518, 1519, 1520, 1521, 1522, 1523, 1524, 1525, 1526, 1527, 1528, 1529, 1530, 1531, 1532, 1533, 1534, 1535, 1536, 1537, 1538, 1539, 1540, 1541, 1542, 1543, 1544, 1545, 1546, 1547, 1548, 1549, 1550, 1551, 1552, 1553, 1554, 1555, 1556, 1557, 1558, 1559, 1560, 1561, 1562, 1563, 1564, 1565, 1566, 1567, 1568, 1569, 1570, 1571, 1572, 1573, 1574, 1575, 1576, 1577, 1578, 1579, 1580, 1581, 1582, 1583, 1584, 1585, 1586, 1587, 1588, 1589, 1590, 1591, 1592, 1593, 1594, 1595, 1596, 1597, 1598, 1599, 1600, 1601, 1602, 1603, 1750, 1751, 1752, 1753, and 1754. In some aspects, the cancer is a metastatic melanoma.

[0402] In some aspects, the subject is determined to be a candidate for immune checkpoint inhibitor therapy.

[0403] In some aspects, the immune checkpoint therapy comprises immune checkpoint blockade monotherapy or immune checkpoint blockade combination therapy.

[0404] In some aspects, the treatment further comprises chemotherapy.

[0405] In some aspects, the mammalian subject is a human.

[0406] In some aspects, the cancer is selected from a metastatic melanoma, a melanoma of the skin, a non-small cell lung cancer, a kidney cancer, a bladder cancer, a head and neck cancers, a Merkel cell skin cancer (Merkel cell carcinoma), or a Hodgkin lymphoma.

[0407] In some aspects, the cancer is a metastatic melanoma. In some aspects, the cancer is a non-small cell lung cancer. In some aspects, the cancer is a bladder cancer.

### XI. Methods of Identifying FMT Donors

[0408] This disclosure also relates to methods of identifying a mammalian subject as a donor whose feces are useful for fecal matter transfer, the method comprising:
[0409] a) obtaining a microbiome sample from the potential donor,
[0410] b) determining the prevalence and/or abundance of the species of bacteria in the microbiome sample, and
[0411] c) determining that the donor's feces is useful for fecal matter transfer if the microbiome sample comprises bacteria that have 16S rDNA sequence identity of at least 94.5% to 16S rDNA sequences of species belonging to one or more of the families Sutterellaceae, Coriobacteriaceae, Akkermansiaceae, or Desulfovibrionaceae.

[0412] In some aspects, the bacteria have 16S rDNA sequence identity of at least 95%, 97%, 98%, 98.7% or 99% to 16S rDNA sequences of species belonging to one or more of the families Sutterellaceae, Coriobacteriaceae, Akkermansiaceae, Desulfovibrionaceae, Odoribacteraceae, or Rikenellaceae.

[0413] This disclosure also relates to methods of identifying a mammalian subject as a donor whose feces are useful for fecal matter transfer, the method comprising:
[0414] a) obtaining a microbiome sample from the potential donor,
[0415] b) determining the prevalence and/or abundance of the species of bacteria in the microbiome sample, and
[0416] c) determining that the donor's feces is useful for fecal matter transfer if the microbiome sample comprises bacteria comprising one or more bacteria selected from Intestinimonas butyriciproducens and Anaerotruncus colihominis or bacteria having 16S rDNA having at least 94.5%, 95%, 97%, 98%, 98.7% or 99% sequence identity to any one of the 16S rDNA thereof.

[0417] This disclosure also relates to methods of identifying a mammalian subject as a donor whose feces are useful for fecal matter transfer, the method comprising:
[0418] a) obtaining a microbiome sample from the potential donor,
[0419] b) determining the prevalence and/or abundance of the species of bacteria in the microbiome sample, and
[0420] c) determining that the donor's feces is useful for fecal matter transfer if the microbiome sample comprises bacteria comprising one or more bacteria selected from Murimonas intestini and Faecalicatena orotica, or bacteria having 16S rDNA having at least 94.5%, 95%, 97%, 98%, 98.7% or 99% sequence identity to any one of the 16S rDNA thereof.

[0421] This disclosure also relates to methods of identifying a mammalian subject as a donor whose feces are useful for fecal matter transfer, the method comprising:
[0422] a) obtaining a microbiome sample from the potential donor,
[0423] b) determining the prevalence and/or abundance of the species of bacteria in the microbiome sample, and
[0424] c) determining that the donor's feces is useful for fecal matter transfer if the microbiome sample comprises bacteria comprising one or more bacteria selected from Anaerotignum lactatifermentans, Anaerotruncus colihominis, Angelakisella sp1, Bacteroides cellulosilyticus, Bacteroides gallinarum, Bacteroides plebeius, Blautia coccoides group, Christensenella minuta, Christensenellaceae NG16_sp1, Clostridium hylemonae, Collinsella bouchesdurhonensis, Coprobacter secundus group, Eisenbergiella massiliensis, Emergencia timonensis, Faecalicatena orotica, Fusicatenibacter sp1, Intestinimonas butyriciproducens, Intestinimonas timonensis, Lachnospiraceae NG17_sp3, Lawsonibacter sp3, Oxalobacter formigenes, Peptoniphilaceae NG4_sp2, Prochlorotrichaceae NG20_sp1, or bacteria having 16S rDNA having at least 94.5%, 95%, 97%, 98%, 98.7% or 99% sequence identity to any one of the 16S rDNA thereof.

[0425] This disclosure also relates to methods of identifying a mammalian subject as a donor whose feces are useful for fecal matter transfer, the method comprising:
[0426] a) obtaining a microbiome sample from the potential donor,
[0427] b) determining the prevalence and/or abundance of the species of bacteria in the microbiome sample, and
[0428] c) determining that the donor's feces is useful for fecal matter transfer if the microbiome sample comprises bacteria comprising one or more bacteria selected from Akkermansia muciniphila, Dysosmobacter welbionis, Anaerobutyricum hallii, Blautia caecimuris, Holdemania filiformis, Acetatifactor sp1, Ruminococcaceae NG14 sp1, Hungatella sp2, Bifidobacterium catenulatum group, Blautia wexlerae, Hungatella sp1, Intestinibacter bartlettii, Lachnospiraceae NG31 sp1, Lactonifactor longoviformis, Leuconostoc gelidum, Sutterella wadsworthensis, [Extibacter] muris, Alistipes onderdonkii, Collinsella intestinalis, Collinsella stercoris, Muricomes sp1, Neobitarella massiliensis, Prevotellamassilia sp2, Ruminococcaceae NG33 sp1, [Adlercreutzia] equolifaciens group, [Anaerotruncus] rubiinfantis, [Romboutsia] timonensis, Alistipes finegoldii, Alistipes indistinctus, Alistipes obesi, Alistipes putredinis, Alistipes shahii, Anaerofustis stercorihominis, Anaeromassilibacillus sp3, Barnesiella intestinihominis, Bilophila wadsworthia, Blautia faecis, Coriobacteriaceae NG5 sp1, Frisingicoccus sp3, Gordonibacter pamelaeae, Harryflintia acetispora, Lachnospiraceae NG29 sp1, Marvinbryantia sp8, Massilimaliae massiliensis, Massilimaliae timonensis, Neglecta timonensis, Parabacteroides merdae, Peptoniphilaceae NG4 sp1, Peptoniphilaceae NG4 sp3, Pseudoflavonifractor capillosus, Ruminococcaceae NG12 sp1, Ruminococcaceae NG15 sp3, Ruminococcaceae NG17 sp3, Ruthenibacterium sp1, Anaerostipes hadrus, Christensenella timonensis, Desulfovibrio desulfuricans, Dialister invisus, Lachnoclostridium edouardi, Lachnospira pectinoschiza, Lachnospiraceae NG18_sp7, Lawsonibacter sp7, Merdimonas faecis, Negativibacillus sp1, Odoribacter splanchnicus, Roseburia faecis, Roseburia intestinalis, Ruminococcaceae NG11_sp5, Ruthenibacterium lactatiformans, or bacteria having 16S rDNA having at least 94.5%, 95%, 97%, 98%, 98.7% or 99% sequence identity to any one of the 16S rDNA thereof.

[0429] This disclosure also relates to methods of identifying a mammalian subject as a donor whose feces are useful for fecal matter transfer, the method comprising:
[0430] a) obtaining a microbiome sample from the potential donor,
[0431] b) determining the prevalence and/or abundance of the species of bacteria in the microbiome sample, and
[0432] c) determining that the donor's feces is useful for fecal matter transfer if the microbiome sample comprises bacteria comprising one or more bacteria selected from Akkermansia muciniphila, Acetatifactor sp1, Ruminococcaceae NG14 sp1, Hungatella sp2, Bifidobacterium catenulatum group, Blautia wexlerae, Hungatella sp1, Intestinibacter bartlettii, Lachnospiraceae NG31 sp1, Lactonifactor longoviformis, Leuconostoc gelidum, Sutterella wadsworthensis, [Extibacter] muris, Collinsella intestinalis, Collinsella stercoris, Muricomes sp1, Neobitarella massiliensis, Prevotellamassilia sp2, Ruminococcaceae NG33 sp1, [Adlercreutzia] equolifaciens group, [Anaerotruncus]rubiinfantis, Alistipes finegoldii, Alistipes indistinctus, Alistipes obesi, Alistipes putredinis, Alistipes shahii, Anaerofustis stercorihominis, Anaeromassilibacillus sp3, Barnesiella intestinihominis, Bilophila wadsworthia, Blautia faecis, Coriobacteriaceae NG5 sp1, Frisingicoccus sp3, Gordonibacter pamelaeae, Harryflintia acetispora, Lachnospiraceae NG29 sp1, Marvinbryantia sp8, Massilimaliae massiliensis, Massilimaliae timonensis, Neglecta timonensis, Parabacteroides merdae, Peptoniphilaceae NG4 sp1, Peptoniphilaceae NG4 sp3, Pseudoflavonifractor capillosus, Ruminococcaceae NG12 sp1, Ruminococcaceae NG15 sp3, Ruminococcaceae NG17 sp3, Ruthenibacterium sp1, or bacteria having 16S rDNA having at least 94.5%, 95%, 97%, 98%, 98.7% or 99% sequence identity to any one of the 16S rDNA thereof.

[0433] In some aspects, the bacteria comprises one or more bacteria selected from Akkermansia muciniphila, Dysosmobacter welbionis, Anaerobutyricum hallii, Blautia caecimuris, Holdemania filiformis, or bacteria having 16S rDNA having at least 94.5%, 95%, 97%, 98%, 98.7% or 99% sequence identity to any one of the 16S rDNA thereof. In some aspects, the bacteria comprises one or more bacteria selected from Akkermansia muciniphila or bacteria having 16S rDNA having at least 94.5%, 95%, 97%, 98%, 98.7% or 99% sequence identity to any one of the 16S rDNA thereof.

[0434] In some aspects, the bacteria comprises one or more bacteria selected from Acetatifactor sp1, Blautia wexlerae, Ruminococcaceae NG14 sp1, Hungatella sp2, Holdemania filiformis, or bacteria having 16S rDNA having at least 94.5%, 95%, 97%, 98%, 98.7% or 99% sequence identity to any one of the 16S rDNA thereof.

[0435] In some aspects, the bacteria comprises one or more bacteria selected from Bifidobacterium catenulatum group, Blautia wexlerae, Hungatella sp1, Intestinibacter bartlettii, Lachnospiraceae NG31 sp1, Lactonifactor longoviformis, Leuconostoc gelidum, Sutterella wadsworthensis, Anaerostipes hadrus, Dialister invisus, Merdimonas faecis, Roseburia faecis, Roseburia intestinalis, Ruminococcaceae NG11_sp5, or bacteria having 16S rDNA having at least 94.5%, 95%, 97%, 98%, 98.7% or 99% sequence identity to any one of the 16S rDNA thereof.

[0436] In some aspects, the bacteria comprises one or more bacteria selected from [Extibacter] muris, Alistipes onderdonkii, Collinsella intestinalis, Collinsella stercoris, Muricomes sp1, Neobitarella massiliensis, Prevotellamassilia sp2, Ruminococcaceae NG33 sp1, Desulfovibrio desulfuricans, Roseburia intestinalis, or bacteria having 16S rDNA having at least 94.5%, 95%, 97%, 98%, 98.7% or 99% sequence identity to any one of the 16S rDNA thereof. In some aspects, the bacteria comprises one or more bacteria selected from [Extibacter] muris, Collinsella intestinalis, Collinsella stercoris, Muricomes sp1, Neobitarella massiliensis, Prevotellamassilia sp2, Ruminococcaceae NG33 sp1, Lachnoclostridium edouardi, Lachnospira pectinoschiza, Lawsonibacter sp7, Odoribacter splanchnicus, Ruthenibacterium lactatiformans, or bacteria having 16S rDNA having at least 94.5%, 95%, 97%, 98%, 98.7% or 99% sequence identity to any one of the 16S rDNA thereof.

[0437] In some aspects, the bacteria comprises one or more bacteria selected from [Adlercreutzia] equolifaciens group, [Anaerotruncus] rubiinfantis, [Romboutsia] timonensis, Alistipes finegoldii, Alistipes indistinctus, Alistipes obesi, Alistipes putredinis, Alistipes shahii, Anaerofustis stercorihominis, Anaeromassilibacillus sp3, Barnesiella intestinihominis, Bilophila wadsworthia, Blautia faecis, Coriobacteriaceae NG5 sp1, Frisingicoccus sp3, Gordonibacter pamelaeae, Harryflintia acetispora, Lachnospiraceae NG29 sp1, Marvinbryantia sp8, Massilimaliae massiliensis, Massilimaliae timonensis, Neglecta timonensis, Parabacteroides merdae, Peptoniphilaceae NG4 sp1, Peptoniphilaceae NG4 sp3, Pseudoflavonifractor capillosus, Ruminococcaceae NG12 sp1, Ruminococcaceae NG15 sp3, Ruminococcaceae NG17 sp3, Ruthenibacterium sp1, or bacteria having 16S rDNA having at least 94.5%, 95%, 97%, 98%, 98.7% or 99% sequence identity to any one of the 16S rDNA thereof. In some aspects, the bacteria comprises one or more bacteria selected from [Adlercreutzia] equolifaciens group, [Anaerotruncus] rubiinfantis, Alistipes finegoldii, Alistipes indistinctus, Alistipes obesi, Alistipes putredinis, Alistipes shahii, Anaerofustis stercorihominis, Anaeromassilibacillus sp3, Barnesiella intestinihominis, Bilophila wadsworthia, Blautia faecis, Coriobacteriaceae NG5 sp1, Frisingicoccus sp3, Gordonibacter pamelaeae, Harryflintia acetispora, Lachnospiraceae NG29 sp1, Marvinbryantia sp8, Massilimaliae massiliensis, Massilimaliae timonensis, Neglecta timonensis, Parabacteroides merdae, Peptoniphilaceae NG4 sp1, Peptoniphilaceae NG4 sp3, Pseudoflavonifractor capillosus, Ruminococcaceae NG12 sp1, Ruminococcaceae NG15 sp3, Ruminococcaceae NG17 sp3, Ruthenibacterium sp1, or bacteria having 16S rDNA having at least 94.5%, 95%, 97%, 98%, 98.7% or 99% sequence identity to any one of the 16S rDNA thereof.

[0438] This disclosure also relates to methods of identifying a mammalian subject as a donor whose feces are useful for fecal matter transfer, the method comprising:
[0439] a) obtaining a microbiome sample from the potential donor,
[0440] b) determining the prevalence and/or abundance of the species of bacteria in the microbiome sample, and
[0441] c) determining that the donor's feces is useful for fecal matter transfer if the microbiome sample comprises bacteria comprising one or more bacteria having a 16S rDNA sequence that is at least 85%, at least 90%, at least 95%, at least 96%, at least 97%, at least 98%, at least 99%, or 100% identical to a 16S rDNA sequence set forth in SEQ ID NOs: 1, 2, 3, 4, 5, 6, 7, 8, 9, 10, 11, 12, 13, 14, 15, 16, 17, 18, 19, 20, 21, 22, 23, 24, 25, 26, 27, 28, 29, 30, 31, 32, 33, 34, 35, 36, 37, 38, 39, 40, 41, 42, 43, 44, 45, 46, 47, 48, 49, 50, 51, 52, 53, 54, 55, 56, 57, 58, 59, 60, 61, 62, 63, 64, 65, 66, 67, 68, 69, 70, 71, 72, 73, 74, 75, 76, 77, 78, 79, 80, 81, 82, 83, 84, 85, 86, 87, 88, 89, 90, 91, 92, 93, 94, 95, 96, 97, 98, 99, 100, 101, 102, 103, 104, 105, 106, 107, 108, 109, 110, 111, 112, 113, 114, 115, 116, 117, 118, 119, 120, 121, 122, 123, 124, 125, 126, 127, 128, 129, 130, 131, 132, 133, 134, 135, 136, 137, 138, 139, 140, 141, 142, 143, 144, 145, 146, 147, 148, 149, 150, 151, 152, 153, 154, 155, 156, 157, 158, 159, 160, 161, 162, 163, 164, 165, 166, 167, 168, 169, 170, 171, 172, 173, 174, 175, 176, 177, 178, 179, 180, 181, 182, 183, 184, 185, 186, 601, 602, 603, 604, 605, 606, 607, 613, 614, 615, 616, 617, 618, 619, 622, 623, 640, 641, 643, 662, 663, 664, 665, 666, 667, 675, 676, 681, 688, 690, 691, 693, 696, 697, 699, 700, 702, 703, 704, 705, 706, 707, 708, 709, 710, 711, 712, 713, 714, 715, 716, 717, 718, 719, 720, 721, 722, 723, 724, 725, 726, 727, 728, 729, 730, 732, 733, 734, 735, 736, 737, 738, 739, 740, 741, 742, 743, 744, 746, 747, 748, 749, 750, 751, 752, 753, 754, 755, 756, 757, 758, 759, 760, 761, 762, 763, 765, 766, 767, 768, 769, 770, 771, 772, 773, 1018, 1019, 1020, 1021, 1022, 1023, 1024, 1025, 1026, 1027, 1028, 1029, 1030, 1031, 1032, 1033, 1034, 1035, 1036, 1037, 1038, 1039, 1040, 1041, 1042, 1043, 1044, 1045, 1046, 1047, 1048, 1049, 1050, 1051, 1052, 1053, 1054, 1055, 1056, 1057, 1283, 1284, 1285, 1293, 1294, 1295, 1296, 1297, 1298, 1299, 1405, 1406, 1407, 1408, 1409, 1410, 1411, 1412, 1413, 1414, 1415, 1416, 1419, 1420, 1421, 1422, 1423, 1424, 1425, 1426, 1608, 1609, 1610, 1611, 1612, 1613, 1614, 1615, 1010, 1622, 1623, 1624, 1625, 1626, 1627, 1628, 1629, 1630, 1631, 1632, 1633, 1634, 1635, 1636, 1637, 1638, 1639, 1640, 1641, 1642, 1643, 1644, 1645, 1646, 1647, 1648, 1696, 1697, 1698, 1699, 1700, 1701, 1702, 1703, 1704, 1705, 1706, 1707, 1708, 1709, 1710, 1711, 1712, 1713, 1714, 1715, 1716, 1717, 1718, 1719, 1720, 1721, 1722, 1723, 1724, 1725, 1726, 1727, 1728, 1729, 1730, 1731, 1732, 1733, 1734, 1735, 1736, 1737, 1738, 1739, 1740, 1741, 1742, 1743, 1744, 1745, 1746, 1747, 1748, and 1749.

[0442] In some aspects, the bacteria comprises one or more bacteria having a 16S rDNA sequence that is at least 85%, at least 90%, at least 95%, at least 96%, at least 97%, at least 98%, at least 99%, or 100% identical to a 16S rDNA sequence set forth in SEQ ID NOs: 605, 613, 640, 641, 643, 662, 663, 664, 665, 666, 667, 681, 688, 690, 703, 732, 733, 736, 737, 738, 739, 740, 741, 742, 743, 744, 749, 754, 755, 756, 758, 765, 766, 767 and 773.

[0443] In some aspects, the bacteria comprises one or more bacteria having a 16S rDNA sequence that is at least 85%, at least 90%, at least 95%, at least 96%, at least 97%, at least 98%, at least 99%, or 100% identical to a 16S rDNA sequence set forth in SEQ ID NOs: 601, 602, 603, 604, 606, 607, 613, 614, 615, 616, 617, 618, 619, 622, 623, 675, 676, 681, 691, 693, 696, 697, 699, 700, 702, 704, 705, 706, 707, 708, 709, 710, 711, 712, 713, 714, 715, 716, 717, 718, 719, 720, 721, 722, 723, 724, 725, 726, 727, 728, 729, 730, 734, 735, 736, 746, 747, 748, 749, 750, 751, 752, 753, 757, 759, 760, 761, 762, 763, 768, 769, 770, 771 and 772.

[0444] In some aspects, the bacteria comprises one or more bacteria having a 16S rDNA sequence that is at least 85%, at least 90%, at least 95%, at least 96%, at least 97%, at least 98%, at least 99%, or 100% identical to a 16S rDNA sequence set forth in SEQ ID NOs: 2, 3, 6, 10, 12, 13, 19, 20, 21, 22, 23, 24, 34, 37, 38, 39, 42, 43, 44, 45, 46, 47, 48, 50, 51, 52, 55, 57, 58, 59, 64, 65, 66, 67, 73, 74, 75, 80, 82, 83, 84, 85, 86, 87, 88, 89, 90, 91, 92, 93, 94, 95, 96, 97, 98, 99, 100, 101, 104, 105, 106, 107, 108, 109, 110, 111, 112, 114, 115, 116, 120, 123, 129, 135, 136, 138, 139, 140, 141, 142, 143, 145, 146, 148, 153, 156, 157, 158, 161, 168, 169, 170, 173, 176, 178, 180, 182, 1018, 1019, 1020, 1021, 1022, 1023, 1024, 1025, 1026, 1027, 1028, 1029, 1030, 1031, 1032, 1033, 1034, 1035, 1036, 1037, 1038, 1039, 1040, 1041, 1042, 1043, 1044, 1045, 1046, 1047, 1048, 1049, 1050, 1051, 1052, 1053, 1054, 1055, 1056, 1057, 1297, 1298, 1299, 1010, 1696, 1697, 1698, 1699, 1700, 1701, 1702, 1703, 1704, 1705, 1706, 1707, 1708, 1709, 1710, 1711, 1712, 1713, 1714, 1715, 1716, 1717, 1718, 1719, 1720, 1721, 1722, 1723, 1724, 1725, 1726, 1727, 1728, 1729, 1730, 1731, and 1732.

[0445] In some aspects, the bacteria comprises one or more bacteria having a 16S rDNA sequence that is at least 85%, at least 90%, at least 95%, at least 96%, at least 97%, at least 98%, at least 99%, or 100% identical to a 16S rDNA sequence set forth in SEQ ID NOs: 16, 17, 18, 53, 54, 60, 77, 79, 81, 103, 119, 125, 132, 133, 134, 164, 175, 179, 184, 1293, 1294, 1295, 1296, 1705, 1706, 1707, 1708, 1709, 1710, 1711, 1712, 1713, 1714, 1715, 1716, 1717, 1718, 1719, 1720, 1721, 1722, 1723, 1724, 1725, 1726, 1727, 1728, 1729, 1730, 1731, and 1732.

[0446] In some aspects, the bacteria comprises one or more bacteria having a 16S rDNA sequence that is at least 85%, at least 90%, at least 95%, at least 96%, at least 97%, at least 98%, at least 99%, or 100% identical to a 16S rDNA sequence set forth in SEQ ID NOs: 1, 4, 5, 7, 8, 9, 11, 14, 15, 25, 26, 27, 28, 29, 30, 31, 32, 33, 35, 36, 40, 41, 61, 62, 68, 69, 70, 71, 72, 76, 78, 117, 118, 121, 122, 124, 127, 128, 130, 131, 137, 144, 147, 149, 150, 151, 152, 154, 155, 159, 160, 162, 163, 165, 166, 167, 171, 174, 177, 181, 183, 186, 1405, 1406, 1407, 1408, 1409, 1410, 1411, 1412, 1413, 1414, 1415, 1416, 1608, 1609, 1610, 1611, 1612, 1613, 1614, 1615, 1622, 1623, 1624, 1625, 1626, 1627, 1628, 1629, 1630, 1631, 1632, 1633, 1634, 1635, 1636, 1637, 1638, 1639, 1640, 1641, 1642, 1643, 1644, 1645, 1646, 1647, 1648, 1733, 1734, 1735, 1736, 1737, 1738, 1739, 1740, 1741, 1742, 1743, 1744, 1745, 1746, 1747, 1748, and 1749.

[0447] In some aspects, determining that the donor's feces is useful for fecal matter transfer further comprises determining if the microbiome sample does not comprise one or more bacteria selected from Holdemania massiliensis, Rothia mucilaginosa, Hungatella sp2, Prevotella copri, Campylobacter concisus, [Atopobium] parvulum, Alistipes onderdonkii, Angelakisella massiliensis, Christensenellaceae NG5 sp2, Cuneatibacter caecimuris, Desulfovibrio fairfieldensis, Ruminococcaceae NG13 sp1, Ruminococcaceae NG16 sp1, [Coprococcus] catus, [Lactobacillus] fermentum, [Romboutsia] timonensis, [Ruminococcus]bromii, [Ruminococcus] gauvreauii, Actinomyces graevenitzii, Agathobaculum butyriciproducens group, Bacteroides caccae, Bacteroides intestinalis, Bittarella massiliensis, Blautia luti group, Clostridium saudiense, Corynebacterium durum, Fusicatenibacter sp2, Lachnospiraceae NG30 sp3, Massilimaliae sp1, Monoglobus pectinilyticus, Rothia dentocariosa, Rothia mucilaginosa, Ruminococcaceae NG17 sp1, Schaalia odontolytica, Streptococcus australis, Streptococcus gordonii, Streptococcus infantis group, Streptococcus parasanguinis, Streptococcus salivarius group, [Atopobium] parvulum, [Ruminococcus]gnavus, Bacteroides dorei group, Blautia sp1, Schaalia sp2, Actinomycetaceae_NG7 sp1, Allisonella histaminiformans, Bacteroides coprocola, Bacteroides faecis, Bacteroides massiliensis, Bifidobacterium animalis, Clostridium asparagiforme group, Desulfovibrionaceae NG5_sp1, Faecalibacterium prausnitzii, Gemmiger sp2, Granulicatella adiacens, Intestinimonas massiliensis, Lactobacillus delbrueckii, Lactobacillus paracasei, Lactobacillus reuteri, Lactococcus lactis, Marvinbryantia sp5, Prevotella buccalis, Propionibacterium freudenreichii, Ruminococcaceae NG18_sp7, Scardovia wiggsiae, Slackia isoflavoniconvertens, Thermodesulfobiaceae NG1_sp1, or bacteria having 16S rDNA having at least 94.5%, 95%, 97%, 98%, 98.7% or 99% sequence identity to any one of the 16S rDNA thereof.

[0448] In some aspects, determining that the donor's feces is useful for fecal matter transfer further comprises determining if the microbiome sample does not comprise one or more bacteria selected from Rothia mucilaginosa, Prevotella copri, Campylobacter concisus, [Atopobium] parvulum, Angelakisella massiliensis, Christensenellaceae NG5 sp2, Cuneatibacter caecimuris, Desulfovibrio fairfieldensis, Ruminococcaceae NG13 sp1, Ruminococcaceae NG16 sp1, [Coprococcus] catus, [Lactobacillus] fermentum, [Ruminococcus] bromii, [Ruminococcus] gauvreauii, Actinomyces graevenitzii, Agathobaculum butyriciproducens group, Bacteroides caccae, Bacteroides intestinalis, Bittarella massiliensis, Blautia luti group, Clostridium saudiense, Corynebacterium durum, Fusicatenibacter sp2, Lachnospiraceae NG30 sp3, Massilimaliae sp1, Monoglobus pectinilyticus, Rothia dentocariosa, Rothia mucilaginosa, Ruminococcaceae NG17 sp1, Schaalia odontolytica, Streptococcus australis, Streptococcus gordonii, Streptococcus infantis group, Streptococcus parasanguinis, Streptococcus salivarius group, [Atopobium] parvulum, [Ruminococcus] gnavus, Bacteroides dorei group, Blautia sp1, Schaalia sp2, or bacteria having 16S rDNA having at least 94.5%, 95%, 97%, 98%, 98.7% or 99% sequence identity to any one of the 16S rDNA thereof.

[0449] In some aspects, determining that the donor's feces is useful for fecal matter transfer further comprises determining if the microbiome sample does not comprise one or more bacteria selected from Holdemania massiliensis, Rothia mucilaginosa, Hungatella sp2, Prevotella copri, Campylobacter concisus, or bacteria having 16S rDNA having at least 94.5%, 95%, 97%, 98%, 98.7% or 99% sequence identity to any one of the 16S rDNA thereof. In some aspects, determining that the donor's feces is useful for fecal matter transfer further comprises determining if the microbiome sample does not comprise one or more bacteria selected from Rothia mucilaginosa, Prevotella copri, Campylobacter concisus, or bacteria having 16S rDNA having at least 94.5%, 95%, 97%, 98%, 98.7% or 99% sequence identity to any one of the 16S rDNA thereof.

[0450] In some aspects, determining that the donor's feces is useful for fecal matter transfer further comprises determining if the microbiome sample does not comprise one or more bacteria selected from Rothia mucilaginosa, [Atopobium] parvulum, Holdemania massiliensis, Prevotella copri, Campylobacter concisus, or bacteria having 16S rDNA having at least 94.5%, 95%, 97%, 98%, 98.7% or 99% sequence identity to any one of the 16S rDNA thereof. In some aspects, determining that the donor's feces is useful for fecal matter transfer further comprises determining if the microbiome sample does not comprise one or more bacteria selected from Rothia mucilaginosa, [Atopobium] parvulum, Prevotella copri, Campylobacter concisus, or bacteria having 16S rDNA having at least 94.5%, 95%, 97%, 98%, 98.7% or 99% sequence identity to any one of the 16S rDNA thereof.

[0451] In some aspects, determining that the donor's feces is useful for fecal matter transfer further comprises determining if the microbiome sample does not comprise one or more bacteria selected from Alistipes onderdonkii, Angelakisella massiliensis, Christensenellaceae NG5 sp2, Cuneatibacter caecimuris, Desulfovibrio fairfieldensis, Ruminococcaceae NG13 sp1, Ruminococcaceae NG16 sp1, Bifidobacterium animalis, Faecalibacterium prausnitzii, or bacteria having 16S rDNA having at least 94.5%, 95%, 97%, 98%, 98.7% or 99% sequence identity to any one of the 16S rDNA thereof. In some aspects, determining that the donor's feces is useful for fecal matter transfer further comprises determining if the microbiome sample does not comprise one or more bacteria selected from Rothia mucilaginosa, [Atopobium]parvulum, Prevotella copri, Campylobacter concisus, or bacteria having 16S rDNA having at least 94.5%, 95%, 97%, 98%, 98.7% or 99% sequence identity to any one of the 16S rDNA thereof. In some aspects, the cancer is a bladder cancer.

[0452] In some aspects, determining that the donor's feces is useful for fecal matter transfer further comprises determining if the microbiome sample does not comprise one or more bacteria selected from [Coprococcus] catus, [Lactobacillus] fermentum, [Romboutsia] timonensis, [Ruminococcus] bromii, [Ruminococcus] gauvreauii, Actinomyces graevenitzii, Agathobaculum butyriciproducens group, Bacteroides caccae, Bacteroides intestinalis, Bittarella massiliensis, Blautia luti group, Clostridium saudiense, Corynebacterium durum, Fusicatenibacter sp2, Lachnospiraceae NG30 sp3, Massilimaliae sp1, Monoglobus pectinilyticus, Rothia dentocariosa, Rothia mucilaginosa, Ruminococcaceae NG17 sp1, Schaalia odontolytica, Streptococcus australis, Streptococcus gordonii, Streptococcus infantis group, Streptococcus parasanguinis, Streptococcus salivarius group, Allisonella histaminiformans, Bacteroides faecis, Bacteroides massiliensis, Desulfovibrionaceae NG5_sp1, Gemmiger sp2, Intestinimonas massiliensis, Marvinbryantia sp5, Propionibacterium freudenreichii, Slackia isoflavoniconvertens, Thermodesulfobiaceae NG1_sp1, or bacteria having 16S rDNA having at least 94.5%, 95%, 97%, 98%, 98.7% or 99% sequence identity to any one of the 16S rDNA thereof. In some aspects, determining that the donor's feces is useful for fecal matter transfer further comprises determining if the microbiome sample does not comprise one or more bacteria selected from [Coprococcus] catus, [Lactobacillus] fermentum, [Ruminococcus] bromii, [Ruminococcus] gauvreauii, Actinomyces graevenitzii, Agathobaculum butyriciproducens group, Bacteroides caccae, Bacteroides intestinalis, Bittarella massiliensis, Blautia luti group, Clostridium saudiense, Corynebacterium durum, Fusicatenibacter sp2, Lachnospiraceae NG30 sp3, Massilimaliae sp1, Monoglobus pectinilyticus, Rothia dentocariosa, Rothia mucilaginosa, Ruminococcaceae NG17 sp1, Schaalia odontolytica, Streptococcus australis, Streptococcus gordonii, Streptococcus infantis group, Streptococcus parasanguinis, Streptococcus salivarius group, or bacteria having 16S rDNA having at least 94.5%, 95%, 97%, 98%, 98.7% or 99% sequence identity to any one of the 16S rDNA thereof. In some aspects, the cancer is a non-small cell lung cancer.

[0453] In some aspects, determining that the donor's feces is useful for fecal matter transfer further comprises determining if the microbiome sample does not comprise one or more bacteria selected from [Atopobium] parvulum, [Ruminococcus] gnavus, Bacteroides dorei group, Blautia sp1, Schaalia sp2, Granulicatella adiacens, Lactococcus lactis, Scardovia wiggsiae, or bacteria having 16S rDNA having at least 94.5%, 95%, 97%, 98%, 98.7% or 99% sequence identity to any one of the 16S rDNA thereof. In some aspects, the cancer is a metastatic melanoma.

[0454] In some aspects, determining that the donor's feces is useful for fecal matter transfer further comprises determining if the microbiome sample does not comprise one or more bacteria having a 16S rDNA sequence that is at least 85%, at least 90%, at least 95%, at least 96%, at least 97%, at least 98%, at least 99%, or 100% identical to a 16S rDNA sequence set forth in SEQ ID NOs: 187, 188, 189, 190, 191, 192, 193, 194, 195, 196, 197, 198, 199, 200, 201, 202, 203, 204, 205, 206, 207, 208, 209, 210, 211, 212, 213, 214, 215, 216, 217, 218, 219, 220, 221, 222, 223, 224, 225, 226, 227, 228, 229, 230, 231, 232, 233, 234, 235, 236, 237, 238, 239, 240, 241, 242, 243, 244, 245, 246, 247, 248, 249, 250, 251, 252, 253, 254, 255, 256, 257, 258, 259, 260, 261, 262, 263, 264, 265, 266, 267, 268, 269, 270, 271, 272, 273, 274, 275, 276, 277, 278, 279, 280, 281, 282, 283, 284, 285, 286, 287, 288, 289, 290, 291, 292, 293, 294, 295, 296, 297, 298, 299, 300, 301, 302, 303, 304, 305, 306, 307, 308, 309, 310, 311, 312, 313, 314, 315, 316, 317, 318, 319, 320, 321, 322, 323, 324, 325, 326, 327, 328, 329, 330, 331, 332, 333, 334, 335, 336, 337, 338, 339, 340, 341, 342, 343, 344, 345, 346, 347, 348, 349, 350, 351, 352, 353, 354, 355, 356, 357, 358, 359, 360, 361, 362, 363, 364, 365, 366, 367, 368, 369, 370, 371, 372, 373, 374, 375, 376, 377, 378, 379, 380, 381, 382, 383, 384, 385, 386, 387, 388, 389, 390, 391, 392, 393, 394, 395, 396, 397, 398, 399, 400, 401, 402, 403, 404, 405, 406, 407, 408, 409, 410, 411, 412, 413, 414, 415, 416, 417, 418, 419, 420, 421, 422, 423, 424, 425, 426, 427, 428, 429, 430, 431, 432, 433, 434, 435, 436, 437, 438, 439, 440, 441, 442, 443, 444, 445, 446, 447, 448, 449, 450, 451, 452, 453, 454, 455, 456, 457, 458, 459, 460, 461, 462, 463, 464, 465, 466, 467, 468, 469, 470, 471, 472, 473, 474, 475, 476, 477, 478, 479, 480, 481, 482, 483, 484, 485, 486, 487, 488, 489, 490, 491, 492, 493, 494, 495, 496, 497, 498, 499, 500, 501, 502, 503, 504, 505, 506, 507, 508, 509, 510, 511, 512, 513, 514, 515, 516, 517, 518, 519, 520, 521, 522, 523, 524, 525, 526, 527, 528, 529, 530, 531, 532, 533, 534, 535, 536, 537, 538, 539, 540, 541, 542, 543, 544, 545, 546, 547, 548, 549, 550, 551, 552, 553, 554, 555, 556, 557, 558, 559, 560, 561, 562, 563, 564, 565, 566, 567, 568, 569, 570, 571, 572, 573, 574, 575, 576, 577, 578, 579, 580, 581, 582, 583, 584, 585, 586, 587, 588, 589, 590, 591, 592, 593, 594, 595, 596, 597, 598, 599, 600, 608, 609, 610, 611, 612, 620, 621, 622, 623, 624, 625, 626, 627, 628, 629, 630, 631, 632, 633, 634, 635, 636, 637, 638, 639, 642, 644, 645, 646, 647, 648, 649, 650, 651, 652, 653, 654, 655, 656, 657, 658, 659, 660, 661, 668, 669, 670, 671, 672, 673, 674, 677, 678, 679, 680, 682, 683, 684, 685, 686, 687, 689, 692, 694, 695, 698, 701, 731, 734, 764, 1011, 1012, 1013, 1014, 1015, 1016, 1017, 774, 1107, 1108, 1109, 1110, 1111, 1112, 1113, 1114, 1115, 1116, 1117, 1118, 1119, 1120, 1121, 1122, 1123, 1124, 1125, 1126, 1127, 1130, 1131, 1132, 1133, 1134, 1135, 1156, 1157, 1158, 1159, 1160, 1161, 1162, 1163, 1164, 1165, 1166, 1167, 1168, 1169, 1170, 1171, 1172, 1173, 1174, 1175, 1176, 1177, 1178, 1179, 1180, 1181, 1182, 1183, 1184, 1185, 1186, 1187, 1188, 1189, 1190, 1191, 1192, 1193, 1194, 1195, 1196, 1197, 1198, 1199, 1200, 1201, 1202, 1203, 1204, 1205, 1206, 1207, 1208, 1209, 1210, 1211, 1212, 1213, 1214, 1215, 1216, 1217, 1218, 775, 776, 777, 778, 779, 780, 781, 782, 783, 784, 785, 786, 787, 788, 789, 1321, 1322, 1323, 1324, 1325, 1326, 1327, 1328, 1329, 1330, 1331, 1332, 1333, 1334, 1335, 1336, 1337, 1338, 1339, 1340, 1341, 1342, 1343, 1344, 1345, 1346, 1347, 1348, 1349, 1356, 1357, 1358, 1359, 1360, 1361, 1362, 1363, 1364, 1365, 1366, 1367, 1368, 1395, 1396, 1397, 1398, 1399, 1400, 1401, 1402, 1427, 1428, 1429, 1430, 1431, 1432, 1433, 1434, 1435, 1436, 1437, 1438, 1439, 1440, 1441, 1442, 1443, 1444, 1445, 1446, 1447, 1448, 1449, 1450, 1451, 1452, 1453, 1454, 1455, 1456, 1457, 1458, 1459, 1460, 1461, 1462, 1463, 1464, 1465, 1466, 1467, 1468, 1469, 1470, 1471, 1472, 1473, 1474, 1475, 1476, 1477, 1478, 1479, 1480, 1481, 1482, 1483, 1484, 1485, 1486, 1487, 1488, 1489, 1490, 1491, 1492, 1493, 1494, 1495, 1496, 1497, 1498, 1499, 1500, 1501, 1502, 1503, 1504, 1505, 931, 932, 933, 934, 935, 936, 937, 938, 939, 940, 941, 942, 943, 944, 945, 946, 947, 948, 949, 950, 951, 952, 953, 954, 955, 956, 957, 958, 959, 960, 961, 962, 963, 964, 965, 966, 967, 968, 969, 970, 971, 972, 973, 974, 975, 976, 977, 978, 979, 980, 981, 982, 983, 984, 985, 986, 987, 988, 989, 990, 991, 992, 993, 994, 995, 996, 997, 998, 999, 1000, 1001, 1002, 1003, 1004, 1005, 1006, 1007, 1008, 1009, 1506, 1507, 1508, 1509, 1510, 1511, 1512, 1513, 1514, 1515, 1516, 1517, 1518, 1519, 1520, 1521, 1522, 1523, 1524, 1525, 1526, 1527, 1528, 1529, 1530, 1531, 1532, 1533, 1534, 1535, 1536, 1537, 1538, 1539, 1540, 1541, 1542, 1543, 1544, 1545, 1546, 1547, 1548, 1549, 1550, 1551, 1552, 1553, 1554, 1555, 1556, 1557, 1558, 1559, 1560, 1561, 1562, 1563, 1564, 1565, 1566, 1567, 1568, 1569, 1570, 1571, 1572, 1573, 1574, 1575, 1576, 1577, 1578, 1579, 1580, 1581, 1582, 1583, 1584, 1585, 1586, 1587, 1588, 1589, 1590, 1591, 1592, 1593, 1594, 1595, 1596, 1597, 1598, 1599, 1600, 1601, 1602, 1603, 1616, 1617, 1618, 1619, 1620, 1654, 1655, 1656, 1657, 1658, 1659, 1660, 1662, 1663, 1664, 1665, 1666, 1667, 1668, 1669, 1670, 1671, 1672, 1673, 1674, 1675, 1676, 1677, 1678, 1679, 1680, 1681, 1682, 1683, 1684, 1685, 1686, 1687, 1688, 1689, 1690, 1691, 1692, 1693, 1694, 1695, 1750, 1751, 1752, 1753, 1754, 1755, and 1756.

[0455] In some aspects, determining that the donor's feces is useful for fecal matter transfer further comprises determining if the microbiome sample does not comprise one or more bacteria having a 16S rDNA sequence that is at least 85%, at least 90%, at least 95%, at least 96%, at least 97%, at least 98%, at least 99%, or 100% identical to a 16S rDNA sequence set forth in SEQ ID NOs: 608, 610, 611, 612, 620, 621, 622, 623, 624, 625, 626, 630, 631, 632, 633, 634, 635, 636, 637, 638, 639, 642, 644, 645, 646, 647, 648, 649, 650, 651, 652, 653, 654, 655, 656, 657, 658, 659, 660, 661, 668, 669, 670, 671, 672, 673, 674, 677, 678, 679, 680, 682, 683, 684, 685, 686, 687, 689, 692, 694, 695, 698, 701, 731, 734 and 764.

[0456] In some aspects, determining that the donor's feces is useful for fecal matter transfer further comprises determining if the microbiome sample does not comprise one or more bacteria having a 16S rDNA sequence that is at least 85%, at least 90%, at least 95%, at least 96%, at least 97%, at least 98%, at least 99%, or 100% identical to a 16S rDNA sequence set forth in SEQ ID NOs: 608, 609, 610, 611, 612, 620, 621, 624, 625, 626, 627, 628, 629, 630, 631, 632, 633, 634, 635, 636, 637, 638, 639, 642, 644, 645, 646, 647, 648, 649, 650, 651, 652, 653, 654, 655, 656, 657, 658, 659, 660, 661, 668, 669, 670, 671, 672, 673, 674, 677, 678, 679, 680, 682, 683, 684, 685, 686, 687, 689, 692, 694, 695, 698, 701, 731 and 764.

[0457] In some aspects, determining that the donor's feces is useful for fecal matter transfer further comprises determining if the microbiome sample does not comprise one or more bacteria having a 16S rDNA sequence that is at least 85%, at least 90%, at least 95%, at least 96%, at least 97%, at least 98%, at least 99%, or 100% identical to a 16S rDNA sequence set forth in SEQ ID NOs: 188, 213, 245, 323, 331, 332, 376, 455, 509, 516, 538, 582, 1156, 1157, 1158, 1159, 1160, 1161, 1162, 1163, 1164, 1165, 1166, 1167, 1168, 1169, 1170, 1171, 1172, 1173, 1174, 1175, 1176, 1177, 1178, 1179, 1180, 1181, 1182, 1183, 1184, 1185, 1186, 1187, 1188, 1189, 1190, 1191, 1192, 1193, 1194, 1195, 1196, 1197, 1198, 1199, 1200, 1201, 1202, 1203, 1204, 1205, 1206, 1207, 1208, 1209, 1210, 1211, 1212, 1213, 1214, 1215, 1216, 1217, 1218, o1321, 1322, 1323, 1324, 1325, 1326, 1327, 1328, 1329, 1330, 1331, 1332, 1333, 1334, 1335, 1336, 1337, 1338, 1339, 1340, 1341, 1342, 1343, 1344, 1345, 1346, 1347, 1348, and 1349.

[0458] In some aspects, determining that the donor's feces is useful for fecal matter transfer further comprises determining if the microbiome sample does not comprise one or more bacteria having a 16S rDNA sequence that is at least 85%, at least 90%, at least 95%, at least 96%, at least 97%, at least 98%, at least 99%, or 100% identical to a 16S rDNA sequence set forth in SEQ ID NOs: 187, 189, 190, 191, 192, 193, 194, 195, 196, 197, 198, 199, 200, 201, 202, 203, 204, 205, 211, 214, 216, 217, 218, 219, 220, 221, 222, 224, 225, 226, 227, 228, 229, 230, 231, 232, 233, 234, 235, 236, 237, 238, 239, 240, 241, 242, 243, 244, 246, 247, 248, 253, 254, 255, 257, 258, 259, 263, 264, 265, 267, 268, 269, 270, 271, 272, 273, 277, 283, 286, 289, 290, 291, 292, 293, 294, 295, 296, 297, 298, 299, 300, 301, 302, 303, 304, 305, 306, 307, 308, 309, 310, 311, 312, 313, 314, 315, 316, 317, 318, 319, 320, 321, 322, 324, 325, 326, 327, 328, 329, 330, 333, 334, 335, 336, 337, 338, 339, 340, 341, 342, 343, 344, 345, 346, 347, 348, 349, 350, 351, 352, 353, 354, 355, 356, 357, 358, 359, 360, 361, 362, 363, 364, 365, 366, 367, 368, 369, 370, 371, 372, 373, 374, 375, 377, 378, 379, 380, 381, 382, 383, 384, 385, 386, 387, 389, 390, 391, 392, 393, 394, 395, 396, 397, 398, 399, 400, 401, 402, 403, 409, 410, 411, 412, 413, 414, 415, 418, 421, 424, 425, 428, 429, 430, 431, 432, 433, 434, 435, 436, 437, 438, 439, 440, 441, 442, 443, 444, 445, 447, 449, 450, 452, 453, 454, 456, 457, 458, 460, 462, 463, 464, 465, 466, 467, 468, 469, 471, 472, 473, 474, 475, 476, 478, 479, 480, 481, 483, 484, 486, 487, 488, 489, 490, 491, 492, 493, 494, 495, 496, 497, 498, 499, 500, 501, 502, 503, 504, 505, 506, 507, 508, 510, 511, 512, 513, 514, 515, 520, 521, 522, 523, 524, 525, 526, 527, 528, 529, 530, 531, 537, 539, 540, 542, 543, 544, 545, 546, 547, 548, 550, 551, 552, 553, 554, 555, 560, 561, 564, 565, 566, 573, 574, 577, 579, 581, 583, 584, 585, 586, 587, 588, 589, 591, 594, 595, 596, 597, 598, 599, 600, 774, 1113, 1114, 1115, 1116, 1117, 1118, 1119, 1120, 1121, 1122, 1123, 1124, 1125, 1126, 1127, 1130, 1131, 1132, 1133, 1134, 1135, 1356, 1357, 1358, 1359, 1360, 1361, 1362, 1395, 1396, 1397, 1398, 1399, 1400, 1401, 1402, 1616, 1617, 1618, 1619, 1620, 1662, 1663, 1664, 1665, 1666, 1667, 1668, 1669, 1670, 1671, 1672, 1673, 1674, 1675, 1676, 1677, 1678, 1679, 1680, 1681, 1682, 1683, 1684, 1685, 1686, 1687, 1688, 1689, 1690, 1691, 1692, 1693, 1694, 1695, 1755, and 1756.

[0459] In some aspects, determining that the donor's feces is useful for fecal matter transfer further comprises determining if the microbiome sample does not comprise one or more bacteria having a 16S rDNA sequence that is at least 85%, at least 90%, at least 95%, at least 96%, at least 97%, at least 98%, at least 99%, or 100% identical to a 16S rDNA sequence set forth in SEQ ID NOs: 206, 207, 208, 209, 210, 212, 215, 223, 249, 250, 251, 252, 256, 260, 261, 262, 266, 274, 275, 276, 278, 279, 280, 281, 282, 284, 285, 287, 388, 404, 405, 406, 407, 408, 416, 417, 419, 420, 422, 423, 426, 427, 446, 448, 451, 459, 461, 482, 485, 517, 518, 519, 532, 533, 534, 535, 536, 549, 556, 557, 558, 559, 562, 563, 567, 568, 569, 570, 571, 572, 575, 576, 580, 590, 593, 1363, 1364, 1365, 1366, 1367, 1368, 1506, 1507, 1508, 1509, 1510, 1511, 1512, 1513, 1514, 1515, 1516, 1517, 1518, 1519, 1520, 1521, 1522, 1523, 1524, 1525, 1526, 1527, 1528, 1529, 1530, 1531, 1532, 1533, 1534, 1535, 1536, 1537, 1538, 1539, 1540, 1541, 1542, 1543, 1544, 1545, 1546, 1547, 1548, 1549, 1550, 1551, 1552, 1553, 1554, 1555, 1556, 1557, 1558, 1559, 1560, 1561, 1562, 1563, 1564, 1565, 1566, 1567, 1568, 1569, 1570, 1571, 1572, 1573, 1574, 1575, 1576, 1577, 1578, 1579, 1580, 1581, 1582, 1583, 1584, 1585, 1586, 1587, 1588, 1589, 1590, 1591, 1592, 1593, 1594, 1595, 1596, 1597, 1598, 1599, 1600, 1601, 1602, 1603, 1750, 1751, 1752, 1753, and 1754.

[0460] This disclosure also provides a therapeutic composition derived from fecal matter from a donor identified using the methods disclosed herein. Such compositions or methods include the aspects discussed throughout the application.

### XII. Embodiments

[0461] The present disclosure is also described in the following embodiments:

[0462] Embodiment 1. A therapeutic composition comprising an effective amount of a purified or isolated population of bacteria that have 16S rDNA sequence identity of at least 94.5% to 16S rDNA sequences of species belonging to one or more of the families Sutterellaceae, Coriobacteriaceae, Akkermansiaceae, Campylobacteraceae, or Desulfovibrionaceae.

[0463] Embodiment 2. The therapeutic composition of embodiment 1, wherein the bacteria have 16S rDNA sequence identity of at least 95%, 97%, 98%, 98.7% or 99% to 16S rDNA sequences of species belonging to one or more of the families Sutterellaceae, Coriobacteriaceae, Akkermansiaceae, Campylobacteraceae, or Desulfovibrionaceae.

[0464] Embodiment 3. The therapeutic composition of embodiment 1 or 2, wherein the therapeutic composition comprises bacteria belonging to two, three, four or more families.

[0465] Embodiment 4. A therapeutic composition comprising an effective amount of a purified or isolated population of bacteria comprising one or more bacteria selected from Akkermansia muciniphila, Dysosmobacter welbionis, Anaerobutyricum hallii, Blautia caecimuris, Holdemania filiformis, Acetatifactor sp1, Ruminococcaceae NG14 sp1, Hungatella sp2, Bifidobacterium catenulatum group, Blautia wexlerae, Hungatella sp1, Intestinibacter bartlettii, Lachnospiraceae NG31 sp1, Lactonifactor longoviformis, Leuconostoc gelidum, Sutterella wadsworthensis, [Extibacter] muris, Alistipes onderdonkii, Collinsella intestinalis, Collinsella stercoris, Muricomes sp1, Neobitarella massiliensis, Prevotellamassilia sp2, Ruminococcaceae NG33 sp1, [Adlercreutzia] equolifaciens group, [Anaerotruncus] rubiinfantis, [Romboutsia] timonensis, Alistipes finegoldii, Alistipes indistinctus, Alistipes obesi, Alistipes putredinis, Alistipes shahii, Anaerofustis stercorihominis, Anaeromassilibacillus sp3, Barnesiella intestinihominis, Bilophila wadsworthia, Blautia faecis, Coriobacteriaceae NG5 sp1, Frisingicoccus sp3, Gordonibacter pamelaeae, Harryflintia acetispora, Lachnospiraceae NG29 sp1, Marvinbryantia sp8, Massilimaliae massiliensis, Massilimaliae timonensis, Neglecta timonensis, Parabacteroides merdae, Peptoniphilaceae NG4 sp1, Peptoniphilaceae NG4 sp3, Pseudoflavonifractor capillosus, Ruminococcaceae NG12 sp1, Ruminococcaceae NG15 sp3, Ruminococcaceae NG17 sp3, Ruthenibacterium sp1, or bacteria having 16S rDNA having at least 94.5%, 95%, 97%, 98%, 98.7% or 99% sequence identity to any one of the 16S rDNA thereof.

[0466] Embodiment 5. The therapeutic composition of embodiment 4, wherein the bacteria comprises one or more bacteria selected from Akkermansia muciniphila, Dysosmobacter welbionis, Anaerobutyricum hallii, Blautia caecimuris, Holdemania filiformis, or bacteria having 16S rDNA having at least 94.5%, 95%, 97%, 98%, 98.7% or 99% sequence identity to any one of the 16S rDNA thereof.

[0467] Embodiment 6. The therapeutic composition of embodiment 4, wherein the bacteria comprises one or more bacteria selected from Acetatifactor sp1, Blautia wexlerae, Ruminococcaceae NG14 sp1, Hungatella sp2, Holdemania filiformis, or bacteria having 16S rDNA having at least 94.5%, 95%, 97%, 98%, 98.7% or 99% sequence identity to any one of the 16S rDNA thereof.

[0468] Embodiment 7. The therapeutic composition of embodiment 4, wherein the bacteria comprises one or more bacteria selected from Bifidobacterium catenulatum group, Blautia wexlerae, Hungatella sp1, Intestinibacter bartlettii, Lachnospiraceae NG31 sp1, Lactonifactor longoviformis, Leuconostoc gelidum, Sutterella wadsworthensis, or bacteria having 16S rDNA having at least 94.5%, 95%, 97%, 98%, 98.7% or 99% sequence identity to any one of the 16S rDNA thereof.

[0469] Embodiment 8. The therapeutic composition of embodiment 4, wherein the bacteria comprises one or more bacteria selected from [Extibacter] muris, Alistipes onderdonkii, Collinsella intestinalis, Collinsella stercoris, Muricomes sp1, Neobitarella massiliensis, Prevotellamassilia sp2, Ruminococcaceae NG33 sp1, or bacteria having 16S rDNA having at least 94.5%, 95%, 97%, 98%, 98.7% or 99% sequence identity to any one of the 16S rDNA thereof.

[0470] Embodiment 9. The therapeutic composition of embodiment 4, wherein the bacteria comprises one or more bacteria selected from [Adlercreutzia] equolifaciens group, [Anaerotruncus] rubiinfantis, [Romboutsia] timonensis, Alistipes finegoldii, Alistipes indistinctus, Alistipes obesi, Alistipes putredinis, Alistipes shahii, Anaerofustis stercorihominis, Anaeromassilibacillus sp3, Barnesiella intestinihominis, Bilophila wadsworthia, Blautia faecis, Coriobacteriaceae NG5 sp1, Frisingicoccus sp3, Gordonibacter pamelaeae, Harryflintia acetispora, Lachnospiraceae NG29 sp1, Marvinbryantia sp8, Massilimaliae massiliensis, Massilimaliae timonensis, Neglecta timonensis, Parabacteroides merdae, Peptoniphilaceae NG4 sp1, Peptoniphilaceae NG4 sp3, Pseudoflavonifractor capillosus, Ruminococcaceae NG12 sp1, Ruminococcaceae NG15 sp3, Ruminococcaceae NG17 sp3, Ruthenibacterium sp1, or bacteria having 16S rDNA having at least 94.5%, 95%, 97%, 98%, 98.7% or 99% sequence identity to any one of the 16S rDNA thereof.

[0471] Embodiment 10. A therapeutic composition comprising a purified population of bacteria, wherein the purified or isolated population of bacteria comprises one or more bacteria having a 16S rDNA sequence that is at least 85%, at least 90%, at least 95%, at least 96%, at least 97%, at least 98%, at least 99%, or 100% identical to a 16S rDNA sequence set forth in SEQ ID NOs: 1, 2, 3, 4, 5, 6, 7, 8, 9, 10, 11, 12, 13, 14, 15, 16, 17, 18, 19, 20, 21, 22, 23, 24, 25, 26, 27, 28, 29, 30, 31, 32, 33, 34, 35, 36, 37, 38, 39, 40, 41, 42, 43, 44, 45, 46, 47, 48, 49, 50, 51, 52, 53, 54, 55, 56, 57, 58, 59, 60, 61, 62, 63, 64, 65, 66, 67, 68, 69, 70, 71, 72, 73, 74, 75, 76, 77, 78, 79, 80, 81, 82, 83, 84, 85, 86, 87, 88, 89, 90, 91, 92, 93, 94, 95, 96, 97, 98, 99, 100, 101, 102, 103, 104, 105, 106, 107, 108, 109, 110, 111, 112, 113, 114, 115, 116, 117, 118, 119, 120, 121, 122, 123, 124, 125, 126, 127, 128, 129, 130, 131, 132, 133, 134, 135, 136, 137, 138, 139, 140, 141, 142, 143, 144, 145, 146, 147, 148, 149, 150, 151, 152, 153, 154, 155, 156, 157, 158, 159, 160, 161, 162, 163, 164, 165, 166, 167, 168, 169, 170, 171, 172, 173, 174, 175, 176, 177, 178, 179, 180, 181, 182, 183, 184, 185, 186, 601, 602, 603, 604, 605, 606, 607, 613, 614, 615, 616, 617, 618, 619, 622, 623, 640, 641, 643, 662, 663, 664, 665, 666, 667, 675, 676, 681, 688, 690, 691, 693, 696, 697, 699, 700, 702, 703, 704, 705, 706, 707, 708, 709, 710, 711, 712, 713, 714, 715, 716, 717, 718, 719, 720, 721, 722, 723, 724, 725, 726, 727, 728, 729, 730, 732, 733, 734, 735, 736, 737, 738, 739, 740, 741, 742, 743, 744, 746, 747, 748, 749, 750, 751, 752, 753, 754, 755, 756, 757, 758, 759, 760, 761, 762, 763, 765, 766, 767, 768, 769, 770, 771, 772 and 773.

[0472] Embodiment 11. The therapeutic composition of embodiment 10, wherein the bacteria comprises one or more bacteria having a 16S rDNA sequence that is at least 85%, at least 90%, at least 95%, at least 96%, at least 97%, at least 98%, at least 99%, or 100% identical to a 16S rDNA sequence set forth in SEQ ID NOs: 605, 613, 640, 641, 643, 662, 663, 664, 665, 666, 667, 681, 688, 690, 703, 732, 733, 736, 737, 738, 739, 740, 741, 742, 743, 744, 749, 754, 755, 756, 758, 765, 766, 767 and 773.

[0473] Embodiment 12. The therapeutic composition of embodiment 10, wherein the bacteria comprises one or more bacteria having a 16S rDNA sequence that is at least 85%, at least 90%, at least 95%, at least 96%, at least 97%, at least 98%, at least 99%, or 100% identical to a 16S rDNA sequence set forth in SEQ ID NOs: 601, 602, 603, 604, 606, 607, 613, 614, 615, 616, 617, 618, 619, 622, 623, 675, 676, 681, 691, 693, 696, 697, 699, 700, 702, 704, 705, 706, 707, 708, 709, 710, 711, 712, 713, 714, 715, 716, 717, 718, 719, 720, 721, 722, 723, 724, 725, 726, 727, 728, 729, 730, 734, 735, 736, 746, 747, 748, 749, 750, 751, 752, 753, 757, 759, 760, 761, 762, 763, 768, 769, 770, 771 and 772.

[0474] Embodiment 13. The therapeutic composition of embodiment 10, wherein the bacteria comprises one or more bacteria having a 16S rDNA sequence that is at least 85%, at least 90%, at least 95%, at least 96%, at least 97%, at least 98%, at least 99%, or 100% identical to a 16S rDNA sequence set forth in SEQ ID NOs: 2, 3, 6, 10, 12, 13, 19, 20, 21, 22, 23, 24, 34, 37, 38, 39, 42, 43, 44, 45, 46, 47, 48, 50, 51, 52, 55, 57, 58, 59, 64, 65, 66, 67, 73, 74, 75, 80, 82, 83, 84, 85, 86, 87, 88, 89, 90, 91, 92, 93, 94, 95, 96, 97, 98, 99, 100, 101, 104, 105, 106, 107, 108, 109, 110, 111, 112, 114, 115, 116, 120, 123, 129, 135, 136, 138, 139, 140, 141, 142, 143, 145, 146, 148, 153, 156, 157, 158, 161, 168, 169, 170, 173, 176, 178, 180 and 182.

[0475] Embodiment 14. The therapeutic composition of embodiment 10, wherein the bacteria comprises one or more bacteria having a 16S rDNA sequence that is at least 85%, at least 90%, at least 95%, at least 96%, at least 97%, at least 98%, at least 99%, or 100% identical to a 16S rDNA sequence set forth in SEQ ID NOs: 16, 17, 18, 53, 54, 60, 77, 79, 81, 103, 119, 125, 132, 133, 134, 164, 175, 179 and 184.

[0476] Embodiment 15. The therapeutic composition of embodiment 10, wherein the bacteria comprises one or more bacteria having a 16S rDNA sequence that is at least 85%, at least 90%, at least 95%, at least 96%, at least 97%, at least 98%, at least 99%, or 100% identical to a 16S rDNA sequence set forth in SEQ ID NOs: 1, 4, 5, 7, 8, 9, 11, 14, 15, 25, 26, 27, 28, 29, 30, 31, 32, 33, 35, 36, 40, 41, 61, 62, 68, 69, 70, 71, 72, 76, 78, 117, 118, 121, 122, 124, 127, 128, 130, 131, 137, 144, 147, 149, 150, 151, 152, 154, 155, 159, 160, 162, 163, 165, 166, 167, 171, 174, 177, 181, 183 and 186.

[0477] Embodiment 16. The therapeutic composition of any of embodiments 4-15, wherein the therapeutic composition comprises two, three, four, five, six, seven, eight, nine, ten, eleven, twelve, thirteen, fourteen, fifteen, sixteen, seventeen, eighteen or more bacterial species.

[0478] Embodiment 17. The therapeutic composition of any of embodiments 1-16, wherein the therapeutic composition does not comprise one or more bacteria selected from Holdemania massiliensis, Rothia mucilaginosa, Hungatella sp2, Prevotella copri, Campylobacter concisus, [Atopobium] parvulum, Alistipes onderdonkii, Angelakisella massiliensis, Christensenellaceae NG5 sp2, Cuneatibacter caecimuris, Desulfovibrio fairfieldensis, Ruminococcaceae NG13 sp1, Ruminococcaceae NG16 sp1, [Coprococcus] catus, [Lactobacillus] fermentum, [Romboutsia] timonensis, [Ruminococcus] bromii, [Ruminococcus] gauvreauii, Actinomyces graevenitzii, Agathobaculum butyriciproducens group, Bacteroides caccae, Bacteroides intestinalis, Bittarella massiliensis, Blautia luti group, Clostridium saudiense, Corynebacterium durum, Fusicatenibacter sp2, Lachnospiraceae NG30 sp3, Massilimaliae sp1, Monoglobus pectinilyticus, Rothia dentocariosa, Rothia mucilaginosa, Ruminococcaceae NG17 sp1, Schaalia odontolytica, Streptococcus australis, Streptococcus gordonii, Streptococcus infantis group, Streptococcus parasanguinis, Streptococcus salivarius group, [Atopobium] parvulum, [Ruminococcus]gnavus, Bacteroides dorei group, Blautia sp1, Schaalia sp2, or bacteria having 16S rDNA having at least 94.5%, 95%, 97%, 98%, 98.7% or 99% sequence identity to any one of the 16S rDNA thereof.

[0479] Embodiment 18. The therapeutic composition of any of embodiments 1-16, wherein the therapeutic composition does not comprise Holdemania massiliensis, Rothia mucilaginosa, Hungatella sp2, Prevotella copri, Campylobacter concisus, or bacteria having 16S rDNA having at least 94.5%, 95%, 97%, 98%, 98.7% or 99% sequence identity to any one of the 16S rDNA thereof.

[0480] Embodiment 19. The therapeutic composition of any of embodiments 1-16, wherein the therapeutic composition does not comprise Rothia mucilaginosa, [Atopobium] parvulum, Holdemania massiliensis, Prevotella copri, Campylobacter concisus, or bacteria having 16S rDNA having at least 94.5%, 95%, 97%, 98%, 98.7% or 99% sequence identity to any one of the 16S rDNA thereof.

[0481] Embodiment 20. The therapeutic composition of any of embodiments 1-16, wherein the therapeutic composition does not comprise Alistipes onderdonkii, Angelakisella massiliensis, Christensenellaceae NG5 sp2, Cuneatibacter caecimuris, Desulfovibrio fairfieldensis, Ruminococcaceae NG13 sp1, Ruminococcaceae NG16 sp1, or bacteria having 16S rDNA having at least 94.5%, 95%, 97%, 98%, 98.7% or 99% sequence identity to any one of the 16S rDNA thereof.

[0482] Embodiment 21. The therapeutic composition of any of embodiments 1-16, wherein the therapeutic composition does not comprise [Coprococcus] catus, [Lactobacillus]fermentum, [Romboutsia] timonensis, [Ruminococcus] bromii, [Ruminococcus] gauvreauii, Actinomyces graevenitzii, Agathobaculum butyriciproducens group, Bacteroides caccae, Bacteroides intestinalis, Bittarella massiliensis, Blautia luti group, Clostridium saudiense, Corynebacterium durum, Fusicatenibacter sp2, Lachnospiraceae NG30 sp3, Massilimaliae sp1, Monoglobus pectinilyticus, Rothia dentocariosa, Rothia mucilaginosa, Ruminococcaceae NG17 sp1, Schaalia odontolytica, Streptococcus australis, Streptococcus gordonii, Streptococcus infantis group, Streptococcus parasanguinis, Streptococcus salivarius group, or bacteria having 16S rDNA having at least 94.5%, 95%, 97%, 98%, 98.7% or 99% sequence identity to any one of the 16S rDNA thereof.

[0483] Embodiment 22. The therapeutic composition of any of embodiments 1-16, wherein the therapeutic composition does not comprise [Atopobium] parvulum, [Ruminococcus] gnavus, Bacteroides dorei group, Blautia sp1, Schaalia sp2, or bacteria having 16S rDNA having at least 94.5%, 95%, 97%, 98%, 98.7% or 99% sequence identity to any one of the 16S rDNA thereof.

[0484] Embodiment 23. The therapeutic composition of any of embodiments 1-16, wherein the therapeutic composition does not comprise one or more bacteria having a 16S rDNA sequence that is at least 85%, at least 90%, at least 95%, at least 96%, at least 97%, at least 98%, at least 99%, or 100% identical to a 16S rDNA sequence set forth in SEQ ID NOs: 187, 188, 189, 190, 191, 192, 193, 194, 195, 196, 197, 198, 199, 200, 201, 202, 203, 204, 205, 206, 207, 208, 209, 210, 211, 212, 213, 214, 215, 216, 217, 218, 219, 220, 221, 222, 223, 224, 225, 226, 227, 228, 229, 230, 231, 232, 233, 234, 235, 236, 237, 238, 239, 240, 241, 242, 243, 244, 245, 246, 247, 248, 249, 250, 251, 252, 253, 254, 255, 256, 257, 258, 259, 260, 261, 262, 263, 264, 265, 266, 267, 268, 269, 270, 271, 272, 273, 274, 275, 276, 277, 278, 279, 280, 281, 282, 283, 284, 285, 286, 287, 288, 289, 290, 291, 292, 293, 294, 295, 296, 297, 298, 299, 300, 301, 302, 303, 304, 305, 306, 307, 308, 309, 310, 311, 312, 313, 314, 315, 316, 317, 318, 319, 320, 321, 322, 323, 324, 325, 326, 327, 328, 329, 330, 331, 332, 333, 334, 335, 336, 337, 338, 339, 340, 341, 342, 343, 344, 345, 346, 347, 348, 349, 350, 351, 352, 353, 354, 355, 356, 357, 358, 359, 360, 361, 362, 363, 364, 365, 366, 367, 368, 369, 370, 371, 372, 373, 374, 375, 376, 377, 378, 379, 380, 381, 382, 383, 384, 385, 386, 387, 388, 389, 390, 391, 392, 393, 394, 395, 396, 397, 398, 399, 400, 401, 402, 403, 404, 405, 406, 407, 408, 409, 410, 411, 412, 413, 414, 415, 416, 417, 418, 419, 420, 421, 422, 423, 424, 425, 426, 427, 428, 429, 430, 431, 432, 433, 434, 435, 436, 437, 438, 439, 440, 441, 442, 443, 444, 445, 446, 447, 448, 449, 450, 451, 452, 453, 454, 455, 456, 457, 458, 459, 460, 461, 462, 463, 464, 465, 466, 467, 468, 469, 470, 471, 472, 473, 474, 475, 476, 477, 478, 479, 480, 481, 482, 483, 484, 485, 486, 487, 488, 489, 490, 491, 492, 493, 494, 495, 496, 497, 498, 499, 500, 501, 502, 503, 504, 505, 506, 507, 508, 509, 510, 511, 512, 513, 514, 515, 516, 517, 518, 519, 520, 521, 522, 523, 524, 525, 526, 527, 528, 529, 530, 531, 532, 533, 534, 535, 536, 537, 538, 539, 540, 541, 542, 543, 544, 545, 546, 547, 548, 549, 550, 551, 552, 553, 554, 555, 556, 557, 558, 559, 560, 561, 562, 563, 564, 565, 566, 567, 568, 569, 570, 571, 572, 573, 574, 575, 576, 577, 578, 579, 580, 581, 582, 583, 584, 585, 586, 587, 588, 589, 590, 591, 592, 593, 594, 595, 596, 597, 598, 599, 600, 608, 609, 610, 611, 612, 620, 621, 622, 623, 624, 625, 626, 627, 628, 629, 630, 631, 632, 633, 634, 635, 636, 637, 638, 639, 642, 644, 645, 646, 647, 648, 649, 650, 651, 652, 653, 654, 655, 656, 657, 658, 659, 660, 661, 668, 669, 670, 671, 672, 673, 674, 677, 678, 679, 680, 682, 683, 684, 685, 686, 687, 689, 692, 694, 695, 698, 701, 731, 734 and 764.

[0485] Embodiment 24. The therapeutic composition of any of embodiments 1-16, wherein the therapeutic composition does not comprise one or more bacteria having a 16S rDNA sequence that is at least 85%, at least 90%, at least 95%, at least 96%, at least 97%, at least 98%, at least 99%, or 100% identical to a 16S rDNA sequence set forth in SEQ ID NOs: 608, 610, 611, 612, 620, 621, 622, 623, 624, 625, 626, 630, 631, 632, 633, 634, 635, 636, 637, 638, 639, 642, 644, 645, 646, 647, 648, 649, 650, 651, 652, 653, 654, 655, 656, 657, 658, 659, 660, 661, 668, 669, 670, 671, 672, 673, 674, 677, 678, 679, 680, 682, 683, 684, 685, 686, 687, 689, 692, 694, 695, 698, 701, 731, 734 and 764.

[0486] Embodiment 25. The therapeutic composition of any of embodiments 1-16, wherein the therapeutic composition does not comprise one or more bacteria having a 16S rDNA sequence that is at least 85%, at least 90%, at least 95%, at least 96%, at least 97%, at least 98%, at least 99%, or 100% identical to a 16S rDNA sequence set forth in SEQ ID NOs: 608, 609, 610, 611, 612, 620, 621, 624, 625, 626, 627, 628, 629, 630, 631, 632, 633, 634, 635, 636, 637, 638, 639, 642, 644, 645, 646, 647, 648, 649, 650, 651, 652, 653, 654, 655, 656, 657, 658, 659, 660, 661, 668, 669, 670, 671, 672, 673, 674, 677, 678, 679, 680, 682, 683, 684, 685, 686, 687, 689, 692, 694, 695, 698, 701, 731 and 764.

[0487] Embodiment 26. The therapeutic composition of any of embodiments 1-16, wherein the therapeutic composition does not comprise one or more bacteria having a 16S rDNA sequence that is at least 85%, at least 90%, at least 95%, at least 96%, at least 97%, at least 98%, at least 99%, or 100% identical to a 16S rDNA sequence set forth in SEQ ID NOs: 188, 213, 245, 323, 331, 332, 376, 455, 509, 516, 538 and 582.

[0488] Embodiment 27. The therapeutic composition of any of embodiments 1-16, wherein the therapeutic composition does not comprise one or more bacteria having a 16S rDNA sequence that is at least 85%, at least 90%, at least 95%, at least 96%, at least 97%, at least 98%, at least 99%, or 100% identical to a 16S rDNA sequence set forth in SEQ ID NOs: 187, 189, 190, 191, 192, 193, 194, 195, 196, 197, 198, 199, 200, 201, 202, 203, 204, 205, 211, 214, 216, 217, 218, 219, 220, 221, 222, 224, 225, 226, 227, 228, 229, 230, 231, 232, 233, 234, 235, 236, 237, 238, 239, 240, 241, 242, 243, 244, 246, 247, 248, 253, 254, 255, 257, 258, 259, 263, 264, 265, 267, 268, 269, 270, 271, 272, 273, 277, 283, 286, 289, 290, 291, 292, 293, 294, 295, 296, 297, 298, 299, 300, 301, 302, 303, 304, 305, 306, 307, 308, 309, 310, 311, 312, 313, 314, 315, 316, 317, 318, 319, 320, 321, 322, 324, 325, 326, 327, 328, 329, 330, 333, 334, 335, 336, 337, 338, 339, 340, 341, 342, 343, 344, 345, 346, 347, 348, 349, 350, 351, 352, 353, 354, 355, 356, 357, 358, 359, 360, 361, 362, 363, 364, 365, 366, 367, 368, 369, 370, 371, 372, 373, 374, 375, 377, 378, 379, 380, 381, 382, 383, 384, 385, 386, 387, 389, 390, 391, 392, 393, 394, 395, 396, 397, 398, 399, 400, 401, 402, 403, 409, 410, 411, 412, 413, 414, 415, 418, 421, 424, 425, 428, 429, 430, 431, 432, 433, 434, 435, 436, 437, 438, 439, 440, 441, 442, 443, 444, 445, 447, 449, 450, 452, 453, 454, 456, 457, 458, 460, 462, 463, 464, 465, 466, 467, 468, 469, 471, 472, 473, 474, 475, 476, 478, 479, 480, 481, 483, 484, 486, 487, 488, 489, 490, 491, 492, 493, 494, 495, 496, 497, 498, 499, 500, 501, 502, 503, 504, 505, 506, 507, 508, 510, 511, 512, 513, 514, 515, 520, 521, 522, 523, 524, 525, 526, 527, 528, 529, 530, 531, 537, 539, 540, 542, 543, 544, 545, 546, 547, 548, 550, 551, 552, 553, 554, 555, 560, 561, 564, 565, 566, 573, 574, 577, 579, 581, 583, 584, 585, 586, 587, 588, 589, 591, 594, 595, 596, 597, 598, 599 and 600.

[0489] Embodiment 28. The therapeutic composition of any of embodiments 1-16, wherein the therapeutic composition does not comprise one or more bacteria having a 16S rDNA sequence that is at least 85%, at least 90%, at least 95%, at least 96%, at least 97%, at least 98%, at least 99%, or 100% identical to a 16S rDNA sequence set forth in SEQ ID NOs: 206, 207, 208, 209, 210, 212, 215, 223, 249, 250, 251, 252, 256, 260, 261, 262, 266, 274, 275, 276, 278, 279, 280, 281, 282, 284, 285, 287, 388, 404, 405, 406, 407, 408, 416, 417, 419, 420, 422, 423, 426, 427, 446, 448, 451, 459, 461, 482, 485, 517, 518, 519, 532, 533, 534, 535, 536, 549, 556, 557, 558, 559, 562, 563, 567, 568, 569, 570, 571, 572, 575, 576, 580, 590 and 593.

[0490] Embodiment 29. The therapeutic composition of any of embodiments 1-28, further comprising at least one anticancer agent.

[0491] Embodiment 30. The therapeutic composition of embodiment 29, wherein the anticancer agent is a checkpoint inhibitor.

[0492] Embodiment 31. The therapeutic composition of embodiment 30, wherein the checkpoint inhibitor is selected from an anti-PD-1 antibody, an anti-CTLA-4 antibody, an anti-PD-L1 antibody or combinations thereof.

[0493] Embodiment 32. The therapeutic composition of embodiment 30, wherein the checkpoint inhibitor is selected from pembrolizumab, nivolumab, atezolizumab, avelumab, durvalumab, ipilimumab, pidilizumab, AMP-224, AMP-514, STI-A1110, TSR-042, RG-7446, BMS-936559, BMS-936558, MK-3475, CT O11, MPDL3280A, MEDI-4736, MSB-0020718C, AUR-012, LAG-3, OX40 inhibitors, OX40L inhibitors, TIGIT inhibitors or STI-A1010, or combinations thereof.

[0494] Embodiment 33. The therapeutic composition of embodiment 29, wherein the anticancer agent is a chemotherapy agent.

[0495] Embodiment 34. The therapeutic composition of any of embodiments 29-33, wherein the anticancer agent is a combination of a checkpoint inhibitor and a chemotherapy agent.

[0496] Embodiment 35. The therapeutic composition of any of embodiments 1-34, wherein each of the purified or isolated populations of bacteria is present in the composition at a concentration of at least about 1×10² viable colony forming units (CFU).

[0497] Embodiment 36. The therapeutic composition of any of embodiments 1-35, wherein each purified or isolated population of bacteria is present in the composition at a concentration of about 1×10² to 1×10⁹ viable CFU.

[0498] Embodiment 37. The therapeutic composition of any of embodiments 1-36, wherein a fraction of the purified or isolated population of bacteria comprises a spore-forming bacteria.

[0499] Embodiment 38. The therapeutic composition of any of embodiments 1-36, wherein a fraction of the purified or isolated population of bacteria is in spore form.

[0500] Embodiment 39. The therapeutic composition of any of embodiments 1-36, wherein a fraction of the purified or isolated population of bacteria is in vegetative form.

[0501] Embodiment 40. The therapeutic composition of any of embodiments 1-39, wherein the composition further comprises a pharmaceutically acceptable excipient.

[0502] Embodiment 41. The therapeutic composition of any of embodiments 1-40, wherein the composition is formulated for delivery to the intestine.

[0503] Embodiment 42. The therapeutic composition of any of embodiments 1-41, wherein the composition is enterically coated.

[0504] Embodiment 43. The therapeutic composition of any of embodiments 1-42, wherein the composition is formulated for oral administration.

[0505] Embodiment 44. The therapeutic composition of any of embodiments 1-39, wherein the composition is formulated into a food or beverage.

[0506] Embodiment 45. The therapeutic composition of any of embodiments 1-44, wherein the composition can reduce the rate of tumor growth in an animal model or in a mammalian subject.

[0507] Embodiment 46. The therapeutic composition of any of embodiments 1-44, wherein the composition can reduce the rate of tumor growth in an animal model or in a mammalian subject when administered concomitantly with, prior to, or subsequent to the administration of at least one anticancer agent.

[0508] Embodiment 47. The therapeutic composition of any of embodiments 1-44, wherein the composition can increase the number of active CD8 T cells in a tumor of an animal model or of a mammalian subject when administered concomitantly with, prior to, or subsequent to the administration of at least one anticancer agent.

[0509] Embodiment 48. The therapeutic composition of any one of embodiments 1-47, wherein the composition is formulated for multiple administrations.

[0510] Embodiment 49. The therapeutic composition of any one of embodiments 1-48, wherein each of the populations of bacteria is present in the composition at a concentration of at least 1×10³ viable CFU.

[0511] Embodiment 50. A method of treating or preventing or reducing risk of a cancer in a mammalian subject in need thereof comprising administering to the subject a therapeutic composition comprising an effective amount of a purified or isolated population of bacteria that have 16S rDNA sequence identity of at least 94.5% to 16S rDNA sequences of species belonging to one or more of the families Sutterellaceae, Coriobacteriaceae, Akkermansiaceae, Campylobacteraceae, or Desulfovibrionaceae.

[0512] Embodiment 51. The method of embodiment 50, wherein the bacteria have 16S rDNA sequence identity of at least 95%, 97%, 98%, 98.7% or 99% to 16S rDNA sequences of species belonging to one or more of the families Sutterellaceae, Coriobacteriaceae, Akkermansiaceae, Campylobacteraceae, or Desulfovibrionaceae.

[0513] Embodiment 52. The method of embodiment 50 or 51, wherein the therapeutic composition comprises bacteria belonging to two, three, four or more families.

[0514] Embodiment 53. A method of treating or preventing or reducing risk of a cancer in a mammalian subject in need thereof comprising administering to the subject a therapeutic composition comprising an effective amount of a purified or isolated population of bacteria comprising one or more bacteria selected from Akkermansia muciniphila, Dysosmobacter welbionis, Anaerobutyricum hallii, Blautia caecimuris, Holdemania filiformis, Acetatifactor sp1, Ruminococcaceae NG14 sp1, Hungatella sp2, Bifidobacterium catenulatum group, Blautia wexlerae, Hungatella sp1, Intestinibacter bartlettii, Lachnospiraceae NG31 sp1, Lactonifactor longoviformis, Leuconostoc gelidum, Sutterella wadsworthensis, [Extibacter] muris, Alistipes onderdonkii, Collinsella intestinalis, Collinsella stercoris, Muricomes sp1, Neobitarella massiliensis, Prevotellamassilia sp2, Ruminococcaceae NG33 sp1, [Adlercreutzia] equolifaciens group, [Anaerotruncus] rubiinfantis, [Romboutsia] timonensis, Alistipes finegoldii, Alistipes indistinctus, Alistipes obesi, Alistipes putredinis, Alistipes shahii, Anaerofustis stercorihominis, Anaeromassilibacillus sp3, Barnesiella intestinihominis, Bilophila wadsworthia, Blautia faecis, Coriobacteriaceae NG5 sp1, Frisingicoccus sp3, Gordonibacter pamelaeae, Harryflintia acetispora, Lachnospiraceae NG29 sp1, Marvinbryantia sp8, Massilimaliae massiliensis, Massilimaliae timonensis, Neglecta timonensis, Parabacteroides merdae, Peptoniphilaceae NG4 sp1, Peptoniphilaceae NG4 sp3, Pseudoflavonifractor capillosus, Ruminococcaceae NG12 sp1, Ruminococcaceae NG15 sp3, Ruminococcaceae NG17 sp3, Ruthenibacterium sp1, or bacteria having 16S rDNA having at least 94.5%, 95%, 97%, 98%, 98.7% or 99% sequence identity to any one of the 16S rDNA thereof.

[0515] Embodiment 54. The method of embodiment 53, wherein the bacteria comprises one or more bacteria selected from Akkermansia muciniphila, Dysosmobacter welbionis, Anaerobutyricum hallii, Blautia caecimuris, Holdemania filiformis, or bacteria having 16S rDNA having at least 94.5%, 95%, 97%, 98%, 98.7% or 99% sequence identity to any one of the 16S rDNA thereof.

[0516] Embodiment 55. The method of embodiment 53, wherein the bacteria comprises one or more bacteria selected from Acetatifactor sp1, Blautia wexlerae, Ruminococcaceae NG14 sp1, Hungatella sp2, Holdemania filiformis, or bacteria having 16S rDNA having at least 94.5%, 95%, 97%, 98%, 98.7% or 99% sequence identity to any one of the 16S rDNA thereof.

[0517] Embodiment 56. The method of embodiment 53, wherein the bacteria comprises one or more bacteria selected from Bifidobacterium catenulatum group, Blautia wexlerae, Hungatella sp1, Intestinibacter bartlettii, Lachnospiraceae NG31 sp1, Lactonifactor longoviformis, Leuconostoc gelidum, Sutterella wadsworthensis, or bacteria having 16S rDNA having at least 94.5%, 95%, 97%, 98%, 98.7% or 99% sequence identity to any one of the 16S rDNA thereof.

[0518] Embodiment 57. The method of embodiment 56, wherein the cancer is a bladder cancer.

[0519] Embodiment 58. The method of embodiment 53, wherein the bacteria comprises one or more bacteria selected from [Extibacter] muris, Alistipes onderdonkii, Collinsella intestinalis, Collinsella stercoris, Muricomes sp1, Neobitarella massiliensis, Prevotellamassilia sp2, Ruminococcaceae NG33 sp1, or bacteria having 16S rDNA having at least 94.5%, 95%, 97%, 98%, 98.7% or 99% sequence identity to any one of the 16S rDNA thereof.

[0520] Embodiment 59. The method of embodiment 58, wherein the cancer is a non-small cell lung cancer.

[0521] Embodiment 60. The method of embodiment 53, wherein the bacteria comprises one or more bacteria selected from [Adlercreutzia] equolifaciens group, [Anaerotruncus]rubiinfantis, [Romboutsia] timonensis, Alistipes finegoldii, Alistipes indistinctus, Alistipes obesi, Alistipes putredinis, Alistipes shahii, Anaerofustis stercorihominis, Anaeromassilibacillus sp3, Barnesiella intestinihominis, Bilophila wadsworthia, Blautia faecis, Coriobacteriaceae NG5 sp1, Frisingicoccus sp3, Gordonibacter pamelaeae, Harryflintia acetispora, Lachnospiraceae NG29 sp1, Marvinbryantia sp8, Massilimaliae massiliensis, Massilimaliae timonensis, Neglecta timonensis, Parabacteroides merdae, Peptoniphilaceae NG4 sp1, Peptoniphilaceae NG4 sp3, Pseudoflavonifractor capillosus, Ruminococcaceae NG12 sp1, Ruminococcaceae NG15 sp3, Ruminococcaceae NG17 sp3, Ruthenibacterium sp1, or bacteria having 16S rDNA having at least 94.5%, 95%, 97%, 98%, 98.7% or 99% sequence identity to any one of the 16S rDNA thereof.

[0522] Embodiment 61. The method of embodiment 60, wherein the cancer is a metastatic melanoma.

[0523] Embodiment 62. A method of treating or preventing or reducing risk of a cancer in a mammalian subject in need thereof comprising administering to the subject a therapeutic composition comprising an effective amount of a purified or isolated population of bacteria comprising one or more bacteria having a 16S rDNA sequence that is at least 85%, at least 90%, at least 95%, at least 96%, at least 97%, at least 98%, at least 99%, or 100% identical to a 16S rDNA sequence set forth in SEQ ID NOs: 1, 2, 3, 4, 5, 6, 7, 8, 9, 10, 11, 12, 13, 14, 15, 16, 17, 18, 19, 20, 21, 22, 23, 24, 25, 26, 27, 28, 29, 30, 31, 32, 33, 34, 35, 36, 37, 38, 39, 40, 41, 42, 43, 44, 45, 46, 47, 48, 49, 50, 51, 52, 53, 54, 55, 56, 57, 58, 59, 60, 61, 62, 63, 64, 65, 66, 67, 68, 69, 70, 71, 72, 73, 74, 75, 76, 77, 78, 79, 80, 81, 82, 83, 84, 85, 86, 87, 88, 89, 90, 91, 92, 93, 94, 95, 96, 97, 98, 99, 100, 101, 102, 103, 104, 105, 106, 107, 108, 109, 110, 111, 112, 113, 114, 115, 116, 117, 118, 119, 120, 121, 122, 123, 124, 125, 126, 127, 128, 129, 130, 131, 132, 133, 134, 135, 136, 137, 138, 139, 140, 141, 142, 143, 144, 145, 146, 147, 148, 149, 150, 151, 152, 153, 154, 155, 156, 157, 158, 159, 160, 161, 162, 163, 164, 165, 166, 167, 168, 169, 170, 171, 172, 173, 174, 175, 176, 177, 178, 179, 180, 181, 182, 183, 184, 185, 186, 601, 602, 603, 604, 605, 606, 607, 613, 614, 615, 616, 617, 618, 619, 622, 623, 640, 641, 643, 662, 663, 664, 665, 666, 667, 675, 676, 681, 688, 690, 691, 693, 696, 697, 699, 700, 702, 703, 704, 705, 706, 707, 708, 709, 710, 711, 712, 713, 714, 715, 716, 717, 718, 719, 720, 721, 722, 723, 724, 725, 726, 727, 728, 729, 730, 732, 733, 734, 735, 736, 737, 738, 739, 740, 741, 742, 743, 744, 746, 747, 748, 749, 750, 751, 752, 753, 754, 755, 756, 757, 758, 759, 760, 761, 762, 763, 765, 766, 767, 768, 769, 770, 771, 772 and 773.

[0524] Embodiment 63. The method of embodiment 62, wherein the bacteria comprises one or more bacteria having a 16S rDNA sequence that is at least 85%, at least 90%, at least 95%, at least 96%, at least 97%, at least 98%, at least 99%, or 100% identical to a 16S rDNA sequence set forth in SEQ ID NOs: 605, 613, 640, 641, 643, 662, 663, 664, 665, 666, 667, 681, 688, 690, 703, 732, 733, 736, 737, 738, 739, 740, 741, 742, 743, 744, 749, 754, 755, 756, 758, 765, 766, 767 and 773.

[0525] Embodiment 64. The method of embodiment 62, wherein the bacteria comprises one or more bacteria having a 16S rDNA sequence that is at least 85%, at least 90%, at least 95%, at least 96%, at least 97%, at least 98%, at least 99%, or 100% identical to a 16S rDNA sequence set forth in SEQ ID NOs: 601, 602, 603, 604, 606, 607, 613, 614, 615, 616, 617, 618, 619, 622, 623, 675, 676, 681, 691, 693, 696, 697, 699, 700, 702, 704, 705, 706, 707, 708, 709, 710, 711, 712, 713, 714, 715, 716, 717, 718, 719, 720, 721, 722, 723, 724, 725, 726, 727, 728, 729, 730, 734, 735, 736, 746, 747, 748, 749, 750, 751, 752, 753, 757, 759, 760, 761, 762, 763, 768, 769, 770, 771 and 772.

[0526] Embodiment 65. The method of embodiment 62, wherein the bacteria comprises one or more bacteria having a 16S rDNA sequence that is at least 85%, at least 90%, at least 95%, at least 96%, at least 97%, at least 98%, at least 99%, or 100% identical to a 16S rDNA sequence set forth in SEQ ID NOs: 2, 3, 6, 10, 12, 13, 19, 20, 21, 22, 23, 24, 34, 37, 38, 39, 42, 43, 44, 45, 46, 47, 48, 50, 51, 52, 55, 57, 58, 59, 64, 65, 66, 67, 73, 74, 75, 80, 82, 83, 84, 85, 86, 87, 88, 89, 90, 91, 92, 93, 94, 95, 96, 97, 98, 99, 100, 101, 104, 105, 106, 107, 108, 109, 110, 111, 112, 114, 115, 116, 120, 123, 129, 135, 136, 138, 139, 140, 141, 142, 143, 145, 146, 148, 153, 156, 157, 158, 161, 168, 169, 170, 173, 176, 178, 180 and 182.

[0527] Embodiment 66. The method of embodiment 65, wherein the cancer is a bladder cancer.

[0528] Embodiment 67. The method of embodiment 62, wherein the bacteria comprises one or more bacteria having a 16S rDNA sequence that is at least 85%, at least 90%, at least 95%, at least 96%, at least 97%, at least 98%, at least 99%, or 100% identical to a 16S rDNA sequence set forth in SEQ ID NOs: 16, 17, 18, 53, 54, 60, 77, 79, 81, 103, 119, 125, 132, 133, 134, 164, 175, 179 and 184.

[0529] Embodiment 68. The method of embodiment 67, wherein the cancer is a non-small cell lung cancer.

[0530] Embodiment 69. The method of embodiment 62, wherein the bacteria comprises one or more bacteria having a 16S rDNA sequence that is at least 85%, at least 90%, at least 95%, at least 96%, at least 97%, at least 98%, at least 99%, or 100% identical to a 16S rDNA sequence set forth in SEQ ID NOs: 1, 4, 5, 7, 8, 9, 11, 14, 15, 25, 26, 27, 28, 29, 30, 31, 32, 33, 35, 36, 40, 41, 61, 62, 68, 69, 70, 71, 72, 76, 78, 117, 118, 121, 122, 124, 127, 128, 130, 131, 137, 144, 147, 149, 150, 151, 152, 154, 155, 159, 160, 162, 163, 165, 166, 167, 171, 174, 177, 181, 183 and 186.

[0531] Embodiment 70. The method of embodiment 69, wherein the cancer is a metastatic melanoma.

[0532] Embodiment 71. The method of any of embodiment 53-70, wherein the therapeutic composition comprises bacteria two, three, four, five, six, seven, eight, nine, ten, eleven, twelve, thirteen, fourteen, fifteen, sixteen, seventeen, eighteen or more bacterial species.

[0533] Embodiment 72. The method of any of embodiment 50-71, wherein the therapeutic composition does not comprise one or more bacteria selected from Holdemania massiliensis, Rothia mucilaginosa, Hungatella sp2, Prevotella copri, Campylobacter concisus, [Atopobium] parvulum, Alistipes onderdonkii, Angelakisella massiliensis, Christensenellaceae NG5 sp2, Cuneatibacter caecimuris, Desulfovibrio fairfieldensis, Ruminococcaceae NG13 sp1, Ruminococcaceae NG16 sp1, [Coprococcus] catus, [Lactobacillus] fermentum, [Romboutsia] timonensis, [Ruminococcus] bromii, [Ruminococcus] gauvreauii, Actinomyces graevenitzii, Agathobaculum butyriciproducens group, Bacteroides caccae, Bacteroides intestinalis, Bittarella massiliensis, Blautia luti group, Clostridium saudiense, Corynebacterium durum, Fusicatenibacter sp2, Lachnospiraceae NG30 sp3, Massilimaliae sp1, Monoglobus pectinilyticus, Rothia dentocariosa, Rothia mucilaginosa, Ruminococcaceae NG17 sp1, Schaalia odontolytica, Streptococcus australis, Streptococcus gordonii, Streptococcus infantis group, Streptococcus parasanguinis, Streptococcus salivarius group, [Atopobium] parvulum, [Ruminococcus] gnavus, Bacteroides dorei group, Blautia sp1, Schaalia sp2, or bacteria having 16S rDNA having at least 94.5%, 95%, 97%, 98%, 98.7% or 99% sequence identity to any one of the 16S rDNA thereof.

[0534] Embodiment 73. The method of any of embodiment 50-71, wherein the therapeutic composition does not comprise Holdemania massiliensis, Rothia mucilaginosa, Hungatella sp2, Prevotella copri, Campylobacter concisus, or bacteria having 16S rDNA having at least 94.5%, 95%, 97%, 98%, 98.7% or 99% sequence identity to any one of the 16S rDNA thereof.

[0535] Embodiment 74. The method of any of embodiment 50-71, wherein the therapeutic composition does not comprise Rothia mucilaginosa, [Atopobium] parvulum, Holdemania massiliensis, Prevotella copri, Campylobacter concisus, or bacteria having 16S rDNA having at least 94.5%, 95%, 97%, 98%, 98.7% or 99% sequence identity to any one of the 16S rDNA thereof.

[0536] Embodiment 75. The method of any of embodiment 50-71, wherein the therapeutic composition does not comprise Alistipes onderdonkii, Angelakisella massiliensis, Christensenellaceae NG5 sp2, Cuneatibacter caecimuris, Desulfovibrio fairfieldensis, Ruminococcaceae NG13 sp1, Ruminococcaceae NG16 sp1, or bacteria having 16S rDNA having at least 94.5%, 95%, 97%, 98%, 98.7% or 99% sequence identity to any one of the 16S rDNA thereof.

[0537] Embodiment 76. The method of embodiment 75, wherein the cancer is a bladder cancer.

[0538] Embodiment 77. The method of any of embodiments 50-71, wherein the therapeutic composition does not comprise [Coprococcus] catus, [Lactobacillus] fermentum, [Romboutsia] timonensis, [Ruminococcus] bromii, [Ruminococcus] gauvreauii, Actinomyces graevenitzii, Agathobaculum butyriciproducens group, Bacteroides caccae, Bacteroides intestinalis, Bittarella massiliensis, Blautia luti group, Clostridium saudiense, Corynebacterium durum, Fusicatenibacter sp2, Lachnospiraceae NG30 sp3, Massilimaliae sp1, Monoglobus pectinilyticus, Rothia dentocariosa, Rothia mucilaginosa, Ruminococcaceae NG17 sp1, Schaalia odontolytica, Streptococcus australis, Streptococcus gordonii, Streptococcus infantis group, Streptococcus parasanguinis, Streptococcus salivarius group, or bacteria having 16S rDNA having at least 94.5%, 95%, 97%, 98%, 98.7% or 99% sequence identity to any one of the 16S rDNA thereof.

[0539] Embodiment 78. The method of embodiment 77, wherein the cancer is a non-small cell lung cancer.

[0540] Embodiment 79. The method of any of embodiments 50-71, wherein the therapeutic composition does not comprise [Atopobium] parvulum, [Ruminococcus] gnavus, Bacteroides dorei group, Blautia sp1, Schaalia sp2, or bacteria having 16S rDNA having at least 94.5%, 95%, 97%, 98%, 98.7% or 99% sequence identity to any one of the 16S rDNA thereof.

[0541] Embodiment 80. The method of embodiment 79, wherein the cancer is a metastatic melanoma.

[0542] Embodiment 81. The method of any of embodiment 50-71, wherein the therapeutic composition does not comprise one or more bacteria having a 16S rDNA sequence that is at least 85%, at least 90%, at least 95%, at least 96%, at least 97%, at least 98%, at least 99%, or 100% identical to a 16S rDNA sequence set forth in SEQ ID NOs: 187, 188, 189, 190, 191, 192, 193, 194, 195, 196, 197, 198, 199, 200, 201, 202, 203, 204, 205, 206, 207, 208, 209, 210, 211, 212, 213, 214, 215, 216, 217, 218, 219, 220, 221, 222, 223, 224, 225, 226, 227, 228, 229, 230, 231, 232, 233, 234, 235, 236, 237, 238, 239, 240, 241, 242, 243, 244, 245, 246, 247, 248, 249, 250, 251, 252, 253, 254, 255, 256, 257, 258, 259, 260, 261, 262, 263, 264, 265, 266, 267, 268, 269, 270, 271, 272, 273, 274, 275, 276, 277, 278, 279, 280, 281, 282, 283, 284, 285, 286, 287, 288, 289, 290, 291, 292, 293, 294, 295, 296, 297, 298, 299, 300, 301, 302, 303, 304, 305, 306, 307, 308, 309, 310, 311, 312, 313, 314, 315, 316, 317, 318, 319, 320, 321, 322, 323, 324, 325, 326, 327, 328, 329, 330, 331, 332, 333, 334, 335, 336, 337, 338, 339, 340, 341, 342, 343, 344, 345, 346, 347, 348, 349, 350, 351, 352, 353, 354, 355, 356, 357, 358, 359, 360, 361, 362, 363, 364, 365, 366, 367, 368, 369, 370, 371, 372, 373, 374, 375, 376, 377, 378, 379, 380, 381, 382, 383, 384, 385, 386, 387, 388, 389, 390, 391, 392, 393, 394, 395, 396, 397, 398, 399, 400, 401, 402, 403, 404, 405, 406, 407, 408, 409, 410, 411, 412, 413, 414, 415, 416, 417, 418, 419, 420, 421, 422, 423, 424, 425, 426, 427, 428, 429, 430, 431, 432, 433, 434, 435, 436, 437, 438, 439, 440, 441, 442, 443, 444, 445, 446, 447, 448, 449, 450, 451, 452, 453, 454, 455, 456, 457, 458, 459, 460, 461, 462, 463, 464, 465, 466, 467, 468, 469, 470, 471, 472, 473, 474, 475, 476, 477, 478, 479, 480, 481, 482, 483, 484, 485, 486, 487, 488, 489, 490, 491, 492, 493, 494, 495, 496, 497, 498, 499, 500, 501, 502, 503, 504, 505, 506, 507, 508, 509, 510, 511, 512, 513, 514, 515, 516, 517, 518, 519, 520, 521, 522, 523, 524, 525, 526, 527, 528, 529, 530, 531, 532, 533, 534, 535, 536, 537, 538, 539, 540, 541, 542, 543, 544, 545, 546, 547, 548, 549, 550, 551, 552, 553, 554, 555, 556, 557, 558, 559, 560, 561, 562, 563, 564, 565, 566, 567, 568, 569, 570, 571, 572, 573, 574, 575, 576, 577, 578, 579, 580, 581, 582, 583, 584, 585, 586, 587, 588, 589, 590, 591, 592, 593, 594, 595, 596, 597, 598, 599, 600, 608, 609, 610, 611, 612, 620, 621, 622, 623, 624, 625, 626, 627, 628, 629, 630, 631, 632, 633, 634, 635, 636, 637, 638, 639, 642, 644, 645, 646, 647, 648, 649, 650, 651, 652, 653, 654, 655, 656, 657, 658, 659, 660, 661, 668, 669, 670, 671, 672, 673, 674, 677, 678, 679, 680, 682, 683, 684, 685, 686, 687, 689, 692, 694, 695, 698, 701, 731, 734 and 764.

[0543] Embodiment 82. The method of any of embodiment 50-71, wherein the therapeutic composition does not comprise one or more bacteria having a 16S rDNA sequence that is at least 85%, at least 90%, at least 95%, at least 96%, at least 97%, at least 98%, at least 99%, or 100% identical to a 16S rDNA sequence set forth in SEQ ID NOs: 608, 610, 611, 612, 620, 621, 622, 623, 624, 625, 626, 630, 631, 632, 633, 634, 635, 636, 637, 638, 639, 642, 644, 645, 646, 647, 648, 649, 650, 651, 652, 653, 654, 655, 656, 657, 658, 659, 660, 661, 668, 669, 670, 671, 672, 673, 674, 677, 678, 679, 680, 682, 683, 684, 685, 686, 687, 689, 692, 694, 695, 698, 701, 731, 734 and 764.

[0544] Embodiment 83. The method of any of embodiment 50-71, wherein the therapeutic composition does not comprise one or more bacteria having a 16S rDNA sequence that is at least 85%, at least 90%, at least 95%, at least 96%, at least 97%, at least 98%, at least 99%, or 100% identical to a 16S rDNA sequence set forth in SEQ ID NOs: 608, 609, 610, 611, 612, 620, 621, 624, 625, 626, 627, 628, 629, 630, 631, 632, 633, 634, 635, 636, 637, 638, 639, 642, 644, 645, 646, 647, 648, 649, 650, 651, 652, 653, 654, 655, 656, 657, 658, 659, 660, 661, 668, 669, 670, 671, 672, 673, 674, 677, 678, 679, 680, 682, 683, 684, 685, 686, 687, 689, 692, 694, 695, 698, 701, 731 and 764.

[0545] Embodiment 84. The method of any of embodiment 50-71, wherein the therapeutic composition does not comprise one or more bacteria having a 16S rDNA sequence that is at least 85%, at least 90%, at least 95%, at least 96%, at least 97%, at least 98%, at least 99%, or 100% identical to a 16S rDNA sequence set forth in SEQ ID NOs: 188, 213, 245, 323, 331, 332, 376, 455, 509, 516, 538 and 582.

[0546] Embodiment 85. The method of embodiment 84, wherein the cancer is a bladder cancer.

[0547] Embodiment 86. The method of any of embodiment 50-71, wherein the therapeutic composition does not comprise one or more bacteria having a 16S rDNA sequence that is at least 85%, at least 90%, at least 95%, at least 96%, at least 97%, at least 98%, at least 99%, or 100% identical to a 16S rDNA sequence set forth in SEQ ID NOs: 187, 189, 190, 191, 192, 193, 194, 195, 196, 197, 198, 199, 200, 201, 202, 203, 204, 205, 211, 214, 216, 217, 218, 219, 220, 221, 222, 224, 225, 226, 227, 228, 229, 230, 231, 232, 233, 234, 235, 236, 237, 238, 239, 240, 241, 242, 243, 244, 246, 247, 248, 253, 254, 255, 257, 258, 259, 263, 264, 265, 267, 268, 269, 270, 271, 272, 273, 277, 283, 286, 289, 290, 291, 292, 293, 294, 295, 296, 297, 298, 299, 300, 301, 302, 303, 304, 305, 306, 307, 308, 309, 310, 311, 312, 313, 314, 315, 316, 317, 318, 319, 320, 321, 322, 324, 325, 326, 327, 328, 329, 330, 333, 334, 335, 336, 337, 338, 339, 340, 341, 342, 343, 344, 345, 346, 347, 348, 349, 350, 351, 352, 353, 354, 355, 356, 357, 358, 359, 360, 361, 362, 363, 364, 365, 366, 367, 368, 369, 370, 371, 372, 373, 374, 375, 377, 378, 379, 380, 381, 382, 383, 384, 385, 386, 387, 389, 390, 391, 392, 393, 394, 395, 396, 397, 398, 399, 400, 401, 402, 403, 409, 410, 411, 412, 413, 414, 415, 418, 421, 424, 425, 428, 429, 430, 431, 432, 433, 434, 435, 436, 437, 438, 439, 440, 441, 442, 443, 444, 445, 447, 449, 450, 452, 453, 454, 456, 457, 458, 460, 462, 463, 464, 465, 466, 467, 468, 469, 471, 472, 473, 474, 475, 476, 478, 479, 480, 481, 483, 484, 486, 487, 488, 489, 490, 491, 492, 493, 494, 495, 496, 497, 498, 499, 500, 501, 502, 503, 504, 505, 506, 507, 508, 510, 511, 512, 513, 514, 515, 520, 521, 522, 523, 524, 525, 526, 527, 528, 529, 530, 531, 537, 539, 540, 542, 543, 544, 545, 546, 547, 548, 550, 551, 552, 553, 554, 555, 560, 561, 564, 565, 566, 573, 574, 577, 579, 581, 583, 584, 585, 586, 587, 588, 589, 591, 594, 595, 596, 597, 598, 599 and 600.

[0548] Embodiment 87. The method of embodiment 86, wherein the cancer is non-small cell lung cancer.

[0549] Embodiment 88. The method of any of embodiment 50-71, wherein the therapeutic composition does not comprise one or more bacteria having a 16S rDNA sequence that is at least 85%, at least 90%, at least 95%, at least 96%, at least 97%, at least 98%, at least 99%, or 100% identical to a 16S rDNA sequence set forth in SEQ ID NOs: 206, 207, 208, 209, 210, 212, 215, 223, 249, 250, 251, 252, 256, 260, 261, 262, 266, 274, 275, 276, 278, 279, 280, 281, 282, 284, 285, 287, 388, 404, 405, 406, 407, 408, 416, 417, 419, 420, 422, 423, 426, 427, 446, 448, 451, 459, 461, 482, 485, 517, 518, 519, 532, 533, 534, 535, 536, 549, 556, 557, 558, 559, 562, 563, 567, 568, 569, 570, 571, 572, 575, 576, 580, 590 and 593.

[0550] Embodiment 89. The method of embodiment 88, wherein the cancer is metastatic melanoma.

[0551] Embodiment 90. The method of any one of embodiments 50-89, further comprising administering at least one anticancer agent to the subject.

[0552] Embodiment 91. The method of embodiment 90, wherein the anticancer agent is a checkpoint inhibitor.

[0553] Embodiment 92. The method of embodiment 91, wherein the checkpoint inhibitor is selected from an anti-PD-1 antibody, an anti-CTLA-4 antibody, an anti-PD-L1 antibody or combinations thereof.

[0554] Embodiment 93. The method of embodiment 91, wherein the checkpoint inhibitor is selected from pembrolizumab, nivolumab, atezolizumab, avelumab, durvalumab, ipilimumab, pidilizumab, AMP-224, AMP-514, STI-A1110, TSR-042, RG-7446, BMS-936559, BMS-936558, MK-3475, CT O11, MPDL3280A, MEDI-4736, MSB-0020718C, AUR-012, LAG-3, OX40 inhibitors, OX40L inhibitors, TIGIT inhibitors, STI-A1010 or combinations thereof.

[0555] Embodiment 94. The method of embodiment 90, wherein the anticancer agent comprises a chemotherapy agent.

[0556] Embodiment 95. The method of any of embodiments 90-94, wherein the anticancer agent is a combination of a checkpoint inhibitor and a chemotherapy agent.

[0557] Embodiment 96. The method of any of embodiments 50-95, wherein the purified or isolated population of bacteria is administered at a concentration of at least about 1×10² viable colony forming units.

[0558] Embodiment 97. The method of any of embodiments 50-96, wherein the purified or isolated population of bacteria is administered at a concentration of at a concentration of about 1×10² to 1×10⁹ viable colony forming units.

[0559] Embodiment 98. The method of any of embodiments 50-97, wherein a fraction of the purified or isolated population of bacteria comprises a spore-forming bacteria.

[0560] Embodiment 99. The method of any of embodiments 50-97, wherein a fraction of the purified or isolated population of bacteria is in spore form.

[0561] Embodiment 100. The method of any of embodiments 50-97, wherein a fraction of the purified or isolated population of bacteria is in vegetative form.

[0562] Embodiment 101. The method of any of embodiments 50-100, wherein the composition further comprises a pharmaceutically acceptable excipient.

[0563] Embodiment 102. The method of any of embodiments 50-101, wherein the composition is formulated for delivery to the intestine.

[0564] Embodiment 103. The method of any of embodiments 50-102, wherein the composition is enterically coated.

[0565] Embodiment 104. The method of any of embodiments 50-103, wherein the composition is formulated for oral administration.

[0566] Embodiment 105. The method of any of embodiments 50-104, wherein the composition is formulated into a food or beverage.

[0567] Embodiment 106. The method of any of embodiments 50-105, wherein the mammalian subject is a human.

[0568] Embodiment 107. The method of any of embodiments 50-106, wherein the cancer is selected from a metastatic melanoma, melanoma of the skin, non-small cell lung cancer, a kidney cancer, a bladder cancer, a head and neck cancer, a Merkel cell skin cancer (Merkel cell carcinoma), or a Hodgkin lymphoma.

[0569] Embodiment 108. The method of embodiment 107, wherein the cancer is a metastatic melanoma.

[0570] Embodiment 109. The method of embodiment 107, wherein the cancer is a non-small cell lung cancer.

[0571] Embodiment 110. The method of embodiment 107, wherein the cancer is a bladder cancer.

[0572] Embodiment 111. The method of any of embodiments 50-110, wherein prior to administration of the population of bacteria the subject is subjected to antibiotic treatment and/or a bowel cleanse.

[0573] Embodiment 112. The method of any one of embodiments 50-111, wherein the subject has previously been treated for the cancer.

[0574] Embodiment 113. The method of embodiment 112, wherein the subject has been determined to be a non-responder to the previous treatment.

[0575] Embodiment 114. The method of embodiment 112 or 113, wherein the subject has been determined to have a toxic response to the previous treatment.

[0576] Embodiment 115. The method of any one of embodiments 112-114, wherein the previous treatment comprises immune checkpoint blockade monotherapy or immune checkpoint blockade combination therapy.

[0577] Embodiment 116. The method of any one of embodiments 50-115, wherein the cancer is recurrent cancer.

[0578] Embodiment 117. A method of identifying a mammalian subject as a candidate for immune checkpoint therapy in combination with adjuvant microbiome therapy to treat a cancer, the method comprising:
[0579] a) obtaining a microbiome sample from the subject,
[0580] b) determining the prevalence and/or abundance of the family of bacteria in the microbiome sample, and
[0581] c) determining that the subject is a candidate for treatment if the microbiome sample comprises bacteria that have 16S rDNA sequence identity of at least 94.5% to 16S rDNA sequences of species belonging to one or more of the families Sutterellaceae, Coriobacteriaceae, Akkermansiaceae, Campylobacteraceae, or Desulfovibrionaceae.

[0582] Embodiment 118. The method of embodiment 117, wherein the bacteria have 16S rDNA sequence identity of at least 95%, 97%, 98%, 98.7% or 99% to 16S rDNA sequences of species belonging to one or more of the families Sutterellaceae, Coriobacteriaceae, Akkermansiaceae, Campylobacteraceae, or Desulfovibrionaceae.

[0583] Embodiment 119. A method of identifying a mammalian subject as a candidate for immune checkpoint therapy in combination with adjuvant microbiome therapy to treat a cancer, the method comprising:
[0584] a) obtaining a microbiome sample from the subject,
[0585] b) determining the prevalence and/or abundance of the family of bacteria in the microbiome sample, and
[0586] c) determining that the subject is a candidate for treatment if the microbiome sample comprises bacteria comprising one or more bacteria selected from Akkermansia muciniphila, Dysosmobacter welbionis, Anaerobutyricum hallii, Blautia caecimuris, Holdemania filiformis, Acetatifactor sp1, Ruminococcaceae NG14 sp1, Hungatella sp2, Bifidobacterium catenulatum group, Blautia wexlerae, Hungatella sp1, Intestinibacter bartlettii, Lachnospiraceae NG31 sp1, Lactonifactor longoviformis, Leuconostoc gelidum, Sutterella wadsworthensis, [Extibacter] muris, Alistipes onderdonkii, Collinsella intestinalis, Collinsella stercoris, Muricomes sp1, Neobitarella massiliensis, Prevotellamassilia sp2, Ruminococcaceae NG33 sp1, [Adlercreutzia] equolifaciens group, [Anaerotruncus] rubiinfantis, [Romboutsia] timonensis, Alistipes finegoldii, Alistipes indistinctus, Alistipes obesi, Alistipes putredinis, Alistipes shahii, Anaerofustis stercorihominis, Anaeromassilibacillus sp3, Barnesiella intestinihominis, Bilophila wadsworthia, Blautia faecis, Coriobacteriaceae NG5 sp1, Frisingicoccus sp3, Gordonibacter pamelaeae, Harryflintia acetispora, Lachnospiraceae NG29 sp1, Marvinbryantia sp8, Massilimaliae massiliensis, Massilimaliae timonensis, Neglecta timonensis, Parabacteroides merdae, Peptoniphilaceae NG4 sp1, Peptoniphilaceae NG4 sp3, Pseudoflavonifractor capillosus, Ruminococcaceae NG12 sp1, Ruminococcaceae NG15 sp3, Ruminococcaceae NG17 sp3, Ruthenibacterium sp1, or bacteria having 16S rDNA having at least 94.5%, 95%, 97%, 98%, 98.7% or 99% sequence identity to any one of the 16S rDNA thereof.

[0587] Embodiment 120. The method of embodiment 119, wherein the bacteria comprises one or more bacteria selected from Akkermansia muciniphila, Dysosmobacter welbionis, Anaerobutyricum hallii, Blautia caecimuris, Holdemania filiformis, or bacteria having 16S rDNA having at least 94.5%, 95%, 97%, 98%, 98.7% or 99% sequence identity to any one of the 16S rDNA thereof.

[0588] Embodiment 121. The method of embodiment 119, wherein the bacteria comprises one or more bacteria selected from Acetatifactor sp1, Blautia wexlerae, Ruminococcaceae NG14 sp1, Hungatella sp2, Holdemania filiformis, or bacteria having 16S rDNA having at least 94.5%, 95%, 97%, 98%, 98.7% or 99% sequence identity to any one of the 16S rDNA thereof.

[0589] Embodiment 122. The method of embodiment 119, wherein the bacteria comprises one or more bacteria selected from Bifidobacterium catenulatum group, Blautia wexlerae, Hungatella sp1, Intestinibacter bartlettii, Lachnospiraceae NG31 sp1, Lactonifactor longoviformis, Leuconostoc gelidum, Sutterella wadsworthensis, or bacteria having 16S rDNA having at least 94.5%, 95%, 97%, 98%, 98.7% or 99% sequence identity to any one of the 16S rDNA thereof.

[0590] Embodiment 123. The method of embodiment 122, wherein the cancer is a bladder cancer.

[0591] Embodiment 124. The method of embodiment 119, wherein the bacteria comprises one or more bacteria selected from [Extibacter] muris, Alistipes onderdonkii, Collinsella intestinalis, Collinsella stercoris, Muricomes sp1, Neobitarella massiliensis, Prevotellamassilia sp2, Ruminococcaceae NG33 sp1, or bacteria having 16S rDNA having at least 94.5%, 95%, 97%, 98%, 98.7% or 99% sequence identity to any one of the 16S rDNA thereof.

[0592] Embodiment 125. The method of embodiment 124, wherein the cancer is a non-small cell lung cancer.

[0593] Embodiment 126. The method of embodiment 119, wherein the bacteria comprises one or more bacteria selected from [Adlercreutzia] equolifaciens group, [Anaerotruncus] rubiinfantis, [Romboutsia] timonensis, Alistipes finegoldii, Alistipes indistinctus, Alistipes obesi, Alistipes putredinis, Alistipes shahii, Anaerofustis stercorihominis, Anaeromassilibacillus sp3, Barnesiella intestinihominis, Bilophila wadsworthia, Blautia faecis, Coriobacteriaceae NG5 sp1, Frisingicoccus sp3, Gordonibacter pamelaeae, Harryflintia acetispora, Lachnospiraceae NG29 sp1, Marvinbryantia sp8, Massilimaliae massiliensis, Massilimaliae timonensis, Neglecta timonensis, Parabacteroides merdae, Peptoniphilaceae NG4 sp1, Peptoniphilaceae NG4 sp3, Pseudoflavonifractor capillosus, Ruminococcaceae NG12 sp1, Ruminococcaceae NG15 sp3, Ruminococcaceae NG17 sp3, Ruthenibacterium sp1, or bacteria having 16S rDNA having at least 94.5%, 95%, 97%, 98%, 98.7% or 99% sequence identity to any one of the 16S rDNA thereof.

[0594] Embodiment 127. The method of embodiment 126, wherein the cancer is a metastatic melanoma.

[0595] Embodiment 128. A method of identifying a mammalian subject as a candidate for immune checkpoint therapy in combination with adjuvant microbiome therapy to treat a cancer, the method comprising:
[0596] a) obtaining a microbiome sample from the subject,
[0597] b) determining the prevalence and/or abundance of the family of bacteria in the microbiome sample, and
[0598] c) determining that the subject is a candidate for treatment if the microbiome sample comprises bacteria comprising one or more bacteria having a 16S rDNA sequence that is at least 85%, at least 90%, at least 95%, at least 96%, at least 97%, at least 98%, at least 99%, or 100% identical to a 16S rDNA sequence set forth in SEQ ID NOs: 1, 2, 3, 4, 5, 6, 7, 8, 9, 10, 11, 12, 13, 14, 15, 16, 17, 18, 19, 20, 21, 22, 23, 24, 25, 26, 27, 28, 29, 30, 31, 32, 33, 34, 35, 36, 37, 38, 39, 40, 41, 42, 43, 44, 45, 46, 47, 48, 49, 50, 51, 52, 53, 54, 55, 56, 57, 58, 59, 60, 61, 62, 63, 64, 65, 66, 67, 68, 69, 70, 71, 72, 73, 74, 75, 76, 77, 78, 79, 80, 81, 82, 83, 84, 85, 86, 87, 88, 89, 90, 91, 92, 93, 94, 95, 96, 97, 98, 99, 100, 101, 102, 103, 104, 105, 106, 107, 108, 109, 110, 111, 112, 113, 114, 115, 116, 117, 118, 119, 120, 121, 122, 123, 124, 125, 126, 127, 128, 129, 130, 131, 132, 133, 134, 135, 136, 137, 138, 139, 140, 141, 142, 143, 144, 145, 146, 147, 148, 149, 150, 151, 152, 153, 154, 155, 156, 157, 158, 159, 160, 161, 162, 163, 164, 165, 166, 167, 168, 169, 170, 171, 172, 173, 174, 175, 176, 177, 178, 179, 180, 181, 182, 183, 184, 185, 186, 601, 602, 603, 604, 605, 606, 607, 613, 614, 615, 616, 617, 618, 619, 622, 623, 640, 641, 643, 662, 663, 664, 665, 666, 667, 675, 676, 681, 688, 690, 691, 693, 696, 697, 699, 700, 702, 703, 704, 705, 706, 707, 708, 709, 710, 711, 712, 713, 714, 715, 716, 717, 718, 719, 720, 721, 722, 723, 724, 725, 726, 727, 728, 729, 730, 732, 733, 734, 735, 736, 737, 738, 739, 740, 741, 742, 743, 744, 746, 747, 748, 749, 750, 751, 752, 753, 754, 755, 756, 757, 758, 759, 760, 761, 762, 763, 765, 766, 767, 768, 769, 770, 771, 772 and 773.

[0599] Embodiment 129. The method of embodiment 128, wherein the bacteria comprises one or more bacteria having a 16S rDNA sequence that is at least 85%, at least 90%, at least 95%, at least 96%, at least 97%, at least 98%, at least 99%, or 100% identical to a 16S rDNA sequence set forth in SEQ ID NOs: 605, 613, 640, 641, 643, 662, 663, 664, 665, 666, 667, 681, 688, 690, 703, 732, 733, 736, 737, 738, 739, 740, 741, 742, 743, 744, 749, 754, 755, 756, 758, 765, 766, 767 and 773.

[0600] Embodiment 130. The method of embodiment 128, wherein the bacteria comprises one or more bacteria having a 16S rDNA sequence that is at least 85%, at least 90%, at least 95%, at least 96%, at least 97%, at least 98%, at least 99%, or 100% identical to a 16S rDNA sequence set forth in SEQ ID NOs: 601, 602, 603, 604, 606, 607, 613, 614, 615, 616, 617, 618, 619, 622, 623, 675, 676, 681, 691, 693, 696, 697, 699, 700, 702, 704, 705, 706, 707, 708, 709, 710, 711, 712, 713, 714, 715, 716, 717, 718, 719, 720, 721, 722, 723, 724, 725, 726, 727, 728, 729, 730, 734, 735, 736, 746, 747, 748, 749, 750, 751, 752, 753, 757, 759, 760, 761, 762, 763, 768, 769, 770, 771 and 772.

[0601] Embodiment 131. The method of embodiment 128, wherein the bacteria comprises one or more bacteria having a 16S rDNA sequence that is at least 85%, at least 90%, at least 95%, at least 96%, at least 97%, at least 98%, at least 99%, or 100% identical to a 16S rDNA sequence set forth in SEQ ID NOs: 2, 3, 6, 10, 12, 13, 19, 20, 21, 22, 23, 24, 34, 37, 38, 39, 42, 43, 44, 45, 46, 47, 48, 50, 51, 52, 55, 57, 58, 59, 64, 65, 66, 67, 73, 74, 75, 80, 82, 83, 84, 85, 86, 87, 88, 89, 90, 91, 92, 93, 94, 95, 96, 97, 98, 99, 100, 101, 104, 105, 106, 107, 108, 109, 110, 111, 112, 114, 115, 116, 120, 123, 129, 135, 136, 138, 139, 140, 141, 142, 143, 145, 146, 148, 153, 156, 157, 158, 161, 168, 169, 170, 173, 176, 178, 180 and 182.

[0602] Embodiment 132. The method of embodiment 131, wherein the cancer is a bladder cancer.

[0603] Embodiment 133. The method of embodiment 128, wherein the bacteria comprises one or more bacteria having a 16S rDNA sequence that is at least 85%, at least 90%, at least 95%, at least 96%, at least 97%, at least 98%, at least 99%, or 100% identical to a 16S rDNA sequence set forth in SEQ ID NOs: 16, 17, 18, 53, 54, 60, 77, 79, 81, 103, 119, 125, 132, 133, 134, 164, 175, 179 and 184.

[0604] Embodiment 134. The method of embodiment 133, wherein the cancer is a non-small cell lung cancer.

[0605] Embodiment 135. The method of embodiment 128, wherein the bacteria comprises one or more bacteria having a 16S rDNA sequence that is at least 85%, at least 90%, at least 95%, at least 96%, at least 97%, at least 98%, at least 99%, or 100% identical to a 16S rDNA sequence set forth in SEQ ID NOs: 1, 4, 5, 7, 8, 9, 11, 14, 15, 25, 26, 27, 28, 29, 30, 31, 32, 33, 35, 36, 40, 41, 61, 62, 68, 69, 70, 71, 72, 76, 78, 117, 118, 121, 122, 124, 127, 128, 130, 131, 137, 144, 147, 149, 150, 151, 152, 154, 155, 159, 160, 162, 163, 165, 166, 167, 171, 174, 177, 181, 183 and 186.

[0606] Embodiment 136. The method of embodiment 135, wherein the cancer is a metastatic melanoma.

[0607] Embodiment 137. The method of any of embodiments 117-136, wherein determining that the subject is a candidate for treatment further comprises determining if the microbiome sample does not comprise one or more bacteria selected from Holdemania massiliensis, Rothia mucilaginosa, Hungatella sp2, Prevotella copri, Campylobacter concisus, [Atopobium] parvulum, Alistipes onderdonkii, Angelakisella massiliensis, Christensenellaceae NG5 sp2, Cuneatibacter caecimuris, Desulfovibrio fairfieldensis, Ruminococcaceae NG13 sp1, Ruminococcaceae NG16 sp1, [Coprococcus] catus, [Lactobacillus] fermentum, [Romboutsia] timonensis, [Ruminococcus] bromii, [Ruminococcus] gauvreauii, Actinomyces graevenitzii, Agathobaculum butyriciproducens group, Bacteroides caccae, Bacteroides intestinalis, Bittarella massiliensis, Blautia luti group, Clostridium saudiense, Corynebacterium durum, Fusicatenibacter sp2, Lachnospiraceae NG30 sp3, Massilimaliae sp1, Monoglobus pectinilyticus, Rothia dentocariosa, Rothia mucilaginosa, Ruminococcaceae NG17 sp1, Schaalia odontolytica, Streptococcus australis, Streptococcus gordonii, Streptococcus infantis group, Streptococcus parasanguinis, Streptococcus salivarius group, [Atopobium] parvulum, [Ruminococcus] gnavus, Bacteroides dorei group, Blautia sp1, Schaalia sp2, or bacteria having 16S rDNA having at least 94.5%, 95%, 97%, 98%, 98.7% or 99% sequence identity to any one of the 16S rDNA thereof.

[0608] Embodiment 138. The method of any of embodiments 117-136, wherein determining that the subject is a candidate for treatment further comprises determining if the microbiome sample does not comprise one or more bacteria selected from Holdemania massiliensis, Rothia mucilaginosa, Hungatella sp2, Prevotella copri, Campylobacter concisus, or bacteria having 16S rDNA having at least 94.5%, 95%, 97%, 98%, 98.7% or 99% sequence identity to any one of the 16S rDNA thereof.

[0609] Embodiment 139. The method of any of embodiments 117-136, wherein determining that the subject is a candidate for treatment further comprises determining if the microbiome sample does not comprise one or more bacteria selected from Rothia mucilaginosa, [Atopobium] parvulum, Holdemania massiliensis, Prevotella copri, Campylobacter concisus, or bacteria having 16S rDNA having at least 94.5%, 95%, 97%, 98%, 98.7% or 99% sequence identity to any one of the 16S rDNA thereof.

[0610] Embodiment 140. The method of any of embodiments 117-136, wherein determining that the subject is a candidate for treatment further comprises determining if the microbiome sample does not comprise one or more bacteria selected from Alistipes onderdonkii, Angelakisella massiliensis, Christensenellaceae NG5 sp2, Cuneatibacter caecimuris, Desulfovibrio fairfieldensis, Ruminococcaceae NG13 sp1, Ruminococcaceae NG16 sp1, or bacteria having 16S rDNA having at least 94.5%, 95%, 97%, 98%, 98.7% or 99% sequence identity to any one of the 16S rDNA thereof.

[0611] Embodiment 141. The method of embodiment 140, wherein the cancer is a bladder cancer.

[0612] Embodiment 142. The method of any of embodiments 117-136, wherein determining that the subject is a candidate for treatment further comprises determining if the microbiome sample does not comprise one or more bacteria selected from [Coprococcus] catus, [Lactobacillus] fermentum, [Romboutsia] timonensis, [Ruminococcus] bromii, [Ruminococcus] gauvreauii, Actinomyces graevenitzii, Agathobaculum butyriciproducens group, Bacteroides caccae, Bacteroides intestinalis, Bittarella massiliensis, Blautia luti group, Clostridium saudiense, Corynebacterium durum, Fusicatenibacter sp2, Lachnospiraceae NG30 sp3, Massilimaliae sp1, Monoglobus pectinilyticus, Rothia dentocariosa, Rothia mucilaginosa, Ruminococcaceae NG17 sp1, Schaalia odontolytica, Streptococcus australis, Streptococcus gordonii, Streptococcus infantis group, Streptococcus parasanguinis, Streptococcus salivarius group, or bacteria having 16S rDNA having at least 94.5%, 95%, 97%, 98%, 98.7% or 99% sequence identity to any one of the 16S rDNA thereof.

[0613] Embodiment 143. The method of embodiment 142, wherein the cancer is a non-small cell lung cancer.

[0614] Embodiment 144. The method of any of embodiments 117-136, wherein determining that the subject is a candidate for treatment further comprises determining if the microbiome sample does not comprise one or more bacteria selected from [Atopobium] parvulum, [Ruminococcus] gnavus, Bacteroides dorei group, Blautia sp1, Schaalia sp2, or bacteria having 16S rDNA having at least 94.5%, 95%, 97%, 98%, 98.7% or 99% sequence identity to any one of the 16S rDNA thereof.

[0615] Embodiment 145. The method of embodiment 144, wherein the cancer is a metastatic melanoma.

[0616] Embodiment 146. The method of any of embodiments 117-136, wherein determining that the subject is a candidate for treatment further comprises determining if the microbiome sample does not comprise one or more bacteria having a 16S rDNA sequence that is at least 85%, at least 90%, at least 95%, at least 96%, at least 97%, at least 98%, at least 99%, or 100% identical to a 16S rDNA sequence set forth in SEQ ID NOs: 187, 188, 189, 190, 191, 192, 193, 194, 195, 196, 197, 198, 199, 200, 201, 202, 203, 204, 205, 206, 207, 208, 209, 210, 211, 212, 213, 214, 215, 216, 217, 218, 219, 220, 221, 222, 223, 224, 225, 226, 227, 228, 229, 230, 231, 232, 233, 234, 235, 236, 237, 238, 239, 240, 241, 242, 243, 244, 245, 246, 247, 248, 249, 250, 251, 252, 253, 254, 255, 256, 257, 258, 259, 260, 261, 262, 263, 264, 265, 266, 267, 268, 269, 270, 271, 272, 273, 274, 275, 276, 277, 278, 279, 280, 281, 282, 283, 284, 285, 286, 287, 288, 289, 290, 291, 292, 293, 294, 295, 296, 297, 298, 299, 300, 301, 302, 303, 304, 305, 306, 307, 308, 309, 310, 311, 312, 313, 314, 315, 316, 317, 318, 319, 320, 321, 322, 323, 324, 325, 326, 327, 328, 329, 330, 331, 332, 333, 334, 335, 336, 337, 338, 339, 340, 341, 342, 343, 344, 345, 346, 347, 348, 349, 350, 351, 352, 353, 354, 355, 356, 357, 358, 359, 360, 361, 362, 363, 364, 365, 366, 367, 368, 369, 370, 371, 372, 373, 374, 375, 376, 377, 378, 379, 380, 381, 382, 383, 384, 385, 386, 387, 388, 389, 390, 391, 392, 393, 394, 395, 396, 397, 398, 399, 400, 401, 402, 403, 404, 405, 406, 407, 408, 409, 410, 411, 412, 413, 414, 415, 416, 417, 418, 419, 420, 421, 422, 423, 424, 425, 426, 427, 428, 429, 430, 431, 432, 433, 434, 435, 436, 437, 438, 439, 440, 441, 442, 443, 444, 445, 446, 447, 448, 449, 450, 451, 452, 453, 454, 455, 456, 457, 458, 459, 460, 461, 462, 463, 464, 465, 466, 467, 468, 469, 470, 471, 472, 473, 474, 475, 476, 477, 478, 479, 480, 481, 482, 483, 484, 485, 486, 487, 488, 489, 490, 491, 492, 493, 494, 495, 496, 497, 498, 499, 500, 501, 502, 503, 504, 505, 506, 507, 508, 509, 510, 511, 512, 513, 514, 515, 516, 517, 518, 519, 520, 521, 522, 523, 524, 525, 526, 527, 528, 529, 530, 531, 532, 533, 534, 535, 536, 537, 538, 539, 540, 541, 542, 543, 544, 545, 546, 547, 548, 549, 550, 551, 552, 553, 554, 555, 556, 557, 558, 559, 560, 561, 562, 563, 564, 565, 566, 567, 568, 569, 570, 571, 572, 573, 574, 575, 576, 577, 578, 579, 580, 581, 582, 583, 584, 585, 586, 587, 588, 589, 590, 591, 592, 593, 594, 595, 596, 597, 598, 599, 600, 608, 609, 610, 611, 612, 620, 621, 622, 623, 624, 625, 626, 627, 628, 629, 630, 631, 632, 633, 634, 635, 636, 637, 638, 639, 642, 644, 645, 646, 647, 648, 649, 650, 651, 652, 653, 654, 655, 656, 657, 658, 659, 660, 661, 668, 669, 670, 671, 672, 673, 674, 677, 678, 679, 680, 682, 683, 684, 685, 686, 687, 689, 692, 694, 695, 698, 701, 731, 734 and 764.

[0617] Embodiment 147. The method of any of embodiments 117-136, wherein determining that the subject is a candidate for treatment further comprises determining if the microbiome sample does not comprise one or more bacteria having a 16S rDNA sequence that is at least 85%, at least 90%, at least 95%, at least 96%, at least 97%, at least 98%, at least 99%, or 100% identical to a 16S rDNA sequence set forth in SEQ ID NOs: 608, 610, 611, 612, 620, 621, 622, 623, 624, 625, 626, 630, 631, 632, 633, 634, 635, 636, 637, 638, 639, 642, 644, 645, 646, 647, 648, 649, 650, 651, 652, 653, 654, 655, 656, 657, 658, 659, 660, 661, 668, 669, 670, 671, 672, 673, 674, 677, 678, 679, 680, 682, 683, 684, 685, 686, 687, 689, 692, 694, 695, 698, 701, 731, 734 and 764.

[0618] Embodiment 148. The method of any of embodiments 117-136, wherein determining that the subject is a candidate for treatment further comprises determining if the microbiome sample does not comprise one or more bacteria having a 16S rDNA sequence that is at least 85%, at least 90%, at least 95%, at least 96%, at least 97%, at least 98%, at least 99%, or 100% identical to a 16S rDNA sequence set forth in SEQ ID NOs: 608, 609, 610, 611, 612, 620, 621, 624, 625, 626, 627, 628, 629, 630, 631, 632, 633, 634, 635, 636, 637, 638, 639, 642, 644, 645, 646, 647, 648, 649, 650, 651, 652, 653, 654, 655, 656, 657, 658, 659, 660, 661, 668, 669, 670, 671, 672, 673, 674, 677, 678, 679, 680, 682, 683, 684, 685, 686, 687, 689, 692, 694, 695, 698, 701, 731 and 764.

[0619] Embodiment 149. The method of any of embodiments 117-136, wherein determining that the subject is a candidate for treatment further comprises determining if the microbiome sample does not comprise one or more bacteria having a 16S rDNA sequence that is at least 85%, at least 90%, at least 95%, at least 96%, at least 97%, at least 98%, at least 99%, or 100% identical to a 16S rDNA sequence set forth in SEQ ID NOs: 188, 213, 245, 323, 331, 332, 376, 455, 509, 516, 538 and 582.

[0620] Embodiment 150. The method of embodiment 149, wherein the cancer is a bladder cancer.

[0621] Embodiment 151. The method of any of embodiments 117-136, wherein determining that the subject is a candidate for treatment further comprises determining if the microbiome sample does not comprise one or more bacteria having a 16S rDNA sequence that is at least 85%, at least 90%, at least 95%, at least 96%, at least 97%, at least 98%, at least 99%, or 100% identical to a 16S rDNA sequence set forth in SEQ ID NOs: 187, 189, 190, 191, 192, 193, 194, 195, 196, 197, 198, 199, 200, 201, 202, 203, 204, 205, 211, 214, 216, 217, 218, 219, 220, 221, 222, 224, 225, 226, 227, 228, 229, 230, 231, 232, 233, 234, 235, 236, 237, 238, 239, 240, 241, 242, 243, 244, 246, 247, 248, 253, 254, 255, 257, 258, 259, 263, 264, 265, 267, 268, 269, 270, 271, 272, 273, 277, 283, 286, 289, 290, 291, 292, 293, 294, 295, 296, 297, 298, 299, 300, 301, 302, 303, 304, 305, 306, 307, 308, 309, 310, 311, 312, 313, 314, 315, 316, 317, 318, 319, 320, 321, 322, 324, 325, 326, 327, 328, 329, 330, 333, 334, 335, 336, 337, 338, 339, 340, 341, 342, 343, 344, 345, 346, 347, 348, 349, 350, 351, 352, 353, 354, 355, 356, 357, 358, 359, 360, 361, 362, 363, 364, 365, 366, 367, 368, 369, 370, 371, 372, 373, 374, 375, 377, 378, 379, 380, 381, 382, 383, 384, 385, 386, 387, 389, 390, 391, 392, 393, 394, 395, 396, 397, 398, 399, 400, 401, 402, 403, 409, 410, 411, 412, 413, 414, 415, 418, 421, 424, 425, 428, 429, 430, 431, 432, 433, 434, 435, 436, 437, 438, 439, 440, 441, 442, 443, 444, 445, 447, 449, 450, 452, 453, 454, 456, 457, 458, 460, 462, 463, 464, 465, 466, 467, 468, 469, 471, 472, 473, 474, 475, 476, 478, 479, 480, 481, 483, 484, 486, 487, 488, 489, 490, 491, 492, 493, 494, 495, 496, 497, 498, 499, 500, 501, 502, 503, 504, 505, 506, 507, 508, 510, 511, 512, 513, 514, 515, 520, 521, 522, 523, 524, 525, 526, 527, 528, 529, 530, 531, 537, 539, 540, 542, 543, 544, 545, 546, 547, 548, 550, 551, 552, 553, 554, 555, 560, 561, 564, 565, 566, 573, 574, 577, 579, 581, 583, 584, 585, 586, 587, 588, 589, 591, 594, 595, 596, 597, 598, 599 and 600.

[0622] Embodiment 152. The method of embodiment 151, wherein the cancer is a non-small cell lung cancer.

[0623] Embodiment 153. The method of any of embodiments 117-136, wherein determining that the subject is a candidate for treatment further comprises determining if the microbiome sample does not comprise one or more bacteria having a 16S rDNA sequence that is at least 85%, at least 90%, at least 95%, at least 96%, at least 97%, at least 98%, at least 99%, or 100% identical to a 16S rDNA sequence set forth in SEQ ID NOs: 206, 207, 208, 209, 210, 212, 215, 223, 249, 250, 251, 252, 256, 260, 261, 262, 266, 274, 275, 276, 278, 279, 280, 281, 282, 284, 285, 287, 388, 404, 405, 406, 407, 408, 416, 417, 419, 420, 422, 423, 426, 427, 446, 448, 451, 459, 461, 482, 485, 517, 518, 519, 532, 533, 534, 535, 536, 549, 556, 557, 558, 559, 562, 563, 567, 568, 569, 570, 571, 572, 575, 576, 580, 590 and 593.

[0624] Embodiment 154. The method of embodiment 153, wherein the cancer is a metastatic melanoma.

[0625] Embodiment 155. The method of any of embodiments 117-154, wherein the subject is determined to be a candidate for immune checkpoint inhibitor therapy.

[0626] Embodiment 156. The method of any one of embodiments 117-155, wherein the immune checkpoint therapy comprises immune checkpoint blockade monotherapy or immune checkpoint blockade combination therapy.

[0627] Embodiment 157. The method of any of embodiments 117-154, wherein the treatment further comprises a chemotherapy.

[0628] Embodiment 158. The method of any of embodiments 117-157, wherein the mammalian subject is a human.

[0629] Embodiment 159. The method of any of embodiments 117-158, wherein the cancer is selected from a metastatic melanoma, a melanoma of the skin, a non-small cell lung cancer, a kidney cancer, a bladder cancer, a head and neck cancer, a Merkel cell skin cancer (Merkel cell carcinoma), or a Hodgkin lymphoma.

[0630] Embodiment 160. The method of embodiment 159, wherein the cancer is a metastatic melanoma.

[0631] Embodiment 161. The method of embodiment 159, wherein the cancer is a non-small cell lung cancer.

[0632] Embodiment 162. The method of embodiment 159, wherein the cancer is a bladder cancer.

[0633] Embodiment 163. A method of identifying a mammalian subject as a donor whose feces are useful for fecal matter transfer, the method comprising:
[0634] a) obtaining a microbiome sample from the potential donor,
[0635] b) determining the prevalence and/or abundance of the species of bacteria in the microbiome sample, and
[0636] c) determining that the donor's feces is useful for fecal matter transfer if the microbiome sample comprises bacteria that have 16S rDNA sequence identity of at least 94.5% to 16S rDNA sequences of species belonging to one or more of the families Sutterellaceae, Coriobacteriaceae, Akkermansiaceae, Campylobacteraceae, or Desulfovibrionaceae.

[0637] Embodiment 164. The method of embodiment 163, wherein the bacteria have 16S rDNA sequence identity of at least 95%, 97%, 98%, 98.7% or 99% to 16S rDNA sequences of species belonging to one or more of the families Sutterellaceae, Coriobacteriaceae, Akkermansiaceae, Campylobacteraceae, or Desulfovibrionaceae.

[0638] Embodiment 165. A method of identifying a mammalian subject as a donor whose feces are useful for fecal matter transfer, the method comprising:
[0639] a) obtaining a microbiome sample from the potential donor,
[0640] b) determining the prevalence and/or abundance of the species of bacteria in the microbiome sample, and
[0641] c) determining that the donor's feces is useful for fecal matter transfer if the microbiome sample comprises bacteria comprising one or more bacteria selected from Akkermansia muciniphila, Dysosmobacter welbionis, Anaerobutyricum hallii, Blautia caecimuris, Holdemania filiformis, Acetatifactor sp1, Ruminococcaceae NG14 sp1, Hungatella sp2, Bifidobacterium catenulatum group, Blautia wexlerae, Hungatella sp1, Intestinibacter bartlettii, Lachnospiraceae NG31 sp1, Lactonifactor longoviformis, Leuconostoc gelidum, Sutterella wadsworthensis, [Extibacter] muris, Alistipes onderdonkii, Collinsella intestinalis, Collinsella stercoris, Muricomes sp1, Neobitarella massiliensis, Prevotellamassilia sp2, Ruminococcaceae NG33 sp1, [Adlercreutzia] equolifaciens group, [Anaerotruncus] rubiinfantis, [Romboutsia] timonensis, Alistipes finegoldii, Alistipes indistinctus, Alistipes obesi, Alistipes putredinis, Alistipes shahii, Anaerofustis stercorihominis, Anaeromassilibacillus sp3, Barnesiella intestinihominis, Bilophila wadsworthia, Blautia faecis, Coriobacteriaceae NG5 sp1, Frisingicoccus sp3, Gordonibacter pamelaeae, Harryflintia acetispora, Lachnospiraceae NG29 sp1, Marvinbryantia sp8, Massilimaliae massiliensis, Massilimaliae timonensis, Neglecta timonensis, Parabacteroides merdae, Peptoniphilaceae NG4 sp1, Peptoniphilaceae NG4 sp3, Pseudoflavonifractor capillosus, Ruminococcaceae NG12 sp1, Ruminococcaceae NG15 sp3, Ruminococcaceae NG17 sp3, Ruthenibacterium sp1, or bacteria having 16S rDNA having at least 94.5%, 95%, 97%, 98%, 98.7% or 99% sequence identity to any one of the 16S rDNA thereof.

[0642] Embodiment 166. The method of embodiment 165, wherein the bacteria comprises one or more bacteria selected from Akkermansia muciniphila, Dysosmobacter welbionis, Anaerobutyricum hallii, Blautia caecimuris, Holdemania filiformis, or bacteria having 16S rDNA having at least 94.5%, 95%, 97%, 98%, 98.7% or 99% sequence identity to any one of the 16S rDNA thereof.

[0643] Embodiment 167. The method of embodiment 165, wherein the bacteria comprises one or more bacteria selected from Acetatifactor sp1, Blautia wexlerae, Ruminococcaceae NG14 sp1, Hungatella sp2, Holdemania filiformis, or bacteria having 16S rDNA having at least 94.5%, 95%, 97%, 98%, 98.7% or 99% sequence identity to any one of the 16S rDNA thereof.

[0644] Embodiment 168. The method of embodiment 165, wherein the bacteria comprises one or more bacteria selected from Bifidobacterium catenulatum group, Blautia wexlerae, Hungatella sp1, Intestinibacter bartlettii, Lachnospiraceae NG31 sp1, Lactonifactor longoviformis, Leuconostoc gelidum, Sutterella wadsworthensis, or bacteria having 16S rDNA having at least 94.5%, 95%, 97%, 98%, 98.7% or 99% sequence identity to any one of the 16S rDNA thereof.

[0645] Embodiment 169. The method of embodiment 165, wherein the bacteria comprises one or more bacteria selected from [Extibacter] muris, Alistipes onderdonkii, Collinsella intestinalis, Collinsella stercoris, Muricomes sp1, Neobitarella massiliensis, Prevotellamassilia sp2, Ruminococcaceae NG33 sp1, or bacteria having 16S rDNA having at least 94.5%, 95%, 97%, 98%, 98.7% or 99% sequence identity to any one of the 16S rDNA thereof.

[0646] Embodiment 170. The method of embodiment 165, wherein the bacteria comprises one or more bacteria selected from [Adlercreutzia] equolifaciens group, [Anaerotruncus] rubiinfantis, [Romboutsia] timonensis, Alistipes finegoldii, Alistipes indistinctus, Alistipes obesi, Alistipes putredinis, Alistipes shahii, Anaerofustis stercorihominis, Anaeromassilibacillus sp3, Barnesiella intestinihominis, Bilophila wadsworthia, Blautia faecis, Coriobacteriaceae NG5 sp1, Frisingicoccus sp3, Gordonibacter pamelaeae, Harryflintia acetispora, Lachnospiraceae NG29 sp1, Marvinbryantia sp8, Massilimaliae massiliensis, Massilimaliae timonensis, Neglecta timonensis, Parabacteroides merdae, Peptoniphilaceae NG4 sp1, Peptoniphilaceae NG4 sp3, Pseudoflavonifractor capillosus, Ruminococcaceae NG12 sp1, Ruminococcaceae NG15 sp3, Ruminococcaceae NG17 sp3, Ruthenibacterium sp1, or bacteria having 16S rDNA having at least 94.5%, 95%, 97%, 98%, 98.7% or 99% sequence identity to any one of the 16S rDNA thereof.

[0647] Embodiment 171. A method of identifying a mammalian subject as a donor whose feces are useful for fecal matter transfer, the method comprising:
[0648] a) obtaining a microbiome sample from the potential donor,
[0649] b) determining the prevalence and/or abundance of the species of bacteria in the microbiome sample, and
[0650] c) determining that the donor's feces is useful for fecal matter transfer if the microbiome sample comprises bacteria comprising one or more bacteria having a 16S rDNA sequence that is at least 85%, at least 90%, at least 95%, at least 96%, at least 97%, at least 98%, at least 99%, or 100% identical to a 16S rDNA sequence set forth in SEQ ID NOs: 1, 2, 3, 4, 5, 6, 7, 8, 9, 10, 11, 12, 13, 14, 15, 16, 17, 18, 19, 20, 21, 22, 23, 24, 25, 26, 27, 28, 29, 30, 31, 32, 33, 34, 35, 36, 37, 38, 39, 40, 41, 42, 43, 44, 45, 46, 47, 48, 49, 50, 51, 52, 53, 54, 55, 56, 57, 58, 59, 60, 61, 62, 63, 64, 65, 66, 67, 68, 69, 70, 71, 72, 73, 74, 75, 76, 77, 78, 79, 80, 81, 82, 83, 84, 85, 86, 87, 88, 89, 90, 91, 92, 93, 94, 95, 96, 97, 98, 99, 100, 101, 102, 103, 104, 105, 106, 107, 108, 109, 110, 111, 112, 113, 114, 115, 116, 117, 118, 119, 120, 121, 122, 123, 124, 125, 126, 127, 128, 129, 130, 131, 132, 133, 134, 135, 136, 137, 138, 139, 140, 141, 142, 143, 144, 145, 146, 147, 148, 149, 150, 151, 152, 153, 154, 155, 156, 157, 158, 159, 160, 161, 162, 163, 164, 165, 166, 167, 168, 169, 170, 171, 172, 173, 174, 175, 176, 177, 178, 179, 180, 181, 182, 183, 184, 185, 186, 601, 602, 603, 604, 605, 606, 607, 613, 614, 615, 616, 617, 618, 619, 622, 623, 640, 641, 643, 662, 663, 664, 665, 666, 667, 675, 676, 681, 688, 690, 691, 693, 696, 697, 699, 700, 702, 703, 704, 705, 706, 707, 708, 709, 710, 711, 712, 713, 714, 715, 716, 717, 718, 719, 720, 721, 722, 723, 724, 725, 726, 727, 728, 729, 730, 732, 733, 734, 735, 736, 737, 738, 739, 740, 741, 742, 743, 744, 746, 747, 748, 749, 750, 751, 752, 753, 754, 755, 756, 757, 758, 759, 760, 761, 762, 763, 765, 766, 767, 768, 769, 770, 771, 772 and 773.

[0651] Embodiment 172. The method of embodiment 171, wherein the bacteria comprises one or more bacteria having a 16S rDNA sequence that is at least 85%, at least 90%, at least 95%, at least 96%, at least 97%, at least 98%, at least 99%, or 100% identical to a 16S rDNA sequence set forth in SEQ ID NOs: 605, 613, 640, 641, 643, 662, 663, 664, 665, 666, 667, 681, 688, 690, 703, 732, 733, 736, 737, 738, 739, 740, 741, 742, 743, 744, 749, 754, 755, 756, 758, 765, 766, 767 and 773.

[0652] Embodiment 173. The method of embodiment 171, wherein the bacteria comprises one or more bacteria having a 16S rDNA sequence that is at least 85%, at least 90%, at least 95%, at least 96%, at least 97%, at least 98%, at least 99%, or 100% identical to a 16S rDNA sequence set forth in SEQ ID NOs: 601, 602, 603, 604, 606, 607, 613, 614, 615, 616, 617, 618, 619, 622, 623, 675, 676, 681, 691, 693, 696, 697, 699, 700, 702, 704, 705, 706, 707, 708, 709, 710, 711, 712, 713, 714, 715, 716, 717, 718, 719, 720, 721, 722, 723, 724, 725, 726, 727, 728, 729, 730, 734, 735, 736, 746, 747, 748, 749, 750, 751, 752, 753, 757, 759, 760, 761, 762, 763, 768, 769, 770, 771 and 772.

[0653] Embodiment 174. The method of embodiment 171, wherein the bacteria comprises one or more bacteria having a 16S rDNA sequence that is at least 85%, at least 90%, at least 95%, at least 96%, at least 97%, at least 98%, at least 99%, or 100% identical to a 16S rDNA sequence set forth in SEQ ID NOs: 2, 3, 6, 10, 12, 13, 19, 20, 21, 22, 23, 24, 34, 37, 38, 39, 42, 43, 44, 45, 46, 47, 48, 50, 51, 52, 55, 57, 58, 59, 64, 65, 66, 67, 73, 74, 75, 80, 82, 83, 84, 85, 86, 87, 88, 89, 90, 91, 92, 93, 94, 95, 96, 97, 98, 99, 100, 101, 104, 105, 106, 107, 108, 109, 110, 111, 112, 114, 115, 116, 120, 123, 129, 135, 136, 138, 139, 140, 141, 142, 143, 145, 146, 148, 153, 156, 157, 158, 161, 168, 169, 170, 173, 176, 178, 180 and 182.

[0654] Embodiment 175. The method of embodiment 171, wherein the bacteria comprises one or more bacteria having a 16S rDNA sequence that is at least 85%, at least 90%, at least 95%, at least 96%, at least 97%, at least 98%, at least 99%, or 100% identical to a 16S rDNA sequence set forth in SEQ ID NOs: 16, 17, 18, 53, 54, 60, 77, 79, 81, 103, 119, 125, 132, 133, 134, 164, 175, 179 and 184.

[0655] Embodiment 176. The method of embodiment 171, wherein the bacteria comprises one or more bacteria having a 16S rDNA sequence that is at least 85%, at least 90%, at least 95%, at least 96%, at least 97%, at least 98%, at least 99%, or 100% identical to a 16S rDNA sequence set forth in SEQ ID NOs: 1, 4, 5, 7, 8, 9, 11, 14, 15, 25, 26, 27, 28, 29, 30, 31, 32, 33, 35, 36, 40, 41, 61, 62, 68, 69, 70, 71, 72, 76, 78, 117, 118, 121, 122, 124, 127, 128, 130, 131, 137, 144, 147, 149, 150, 151, 152, 154, 155, 159, 160, 162, 163, 165, 166, 167, 171, 174, 177, 181, 183 and 186.

[0656] Embodiment 177. The method of any one of embodiments 163-176, wherein determining that the donor's feces is useful for fecal matter transfer further comprises determining if the microbiome sample does not comprise one or more bacteria selected from Holdemania massiliensis, Rothia mucilaginosa, Hungatella sp2, Prevotella copri, Campylobacter concisus, [Atopobium] parvulum, Alistipes onderdonkii, Angelakisella massiliensis, Christensenellaceae NG5 sp2, Cuneatibacter caecimuris, Desulfovibrio fairfieldensis, Ruminococcaceae NG13 sp1, Ruminococcaceae NG16 sp1, [Coprococcus] catus, [Lactobacillus] fermentum, [Romboutsia] timonensis, [Ruminococcus] bromii, [Ruminococcus] gauvreauii, Actinomyces graevenitzii, Agathobaculum butyriciproducens group, Bacteroides caccae, Bacteroides intestinalis, Bittarella massiliensis, Blautia luti group, Clostridium saudiense, Corynebacterium durum, Fusicatenibacter sp2, Lachnospiraceae NG30 sp3, Massilimaliae sp1, Monoglobus pectinilyticus, Rothia dentocariosa, Rothia mucilaginosa, Ruminococcaceae NG17 sp1, Schaalia odontolytica, Streptococcus australis, Streptococcus gordonii, Streptococcus infantis group, Streptococcus parasanguinis, Streptococcus salivarius group, [Atopobium] parvulum, [Ruminococcus]gnavus, Bacteroides dorei group, Blautia sp1, Schaalia sp2, or bacteria having 16S rDNA having at least 94.5%, 95%, 97%, 98%, 98.7% or 99% sequence identity to any one of the 16S rDNA thereof.

[0657] Embodiment 178. The method of any one of embodiments 163-176, wherein determining that the donor's feces is useful for fecal matter transfer further comprises determining if the microbiome sample does not comprise one or more bacteria selected from Holdemania massiliensis, Rothia mucilaginosa, Hungatella sp2, Prevotella copri, Campylobacter concisus, or bacteria having 16S rDNA having at least 94.5%, 95%, 97%, 98%, 98.7% or 99% sequence identity to any one of the 16S rDNA thereof.

[0658] Embodiment 179. The method of any one of embodiments 163-176, wherein determining that the donor's feces is useful for fecal matter transfer further comprises determining if the microbiome sample does not comprise one or more bacteria selected from Rothia mucilaginosa, [Atopobium] parvulum, Holdemania massiliensis, Prevotella copri, Campylobacter concisus, or bacteria having 16S rDNA having at least 94.5%, 95%, 97%, 98%, 98.7% or 99% sequence identity to any one of the 16S rDNA thereof.

[0659] Embodiment 180. The method of any one of embodiments 163-176, wherein determining that the donor's feces is useful for fecal matter transfer further comprises determining if the microbiome sample does not comprise one or more bacteria selected from Alistipes onderdonkii, Angelakisella massiliensis, Christensenellaceae NG5 sp2, Cuneatibacter caecimuris, Desulfovibrio fairfieldensis, Ruminococcaceae NG13 sp1, Ruminococcaceae NG16 sp1, or bacteria having 16S rDNA having at least 94.5%, 95%, 97%, 98%, 98.7% or 99% sequence identity to any one of the 16S rDNA thereof.

[0660] Embodiment 181. The method of any one of embodiments 163-176, wherein determining that the donor's feces is useful for fecal matter transfer further comprises determining if the microbiome sample does not comprise one or more bacteria selected from [Coprococcus] catus, [Lactobacillus] fermentum, [Romboutsia] timonensis, [Ruminococcus]bromii, [Ruminococcus] gauvreauii, Actinomyces graevenitzii, Agathobaculum butyriciproducens group, Bacteroides caccae, Bacteroides intestinalis, Bittarella massiliensis, Blautia luti group, Clostridium saudiense, Corynebacterium durum, Fusicatenibacter sp2, Lachnospiraceae NG30 sp3, Massilimaliae sp1, Monoglobus pectinilyticus, Rothia dentocariosa, Rothia mucilaginosa, Ruminococcaceae NG17 sp1, Schaalia odontolytica, Streptococcus australis, Streptococcus gordonii, Streptococcus infantis group, Streptococcus parasanguinis, Streptococcus salivarius group, or bacteria having 16S rDNA having at least 94.5%, 95%, 97%, 98%, 98.7% or 99% sequence identity to any one of the 16S rDNA thereof.

[0661] Embodiment 182. The method of any one of embodiments 163-176, wherein determining that the donor's feces is useful for fecal matter transfer further comprises determining if the microbiome sample does not comprise one or more bacteria selected from [Atopobium] parvulum, [Ruminococcus] gnavus, Bacteroides dorei group, Blautia sp1, Schaalia sp2, or bacteria having 16S rDNA having at least 94.5%, 95%, 97%, 98%, 98.7% or 99% sequence identity to any one of the 16S rDNA thereof.

[0662] Embodiment 183. The method of any one of embodiments 163-176, wherein determining that the donor's feces is useful for fecal matter transfer further comprises determining if the microbiome sample does not comprise one or more bacteria having a 16S rDNA sequence that is at least 85%, at least 90%, at least 95%, at least 96%, at least 97%, at least 98%, at least 99%, or 100% identical to a 16S rDNA sequence set forth in SEQ ID NOs: 187, 188, 189, 190, 191, 192, 193, 194, 195, 196, 197, 198, 199, 200, 201, 202, 203, 204, 205, 206, 207, 208, 209, 210, 211, 212, 213, 214, 215, 216, 217, 218, 219, 220, 221, 222, 223, 224, 225, 226, 227, 228, 229, 230, 231, 232, 233, 234, 235, 236, 237, 238, 239, 240, 241, 242, 243, 244, 245, 246, 247, 248, 249, 250, 251, 252, 253, 254, 255, 256, 257, 258, 259, 260, 261, 262, 263, 264, 265, 266, 267, 268, 269, 270, 271, 272, 273, 274, 275, 276, 277, 278, 279, 280, 281, 282, 283, 284, 285, 286, 287, 288, 289, 290, 291, 292, 293, 294, 295, 296, 297, 298, 299, 300, 301, 302, 303, 304, 305, 306, 307, 308, 309, 310, 311, 312, 313, 314, 315, 316, 317, 318, 319, 320, 321, 322, 323, 324, 325, 326, 327, 328, 329, 330, 331, 332, 333, 334, 335, 336, 337, 338, 339, 340, 341, 342, 343, 344, 345, 346, 347, 348, 349, 350, 351, 352, 353, 354, 355, 356, 357, 358, 359, 360, 361, 362, 363, 364, 365, 366, 367, 368, 369, 370, 371, 372, 373, 374, 375, 376, 377, 378, 379, 380, 381, 382, 383, 384, 385, 386, 387, 388, 389, 390, 391, 392, 393, 394, 395, 396, 397, 398, 399, 400, 401, 402, 403, 404, 405, 406, 407, 408, 409, 410, 411, 412, 413, 414, 415, 416, 417, 418, 419, 420, 421, 422, 423, 424, 425, 426, 427, 428, 429, 430, 431, 432, 433, 434, 435, 436, 437, 438, 439, 440, 441, 442, 443, 444, 445, 446, 447, 448, 449, 450, 451, 452, 453, 454, 455, 456, 457, 458, 459, 460, 461, 462, 463, 464, 465, 466, 467, 468, 469, 470, 471, 472, 473, 474, 475, 476, 477, 478, 479, 480, 481, 482, 483, 484, 485, 486, 487, 488, 489, 490, 491, 492, 493, 494, 495, 496, 497, 498, 499, 500, 501, 502, 503, 504, 505, 506, 507, 508, 509, 510, 511, 512, 513, 514, 515, 516, 517, 518, 519, 520, 521, 522, 523, 524, 525, 526, 527, 528, 529, 530, 531, 532, 533, 534, 535, 536, 537, 538, 539, 540, 541, 542, 543, 544, 545, 546, 547, 548, 549, 550, 551, 552, 553, 554, 555, 556, 557, 558, 559, 560, 561, 562, 563, 564, 565, 566, 567, 568, 569, 570, 571, 572, 573, 574, 575, 576, 577, 578, 579, 580, 581, 582, 583, 584, 585, 586, 587, 588, 589, 590, 591, 592, 593, 594, 595, 596, 597, 598, 599, 600, 608, 609, 610, 611, 612, 620, 621, 622, 623, 624, 625, 626, 627, 628, 629, 630, 631, 632, 633, 634, 635, 636, 637, 638, 639, 642, 644, 645, 646, 647, 648, 649, 650, 651, 652, 653, 654, 655, 656, 657, 658, 659, 660, 661, 668, 669, 670, 671, 672, 673, 674, 677, 678, 679, 680, 682, 683, 684, 685, 686, 687, 689, 692, 694, 695, 698, 701, 731, 734 and 764.

[0663] Embodiment 184. The method of any of embodiments 163-176, wherein determining that the donor's feces is useful for fecal matter transfer further comprises determining if the microbiome sample does not comprise one or more bacteria having a 16S rDNA sequence that is at least 85%, at least 90%, at least 95%, at least 96%, at least 97%, at least 98%, at least 99%, or 100% identical to a 16S rDNA sequence set forth in SEQ ID NOs: 608, 610, 611, 612, 620, 621, 622, 623, 624, 625, 626, 630, 631, 632, 633, 634, 635, 636, 637, 638, 639, 642, 644, 645, 646, 647, 648, 649, 650, 651, 652, 653, 654, 655, 656, 657, 658, 659, 660, 661, 668, 669, 670, 671, 672, 673, 674, 677, 678, 679, 680, 682, 683, 684, 685, 686, 687, 689, 692, 694, 695, 698, 701, 731, 734 and 764.

[0664] Embodiment 185. The method of any of embodiments 163-176, wherein determining that the donor's feces is useful for fecal matter transfer further comprises determining if the microbiome sample does not comprise one or more bacteria having a 16S rDNA sequence that is at least 85%, at least 90%, at least 95%, at least 96%, at least 97%, at least 98%, at least 99%, or 100% identical to a 16S rDNA sequence set forth in SEQ ID NOs: 608, 609, 610, 611, 612, 620, 621, 624, 625, 626, 627, 628, 629, 630, 631, 632, 633, 634, 635, 636, 637, 638, 639, 642, 644, 645, 646, 647, 648, 649, 650, 651, 652, 653, 654, 655, 656, 657, 658, 659, 660, 661, 668, 669, 670, 671, 672, 673, 674, 677, 678, 679, 680, 682, 683, 684, 685, 686, 687, 689, 692, 694, 695, 698, 701, 731 and 764.

[0665] Embodiment 186. The method of any of embodiments 163-176, wherein determining that the donor's feces is useful for fecal matter transfer further comprises determining if the microbiome sample does not comprise one or more bacteria having a 16S rDNA sequence that is at least 85%, at least 90%, at least 95%, at least 96%, at least 97%, at least 98%, at least 99%, or 100% identical to a 16S rDNA sequence set forth in SEQ ID NOs: 188, 213, 245, 323, 331, 332, 376, 455, 509, 516, 538 and 582.

[0666] Embodiment 187. The method of any of embodiments 163-176, wherein determining that the donor's feces is useful for fecal matter transfer further comprises determining if the microbiome sample does not comprise one or more bacteria having a 16S rDNA sequence that is at least 85%, at least 90%, at least 95%, at least 96%, at least 97%, at least 98%, at least 99%, or 100% identical to a 16S rDNA sequence set forth in SEQ ID NOs: 187, 189, 190, 191, 192, 193, 194, 195, 196, 197, 198, 199, 200, 201, 202, 203, 204, 205, 211, 214, 216, 217, 218, 219, 220, 221, 222, 224, 225, 226, 227, 228, 229, 230, 231, 232, 233, 234, 235, 236, 237, 238, 239, 240, 241, 242, 243, 244, 246, 247, 248, 253, 254, 255, 257, 258, 259, 263, 264, 265, 267, 268, 269, 270, 271, 272, 273, 277, 283, 286, 289, 290, 291, 292, 293, 294, 295, 296, 297, 298, 299, 300, 301, 302, 303, 304, 305, 306, 307, 308, 309, 310, 311, 312, 313, 314, 315, 316, 317, 318, 319, 320, 321, 322, 324, 325, 326, 327, 328, 329, 330, 333, 334, 335, 336, 337, 338, 339, 340, 341, 342, 343, 344, 345, 346, 347, 348, 349, 350, 351, 352, 353, 354, 355, 356, 357, 358, 359, 360, 361, 362, 363, 364, 365, 366, 367, 368, 369, 370, 371, 372, 373, 374, 375, 377, 378, 379, 380, 381, 382, 383, 384, 385, 386, 387, 389, 390, 391, 392, 393, 394, 395, 396, 397, 398, 399, 400, 401, 402, 403, 409, 410, 411, 412, 413, 414, 415, 418, 421, 424, 425, 428, 429, 430, 431, 432, 433, 434, 435, 436, 437, 438, 439, 440, 441, 442, 443, 444, 445, 447, 449, 450, 452, 453, 454, 456, 457, 458, 460, 462, 463, 464, 465, 466, 467, 468, 469, 471, 472, 473, 474, 475, 476, 478, 479, 480, 481, 483, 484, 486, 487, 488, 489, 490, 491, 492, 493, 494, 495, 496, 497, 498, 499, 500, 501, 502, 503, 504, 505, 506, 507, 508, 510, 511, 512, 513, 514, 515, 520, 521, 522, 523, 524, 525, 526, 527, 528, 529, 530, 531, 537, 539, 540, 542, 543, 544, 545, 546, 547, 548, 550, 551, 552, 553, 554, 555, 560, 561, 564, 565, 566, 573, 574, 577, 579, 581, 583, 584, 585, 586, 587, 588, 589, 591, 594, 595, 596, 597, 598, 599 and 600.

[0667] Embodiment 188. The method of any of embodiments 163-176, wherein determining that the donor's feces is useful for fecal matter transfer further comprises determining if the microbiome sample does not comprise one or more bacteria having a 16S rDNA sequence that is at least 85%, at least 90%, at least 95%, at least 96%, at least 97%, at least 98%, at least 99%, or 100% identical to a 16S rDNA sequence set forth in SEQ ID NOs: 206, 207, 208, 209, 210, 212, 215, 223, 249, 250, 251, 252, 256, 260, 261, 262, 266, 274, 275, 276, 278, 279, 280, 281, 282, 284, 285, 287, 388, 404, 405, 406, 407, 408, 416, 417, 419, 420, 422, 423, 426, 427, 446, 448, 451, 459, 461, 482, 485, 517, 518, 519, 532, 533, 534, 535, 536, 549, 556, 557, 558, 559, 562, 563, 567, 568, 569, 570, 571, 572, 575, 576, 580, 590 and 593.

[0668] Embodiment 189. A therapeutic composition derived from fecal matter from a donor identified using the method of any one of embodiments 163-188.

[0669] Embodiment 190. The therapeutic composition of embodiment 189, further comprising a pharmaceutically acceptable excipient.

[0670] Embodiment 191. The therapeutic composition of embodiment 189, wherein the therapeutic composition comprises bacteria that are in vegetative and/or spore form.

[0671] Embodiment 192. The therapeutic composition of embodiment 189, wherein the therapeutic composition further comprises a checkpoint inhibitor.

[0672] Embodiment 193. The therapeutic composition of embodiment 192, wherein the checkpoint inhibitor is selected from anti-PD-1 antibody, an anti-CTLA-4 antibody, an anti-PD-L1 antibody or combinations thereof.

[0673] Embodiment 194. The therapeutic composition of embodiment 192, wherein the checkpoint inhibitor is selected from pembrolizumab, nivolumab, atezolizumab, avelumab, durvalumab, ipilimumab, pidilizumab, AMP-224, AMP-514, STI-A1110, TSR-042, RG-7446, BMS-936559, BMS-936558, MK-3475, CT O11, MPDL3280A, MEDI-4736, MSB-0020718C, AUR-012, LAG-3, OX40 inhibitors, OX40L inhibitors, TIGIT inhibitors, STI-A1010 or combinations thereof.

[0674] Embodiment 195. A method of treating or preventing or reducing risk of a cancer in a mammalian subject comprising administering to the subject a therapeutic composition of any one of embodiments 189-194.

[0675] Embodiment 196. A method of treating or preventing or reducing risk of a cancer comprising administering at least one anticancer treatment to a subject determined to have a microbiome sample comprising bacteria have 16S rDNA sequence identity of at least 94.5% to 16S rDNA sequences of species belonging to one or more of the families Sutterellaceae, Coriobacteriaceae, Akkermansiaceae, Campylobacteraceae, or Desulfovibrionaceae.

[0676] Embodiment 197. The method of embodiment 196, wherein the bacteria have 16S rDNA sequence identity of at least 95%, 97%, 98%, 98.7% or 99% to 16S rDNA sequences of species belonging to one or more of the families Sutterellaceae, Coriobacteriaceae, Akkermansiaceae, Campylobacteraceae, or Desulfovibrionaceae.

[0677] Embodiment 198. A method of treating or preventing or reducing risk of a cancer comprising administering an anticancer treatment to a subject determined to have a microbiome sample comprising bacteria selected from Akkermansia muciniphila, Dysosmobacter welbionis, Anaerobutyricum hallii, Blautia caecimuris, Holdemania filiformis, Acetatifactor sp1, Ruminococcaceae NG14 sp1, Hungatella sp2, Bifidobacterium catenulatum group, Blautia wexlerae, Hungatella sp1, Intestinibacter bartlettii, Lachnospiraceae NG31 sp1, Lactonifactor longoviformis, Leuconostoc gelidum, Sutterella wadsworthensis, [Extibacter] muris, Alistipes onderdonkii, Collinsella intestinalis, Collinsella stercoris, Muricomes sp1, Neobitarella massiliensis, Prevotellamassilia sp2, Ruminococcaceae NG33 sp1, [Adlercreutzia] equolifaciens group, [Anaerotruncus]rubiinfantis, [Romboutsia] timonensis, Alistipes finegoldii, Alistipes indistinctus, Alistipes obesi, Alistipes putredinis, Alistipes shahii, Anaerofustis stercorihominis, Anaeromassilibacillus sp3, Barnesiella intestinihominis, Bilophila wadsworthia, Blautia faecis, Coriobacteriaceae NG5 sp1, Frisingicoccus sp3, Gordonibacter pamelaeae, Harryflintia acetispora, Lachnospiraceae NG29 sp1, Marvinbryantia sp8, Massilimaliae massiliensis, Massilimaliae timonensis, Neglecta timonensis, Parabacteroides merdae, Peptoniphilaceae NG4 sp1, Peptoniphilaceae NG4 sp3, Pseudoflavonifractor capillosus, Ruminococcaceae NG12 sp1, Ruminococcaceae NG15 sp3, Ruminococcaceae NG17 sp3, Ruthenibacterium sp1, or bacteria having 16S rDNA having at least 94.5%, 95%, 97%, 98%, 98.7% or 99% sequence identity to any one of the 16S rDNA thereof.

[0678] Embodiment 199. The method of embodiment 198, wherein the bacteria comprises one or more bacteria selected from Akkermansia muciniphila, Dysosmobacter welbionis, Anaerobutyricum hallii, Blautia caecimuris, Holdemania filiformis, or bacteria having 16S rDNA having at least 94.5%, 95%, 97%, 98%, 98.7% or 99% sequence identity to any one of the 16S rDNA thereof.

[0679] Embodiment 200. The method of embodiment 198, wherein the bacteria comprises one or more bacteria selected from Acetatifactor sp1, Blautia wexlerae, Ruminococcaceae NG14 sp1, Hungatella sp2, Holdemania filiformis, or bacteria having 16S rDNA having at least 94.5%, 95%, 97%, 98%, 98.7% or 99% sequence identity to any one of the 16S rDNA thereof.

[0680] Embodiment 201. The method of embodiment 198, wherein the bacteria comprises one or more bacteria selected from Bifidobacterium catenulatum group, Blautia wexlerae, Hungatella sp1, Intestinibacter bartlettii, Lachnospiraceae NG31 sp1, Lactonifactor longoviformis, Leuconostoc gelidum, Sutterella wadsworthensis, or bacteria having 16S rDNA having at least 94.5%, 95%, 97%, 98%, 98.7% or 99% sequence identity to any one of the 16S rDNA thereof.

[0681] Embodiment 202. The method of embodiment 201, wherein the cancer is a bladder cancer.

[0682] Embodiment 203. The method of embodiment 198, wherein the bacteria comprises one or more bacteria selected from [Extibacter] muris, Alistipes onderdonkii, Collinsella intestinalis, Collinsella stercoris, Muricomes sp1, Neobitarella massiliensis, Prevotellamassilia sp2, Ruminococcaceae NG33 sp1, or bacteria having 16S rDNA having at least 94.5%, 95%, 97%, 98%, 98.7% or 99% sequence identity to any one of the 16S rDNA thereof.

[0683] Embodiment 204. The method of embodiment 203, wherein the cancer is a non-small cell lung cancer.

[0684] Embodiment 205. The method of embodiment 198, wherein the bacteria comprises one or more bacteria selected from [Adlercreutzia] equolifaciens group, [Anaerotruncus] rubiinfantis, [Romboutsia] timonensis, Alistipes finegoldii, Alistipes indistinctus, Alistipes obesi, Alistipes putredinis, Alistipes shahii, Anaerofustis stercorihominis, Anaeromassilibacillus sp3, Barnesiella intestinihominis, Bilophila wadsworthia, Blautia faecis, Coriobacteriaceae NG5 sp1, Frisingicoccus sp3, Gordonibacter pamelaeae, Harryflintia acetispora, Lachnospiraceae NG29 sp1, Marvinbryantia sp8, Massilimaliae massiliensis, Massilimaliae timonensis, Neglecta timonensis, Parabacteroides merdae, Peptoniphilaceae NG4 sp1, Peptoniphilaceae NG4 sp3, Pseudoflavonifractor capillosus, Ruminococcaceae NG12 sp1, Ruminococcaceae NG15 sp3, Ruminococcaceae NG17 sp3, Ruthenibacterium sp1, or bacteria having 16S rDNA having at least 94.5%, 95%, 97%, 98%, 98.7% or 99% sequence identity to any one of the 16S rDNA thereof.

[0685] Embodiment 206. The method of embodiment 205, wherein the cancer is a metastatic melanoma.

[0686] Embodiment 207. A method of treating or preventing or reducing risk of a cancer comprising administering an anticancer treatment to a subject determined to have a microbiome sample comprising one or more bacteria having a 16S rDNA sequence that is at least 85%, at least 90%, at least 95%, at least 96%, at least 97%, at least 98%, at least 99%, or 100% identical to a 16S rDNA sequence set forth in SEQ ID NOs: 1, 2, 3, 4, 5, 6, 7, 8, 9, 10, 11, 12, 13, 14, 15, 16, 17, 18, 19, 20, 21, 22, 23, 24, 25, 26, 27, 28, 29, 30, 31, 32, 33, 34, 35, 36, 37, 38, 39, 40, 41, 42, 43, 44, 45, 46, 47, 48, 49, 50, 51, 52, 53, 54, 55, 56, 57, 58, 59, 60, 61, 62, 63, 64, 65, 66, 67, 68, 69, 70, 71, 72, 73, 74, 75, 76, 77, 78, 79, 80, 81, 82, 83, 84, 85, 86, 87, 88, 89, 90, 91, 92, 93, 94, 95, 96, 97, 98, 99, 100, 101, 102, 103, 104, 105, 106, 107, 108, 109, 110, 111, 112, 113, 114, 115, 116, 117, 118, 119, 120, 121, 122, 123, 124, 125, 126, 127, 128, 129, 130, 131, 132, 133, 134, 135, 136, 137, 138, 139, 140, 141, 142, 143, 144, 145, 146, 147, 148, 149, 150, 151, 152, 153, 154, 155, 156, 157, 158, 159, 160, 161, 162, 163, 164, 165, 166, 167, 168, 169, 170, 171, 172, 173, 174, 175, 176, 177, 178, 179, 180, 181, 182, 183, 184, 185, 186, 601, 602, 603, 604, 605, 606, 607, 613, 614, 615, 616, 617, 618, 619, 622, 623, 640, 641, 643, 662, 663, 664, 665, 666, 667, 675, 676, 681, 688, 690, 691, 693, 696, 697, 699, 700, 702, 703, 704, 705, 706, 707, 708, 709, 710, 711, 712, 713, 714, 715, 716, 717, 718, 719, 720, 721, 722, 723, 724, 725, 726, 727, 728, 729, 730, 732, 733, 734, 735, 736, 737, 738, 739, 740, 741, 742, 743, 744, 746, 747, 748, 749, 750, 751, 752, 753, 754, 755, 756, 757, 758, 759, 760, 761, 762, 763, 765, 766, 767, 768, 769, 770, 771, 772 and 773.

[0687] Embodiment 208. The method of embodiment 207, wherein the bacteria comprises one or more bacteria having a 16S rDNA sequence that is at least 85%, at least 90%, at least 95%, at least 96%, at least 97%, at least 98%, at least 99%, or 100% identical to a 16S rDNA sequence set forth in SEQ ID NOs: 605, 613, 640, 641, 643, 662, 663, 664, 665, 666, 667, 681, 688, 690, 703, 732, 733, 736, 737, 738, 739, 740, 741, 742, 743, 744, 749, 754, 755, 756, 758, 765, 766, 767 and 773.

[0688] Embodiment 209. The method of embodiment 207, wherein the bacteria comprises one or more bacteria having a 16S rDNA sequence that is at least 85%, at least 90%, at least 95%, at least 96%, at least 97%, at least 98%, at least 99%, or 100% identical to a 16S rDNA sequence set forth in SEQ ID NOs: 601, 602, 603, 604, 606, 607, 613, 614, 615, 616, 617, 618, 619, 622, 623, 675, 676, 681, 691, 693, 696, 697, 699, 700, 702, 704, 705, 706, 707, 708, 709, 710, 711, 712, 713, 714, 715, 716, 717, 718, 719, 720, 721, 722, 723, 724, 725, 726, 727, 728, 729, 730, 734, 735, 736, 746, 747, 748, 749, 750, 751, 752, 753, 757, 759, 760, 761, 762, 763, 768, 769, 770, 771 and 772.

[0689] Embodiment 210. The method of embodiment 207, wherein the bacteria comprises one or more bacteria having a 16S rDNA sequence that is at least 85%, at least 90%, at least 95%, at least 96%, at least 97%, at least 98%, at least 99%, or 100% identical to a 16S rDNA sequence set forth in SEQ ID NOs: 2, 3, 6, 10, 12, 13, 19, 20, 21, 22, 23, 24, 34, 37, 38, 39, 42, 43, 44, 45, 46, 47, 48, 50, 51, 52, 55, 57, 58, 59, 64, 65, 66, 67, 73, 74, 75, 80, 82, 83, 84, 85, 86, 87, 88, 89, 90, 91, 92, 93, 94, 95, 96, 97, 98, 99, 100, 101, 104, 105, 106, 107, 108, 109, 110, 111, 112, 114, 115, 116, 120, 123, 129, 135, 136, 138, 139, 140, 141, 142, 143, 145, 146, 148, 153, 156, 157, 158, 161, 168, 169, 170, 173, 176, 178, 180 and 182.

[0690] Embodiment 211. The method of embodiment 210, wherein the cancer is a bladder cancer.

[0691] Embodiment 212. The method of embodiment 207, wherein the bacteria comprises one or more bacteria having a 16S rDNA sequence that is at least 85%, at least 90%, at least 95%, at least 96%, at least 97%, at least 98%, at least 99%, or 100% identical to a 16S rDNA sequence set forth in SEQ ID NOs: 16, 17, 18, 53, 54, 60, 77, 79, 81, 103, 119, 125, 132, 133, 134, 164, 175, 179 and 184.

[0692] Embodiment 213. The method of embodiment 212, wherein the cancer is a non-small cell lung cancer.

[0693] Embodiment 214. The method of embodiment 207, wherein the bacteria comprises one or more bacteria having a 16S rDNA sequence that is at least 85%, at least 90%, at least 95%, at least 96%, at least 97%, at least 98%, at least 99%, or 100% identical to a 16S rDNA sequence set forth in SEQ ID NOs: 1, 4, 5, 7, 8, 9, 11, 14, 15, 25, 26, 27, 28, 29, 30, 31, 32, 33, 35, 36, 40, 41, 61, 62, 68, 69, 70, 71, 72, 76, 78, 117, 118, 121, 122, 124, 127, 128, 130, 131, 137, 144, 147, 149, 150, 151, 152, 154, 155, 159, 160, 162, 163, 165, 166, 167, 171, 174, 177, 181, 183 and 186.

[0694] Embodiment 215. The method of embodiment 214, wherein the cancer is a metastatic melanoma.

[0695] Embodiment 216. The method of any of embodiments 196-215, wherein the subject is determined to not have a microbiome sample that comprises one or more bacteria selected from Holdemania massiliensis, Rothia mucilaginosa, Hungatella sp2, Prevotella copri, Campylobacter concisus, [Atopobium] parvulum, Alistipes onderdonkii, Angelakisella massiliensis, Christensenellaceae NG5 sp2, Cuneatibacter caecimuris, Desulfovibrio fairfieldensis, Ruminococcaceae NG13 sp1, Ruminococcaceae NG16 sp1, [Coprococcus] catus, [Lactobacillus] fermentum, [Romboutsia] timonensis, [Ruminococcus] bromii, [Ruminococcus] gauvreauii, Actinomyces graevenitzii, Agathobaculum butyriciproducens group, Bacteroides caccae, Bacteroides intestinalis, Bittarella massiliensis, Blautia luti group, Clostridium saudiense, Corynebacterium durum, Fusicatenibacter sp2, Lachnospiraceae NG30 sp3, Massilimaliae sp1, Monoglobus pectinilyticus, Rothia dentocariosa, Rothia mucilaginosa, Ruminococcaceae NG17 sp1, Schaalia odontolytica, Streptococcus australis, Streptococcus gordonii, Streptococcus infantis group, Streptococcus parasanguinis, Streptococcus salivarius group, [Atopobium] parvulum, [Ruminococcus]gnavus, Bacteroides dorei group, Blautia sp1, Schaalia sp2, or bacteria having 16S rDNA having at least 94.5%, 95%, 97%, 98%, 98.7% or 99% sequence identity to any one of the 16S rDNA thereof.

[0696] Embodiment 217. The method of any of embodiments 196-215, wherein the subject is determined to not have a microbiome sample that comprises Holdemania massiliensis, Rothia mucilaginosa, Hungatella sp2, Prevotella copri, Campylobacter concisus, or bacteria having 16S rDNA having at least 94.5%, 95%, 97%, 98%, 98.7% or 99% sequence identity to any one of the 16S rDNA thereof.

[0697] Embodiment 218. The method of any of embodiments 196-215, wherein the subject is determined to not have a microbiome sample that comprises Rothia mucilaginosa, [Atopobium] parvulum, Holdemania massiliensis, Prevotella copri, Campylobacter concisus, or bacteria having 16S rDNA having at least 94.5%, 95%, 97%, 98%, 98.7% or 99% sequence identity to any one of the 16S rDNA thereof.

[0698] Embodiment 219. The method of any of embodiments 196-215, wherein the subject is determined to not have a microbiome sample that comprises Alistipes onderdonkii, Angelakisella massiliensis, Christensenellaceae NG5 sp2, Cuneatibacter caecimuris, Desulfovibrio fairfieldensis, Ruminococcaceae NG13 sp1, Ruminococcaceae NG16 sp1, or bacteria having 16S rDNA having at least 94.5%, 95%, 97%, 98%, 98.7% or 99% sequence identity to any one of the 16S rDNA thereof.

[0699] Embodiment 220. The method of embodiment 219, wherein the cancer is a bladder cancer.

[0700] Embodiment 221. The method of any of embodiments 196-215, wherein the subject is determined to not have a microbiome sample that comprises [Coprococcus] catus, [Lactobacillus] fermentum, [Romboutsia] timonensis, [Ruminococcus] bromii, [Ruminococcus] gauvreauii, Actinomyces graevenitzii, Agathobaculum butyriciproducens group, Bacteroides caccae, Bacteroides intestinalis, Bittarella massiliensis, Blautia luti group, Clostridium saudiense, Corynebacterium durum, Fusicatenibacter sp2, Lachnospiraceae NG30 sp3, Massilimaliae sp1, Monoglobus pectinilyticus, Rothia dentocariosa, Rothia mucilaginosa, Ruminococcaceae NG17 sp1, Schaalia odontolytica, Streptococcus australis, Streptococcus gordonii, Streptococcus infantis group, Streptococcus parasanguinis, Streptococcus salivarius group, or bacteria having 16S rDNA having at least 94.5%, 95%, 97%, 98%, 98.7% or 99% sequence identity to any one of the 16S rDNA thereof.

[0701] Embodiment 222. The method of embodiment 221, wherein the cancer is a non-small cell lung cancer.

[0702] Embodiment 223. The method of any of embodiments 196-215, wherein the subject is determined to not have a microbiome sample that comprises [Atopobium]parvulum, [Ruminococcus] gnavus, Bacteroides dorei group, Blautia sp1, Schaalia sp2, or bacteria having 16S rDNA having at least 94.5%, 95%, 97%, 98%, 98.7% or 99% sequence identity to any one of the 16S rDNA thereof.

[0703] Embodiment 224. The method of embodiment 223, wherein the cancer is a metastatic melanoma.

[0704] Embodiment 225. The method of any of embodiments 196-215, wherein the subject is determined to not have a microbiome sample that comprises one or more bacteria having a 16S rDNA sequence that is at least 85%, at least 90%, at least 95%, at least 96%, at least 97%, at least 98%, at least 99%, or 100% identical to a 16S rDNA sequence set forth in SEQ ID NOs: 187, 188, 189, 190, 191, 192, 193, 194, 195, 196, 197, 198, 199, 200, 201, 202, 203, 204, 205, 206, 207, 208, 209, 210, 211, 212, 213, 214, 215, 216, 217, 218, 219, 220, 221, 222, 223, 224, 225, 226, 227, 228, 229, 230, 231, 232, 233, 234, 235, 236, 237, 238, 239, 240, 241, 242, 243, 244, 245, 246, 247, 248, 249, 250, 251, 252, 253, 254, 255, 256, 257, 258, 259, 260, 261, 262, 263, 264, 265, 266, 267, 268, 269, 270, 271, 272, 273, 274, 275, 276, 277, 278, 279, 280, 281, 282, 283, 284, 285, 286, 287, 288, 289, 290, 291, 292, 293, 294, 295, 296, 297, 298, 299, 300, 301, 302, 303, 304, 305, 306, 307, 308, 309, 310, 311, 312, 313, 314, 315, 316, 317, 318, 319, 320, 321, 322, 323, 324, 325, 326, 327, 328, 329, 330, 331, 332, 333, 334, 335, 336, 337, 338, 339, 340, 341, 342, 343, 344, 345, 346, 347, 348, 349, 350, 351, 352, 353, 354, 355, 356, 357, 358, 359, 360, 361, 362, 363, 364, 365, 366, 367, 368, 369, 370, 371, 372, 373, 374, 375, 376, 377, 378, 379, 380, 381, 382, 383, 384, 385, 386, 387, 388, 389, 390, 391, 392, 393, 394, 395, 396, 397, 398, 399, 400, 401, 402, 403, 404, 405, 406, 407, 408, 409, 410, 411, 412, 413, 414, 415, 416, 417, 418, 419, 420, 421, 422, 423, 424, 425, 426, 427, 428, 429, 430, 431, 432, 433, 434, 435, 436, 437, 438, 439, 440, 441, 442, 443, 444, 445, 446, 447, 448, 449, 450, 451, 452, 453, 454, 455, 456, 457, 458, 459, 460, 461, 462, 463, 464, 465, 466, 467, 468, 469, 470, 471, 472, 473, 474, 475, 476, 477, 478, 479, 480, 481, 482, 483, 484, 485, 486, 487, 488, 489, 490, 491, 492, 493, 494, 495, 496, 497, 498, 499, 500, 501, 502, 503, 504, 505, 506, 507, 508, 509, 510, 511, 512, 513, 514, 515, 516, 517, 518, 519, 520, 521, 522, 523, 524, 525, 526, 527, 528, 529, 530, 531, 532, 533, 534, 535, 536, 537, 538, 539, 540, 541, 542, 543, 544, 545, 546, 547, 548, 549, 550, 551, 552, 553, 554, 555, 556, 557, 558, 559, 560, 561, 562, 563, 564, 565, 566, 567, 568, 569, 570, 571, 572, 573, 574, 575, 576, 577, 578, 579, 580, 581, 582, 583, 584, 585, 586, 587, 588, 589, 590, 591, 592, 593, 594, 595, 596, 597, 598, 599, 600, 608, 609, 610, 611, 612, 620, 621, 622, 623, 624, 625, 626, 627, 628, 629, 630, 631, 632, 633, 634, 635, 636, 637, 638, 639, 642, 644, 645, 646, 647, 648, 649, 650, 651, 652, 653, 654, 655, 656, 657, 658, 659, 660, 661, 668, 669, 670, 671, 672, 673, 674, 677, 678, 679, 680, 682, 683, 684, 685, 686, 687, 689, 692, 694, 695, 698, 701, 731, 734 and 764.

[0705] Embodiment 226. The method of any of embodiments 196-215, wherein the subject is determined to not have a microbiome sample that comprises one or more bacteria having a 16S rDNA sequence that is at least 85%, at least 90%, at least 95%, at least 96%, at least 97%, at least 98%, at least 99%, or 100% identical to a 16S rDNA sequence set forth in SEQ ID NOs: 608, 610, 611, 612, 620, 621, 622, 623, 624, 625, 626, 630, 631, 632, 633, 634, 635, 636, 637, 638, 639, 642, 644, 645, 646, 647, 648, 649, 650, 651, 652, 653, 654, 655, 656, 657, 658, 659, 660, 661, 668, 669, 670, 671, 672, 673, 674, 677, 678, 679, 680, 682, 683, 684, 685, 686, 687, 689, 692, 694, 695, 698, 701, 731, 734 and 764.

[0706] Embodiment 227. The method of any of embodiments 196-215, wherein the subject is determined to not have a microbiome sample that comprises one or more bacteria having a 16S rDNA sequence that is at least 85%, at least 90%, at least 95%, at least 96%, at least 97%, at least 98%, at least 99%, or 100% identical to a 16S rDNA sequence set forth in SEQ ID NOs: 608, 609, 610, 611, 612, 620, 621, 624, 625, 626, 627, 628, 629, 630, 631, 632, 633, 634, 635, 636, 637, 638, 639, 642, 644, 645, 646, 647, 648, 649, 650, 651, 652, 653, 654, 655, 656, 657, 658, 659, 660, 661, 668, 669, 670, 671, 672, 673, 674, 677, 678, 679, 680, 682, 683, 684, 685, 686, 687, 689, 692, 694, 695, 698, 701, 731 and 764.

[0707] Embodiment 228. The method of any of embodiments 196-215, wherein the subject is determined to not have a microbiome sample that comprises one or more bacteria having a 16S rDNA sequence that is at least 85%, at least 90%, at least 95%, at least 96%, at least 97%, at least 98%, at least 99%, or 100% identical to a 16S rDNA sequence set forth in SEQ ID NOs: 188, 213, 245, 323, 331, 332, 376, 455, 509, 516, 538 and 582.

[0708] Embodiment 229. The method of embodiment 228, wherein the cancer is a bladder cancer.

[0709] Embodiment 230. The method of any of embodiments 196-215, wherein the subject is determined to not have a microbiome sample that comprises one or more bacteria having a 16S rDNA sequence that is at least 85%, at least 90%, at least 95%, at least 96%, at least 97%, at least 98%, at least 99%, or 100% identical to a 16S rDNA sequence set forth in SEQ ID NOs: 187, 189, 190, 191, 192, 193, 194, 195, 196, 197, 198, 199, 200, 201, 202, 203, 204, 205, 211, 214, 216, 217, 218, 219, 220, 221, 222, 224, 225, 226, 227, 228, 229, 230, 231, 232, 233, 234, 235, 236, 237, 238, 239, 240, 241, 242, 243, 244, 246, 247, 248, 253, 254, 255, 257, 258, 259, 263, 264, 265, 267, 268, 269, 270, 271, 272, 273, 277, 283, 286, 289, 290, 291, 292, 293, 294, 295, 296, 297, 298, 299, 300, 301, 302, 303, 304, 305, 306, 307, 308, 309, 310, 311, 312, 313, 314, 315, 316, 317, 318, 319, 320, 321, 322, 324, 325, 326, 327, 328, 329, 330, 333, 334, 335, 336, 337, 338, 339, 340, 341, 342, 343, 344, 345, 346, 347, 348, 349, 350, 351, 352, 353, 354, 355, 356, 357, 358, 359, 360, 361, 362, 363, 364, 365, 366, 367, 368, 369, 370, 371, 372, 373, 374, 375, 377, 378, 379, 380, 381, 382, 383, 384, 385, 386, 387, 389, 390, 391, 392, 393, 394, 395, 396, 397, 398, 399, 400, 401, 402, 403, 409, 410, 411, 412, 413, 414, 415, 418, 421, 424, 425, 428, 429, 430, 431, 432, 433, 434, 435, 436, 437, 438, 439, 440, 441, 442, 443, 444, 445, 447, 449, 450, 452, 453, 454, 456, 457, 458, 460, 462, 463, 464, 465, 466, 467, 468, 469, 471, 472, 473, 474, 475, 476, 478, 479, 480, 481, 483, 484, 486, 487, 488, 489, 490, 491, 492, 493, 494, 495, 496, 497, 498, 499, 500, 501, 502, 503, 504, 505, 506, 507, 508, 510, 511, 512, 513, 514, 515, 520, 521, 522, 523, 524, 525, 526, 527, 528, 529, 530, 531, 537, 539, 540, 542, 543, 544, 545, 546, 547, 548, 550, 551, 552, 553, 554, 555, 560, 561, 564, 565, 566, 573, 574, 577, 579, 581, 583, 584, 585, 586, 587, 588, 589, 591, 594, 595, 596, 597, 598, 599 and 600.

[0710] Embodiment 231. The method of embodiment 230, wherein the cancer is a non-small cell lung cancer.

[0711] Embodiment 232. The method of any of embodiments 196-215, wherein the subject is determined to not have a microbiome sample that comprises one or more bacteria having a 16S rDNA sequence that is at least 85%, at least 90%, at least 95%, at least 96%, at least 97%, at least 98%, at least 99%, or 100% identical to a 16S rDNA sequence set forth in SEQ ID NOs: 206, 207, 208, 209, 210, 212, 215, 223, 249, 250, 251, 252, 256, 260, 261, 262, 266, 274, 275, 276, 278, 279, 280, 281, 282, 284, 285, 287, 388, 404, 405, 406, 407, 408, 416, 417, 419, 420, 422, 423, 426, 427, 446, 448, 451, 459, 461, 482, 485, 517, 518, 519, 532, 533, 534, 535, 536, 549, 556, 557, 558, 559, 562, 563, 567, 568, 569, 570, 571, 572, 575, 576, 580, 590 and 593.

[0712] Embodiment 233. The method of embodiment 232, wherein the cancer is a metastatic melanoma.

[0713] Embodiment 234. A method comprising evaluating a microbiome profile in a sample from a subject for bacteria that have 16S rDNA sequence identity of at least 94.5% to 16S rDNA sequences of species belonging to one or more of the families Sutterellaceae, Coriobacteriaceae, Akkermansiaceae, Campylobacteraceae, or Desulfovibrionaceae.

[0714] Embodiment 235. The method of embodiment 234, wherein the bacteria have 16S rDNA sequence identity of at least 95%, 97%, 98%, 98.7% or 99% to 16S rDNA sequences of species belonging to one or more of the families Sutterellaceae, Coriobacteriaceae, Akkermansiaceae, Campylobacteraceae, or Desulfovibrionaceae.

[0715] Embodiment 236. A method comprising evaluating a microbiome profile in a sample from a subject for bacteria selected from Akkermansia muciniphila, Dysosmobacter welbionis, Anaerobutyricum hallii, Blautia caecimuris, Holdemania filiformis, Acetatifactor sp1, Ruminococcaceae NG14 sp1, Hungatella sp2, Bifidobacterium catenulatum group, Blautia wexlerae, Hungatella sp1, Intestinibacter bartlettii, Lachnospiraceae NG31 sp1, Lactonifactor longoviformis, Leuconostoc gelidum, Sutterella wadsworthensis, [Extibacter]muris, Alistipes onderdonkii, Collinsella intestinalis, Collinsella stercoris, Muricomes sp1, Neobitarella massiliensis, Prevotellamassilia sp2, Ruminococcaceae NG33 sp1, [Adlercreutzia] equolifaciens group, [Anaerotruncus] rubiinfantis, [Romboutsia] timonensis, Alistipes finegoldii, Alistipes indistinctus, Alistipes obesi, Alistipes putredinis, Alistipes shahii, Anaerofustis stercorihominis, Anaeromassilibacillus sp3, Barnesiella intestinihominis, Bilophila wadsworthia, Blautia faecis, Coriobacteriaceae NG5 sp1, Frisingicoccus sp3, Gordonibacter pamelaeae, Harryflintia acetispora, Lachnospiraceae NG29 sp1, Marvinbryantia sp8, Massilimaliae massiliensis, Massilimaliae timonensis, Neglecta timonensis, Parabacteroides merdae, Peptoniphilaceae NG4 sp1, Peptoniphilaceae NG4 sp3, Pseudoflavonifractor capillosus, Ruminococcaceae NG12 sp1, Ruminococcaceae NG15 sp3, Ruminococcaceae NG17 sp3, Ruthenibacterium sp1, or bacteria having 16S rDNA having at least 94.5%, 95%, 97%, 98%, 98.7% or 99% sequence identity to any one of the 16S rDNA thereof.

[0716] Embodiment 237. The method of embodiment 236, wherein the bacteria comprises one or more bacteria selected from Akkermansia muciniphila, Dysosmobacter welbionis, Anaerobutyricum hallii, Blautia caecimuris, Holdemania filiformis, or bacteria having 16S rDNA having at least 94.5%, 95%, 97%, 98%, 98.7% or 99% sequence identity to any one of the 16S rDNA thereof.

[0717] Embodiment 238. The method of embodiment 236, wherein the bacteria comprises one or more bacteria selected from Acetatifactor sp1, Blautia wexlerae, Ruminococcaceae NG14 sp1, Hungatella sp2, Holdemania filiformis, or bacteria having 16S rDNA having at least 94.5%, 95%, 97%, 98%, 98.7% or 99% sequence identity to any one of the 16S rDNA thereof.

[0718] Embodiment 239. The method of embodiment 236, wherein the bacteria comprises one or more bacteria selected from Bifidobacterium catenulatum group, Blautia wexlerae, Hungatella sp1, Intestinibacter bartlettii, Lachnospiraceae NG31 sp1, Lactonifactor longoviformis, Leuconostoc gelidum, Sutterella wadsworthensis, or bacteria having 16S rDNA having at least 94.5%, 95%, 97%, 98%, 98.7% or 99% sequence identity to any one of the 16S rDNA thereof.

[0719] Embodiment 240. The method of embodiment 236, wherein the bacteria comprises one or more bacteria selected from [Extibacter] muris, Alistipes onderdonkii, Collinsella intestinalis, Collinsella stercoris, Muricomes sp1, Neobitarella massiliensis, Prevotellamassilia sp2, Ruminococcaceae NG33 sp1, or bacteria having 16S rDNA having at least 94.5%, 95%, 97%, 98%, 98.7% or 99% sequence identity to any one of the 16S rDNA thereof.

[0720] Embodiment 241. The method of embodiment 236, wherein the bacteria comprises one or more bacteria selected from [Adlercreutzia] equolifaciens group, [Anaerotruncus] rubiinfantis, [Romboutsia] timonensis, Alistipes finegoldii, Alistipes indistinctus, Alistipes obesi, Alistipes putredinis, Alistipes shahii, Anaerofustis stercorihominis, Anaeromassilibacillus sp3, Barnesiella intestinihominis, Bilophila wadsworthia, Blautia faecis, Coriobacteriaceae NG5 sp1, Frisingicoccus sp3, Gordonibacter pamelaeae, Harryflintia acetispora, Lachnospiraceae NG29 sp1, Marvinbryantia sp8, Massilimaliae massiliensis, Massilimaliae timonensis, Neglecta timonensis, Parabacteroides merdae, Peptoniphilaceae NG4 sp1, Peptoniphilaceae NG4 sp3, Pseudoflavonifractor capillosus, Ruminococcaceae NG12 sp1, Ruminococcaceae NG15 sp3, Ruminococcaceae NG17 sp3, Ruthenibacterium sp1, or bacteria having 16S rDNA having at least 94.5%, 95%, 97%, 98%, 98.7% or 99% sequence identity to any one of the 16S rDNA thereof.

[0721] Embodiment 242. A method comprising evaluating a microbiome profile in a sample from a subject for bacteria having a 16S rDNA sequence that is at least 85%, at least 90%, at least 95%, at least 96%, at least 97%, at least 98%, at least 99%, or 100% identical to a 16S rDNA sequence set forth in SEQ ID NOs: 1, 2, 3, 4, 5, 6, 7, 8, 9, 10, 11, 12, 13, 14, 15, 16, 17, 18, 19, 20, 21, 22, 23, 24, 25, 26, 27, 28, 29, 30, 31, 32, 33, 34, 35, 36, 37, 38, 39, 40, 41, 42, 43, 44, 45, 46, 47, 48, 49, 50, 51, 52, 53, 54, 55, 56, 57, 58, 59, 60, 61, 62, 63, 64, 65, 66, 67, 68, 69, 70, 71, 72, 73, 74, 75, 76, 77, 78, 79, 80, 81, 82, 83, 84, 85, 86, 87, 88, 89, 90, 91, 92, 93, 94, 95, 96, 97, 98, 99, 100, 101, 102, 103, 104, 105, 106, 107, 108, 109, 110, 111, 112, 113, 114, 115, 116, 117, 118, 119, 120, 121, 122, 123, 124, 125, 126, 127, 128, 129, 130, 131, 132, 133, 134, 135, 136, 137, 138, 139, 140, 141, 142, 143, 144, 145, 146, 147, 148, 149, 150, 151, 152, 153, 154, 155, 156, 157, 158, 159, 160, 161, 162, 163, 164, 165, 166, 167, 168, 169, 170, 171, 172, 173, 174, 175, 176, 177, 178, 179, 180, 181, 182, 183, 184, 185, 186, 601, 602, 603, 604, 605, 606, 607, 613, 614, 615, 616, 617, 618, 619, 622, 623, 640, 641, 643, 662, 663, 664, 665, 666, 667, 675, 676, 681, 688, 690, 691, 693, 696, 697, 699, 700, 702, 703, 704, 705, 706, 707, 708, 709, 710, 711, 712, 713, 714, 715, 716, 717, 718, 719, 720, 721, 722, 723, 724, 725, 726, 727, 728, 729, 730, 732, 733, 734, 735, 736, 737, 738, 739, 740, 741, 742, 743, 744, 746, 747, 748, 749, 750, 751, 752, 753, 754, 755, 756, 757, 758, 759, 760, 761, 762, 763, 765, 766, 767, 768, 769, 770, 771, 772 and 773.

[0722] Embodiment 243. The method of embodiment 242, wherein the bacteria comprises one or more bacteria having a 16S rDNA sequence that is at least 85%, at least 90%, at least 95%, at least 96%, at least 97%, at least 98%, at least 99%, or 100% identical to a 16S rDNA sequence set forth in SEQ ID NOs: 605, 613, 640, 641, 643, 662, 663, 664, 665, 666, 667, 681, 688, 690, 703, 732, 733, 736, 737, 738, 739, 740, 741, 742, 743, 744, 749, 754, 755, 756, 758, 765, 766, 767 and 773.

[0723] Embodiment 244. The method of embodiment 242, wherein the bacteria comprises one or more bacteria having a 16S rDNA sequence that is at least 85%, at least 90%, at least 95%, at least 96%, at least 97%, at least 98%, at least 99%, or 100% identical to a 16S rDNA sequence set forth in SEQ ID NOs: 601, 602, 603, 604, 606, 607, 613, 614, 615, 616, 617, 618, 619, 622, 623, 675, 676, 681, 691, 693, 696, 697, 699, 700, 702, 704, 705, 706, 707, 708, 709, 710, 711, 712, 713, 714, 715, 716, 717, 718, 719, 720, 721, 722, 723, 724, 725, 726, 727, 728, 729, 730, 734, 735, 736, 746, 747, 748, 749, 750, 751, 752, 753, 757, 759, 760, 761, 762, 763, 768, 769, 770, 771 and 772.

[0724] Embodiment 245. The method of embodiment 242, wherein the bacteria comprises one or more bacteria having a 16S rDNA sequence that is at least 85%, at least 90%, at least 95%, at least 96%, at least 97%, at least 98%, at least 99%, or 100% identical to a 16S rDNA sequence set forth in SEQ ID NOs: 2, 3, 6, 10, 12, 13, 19, 20, 21, 22, 23, 24, 34, 37, 38, 39, 42, 43, 44, 45, 46, 47, 48, 50, 51, 52, 55, 57, 58, 59, 64, 65, 66, 67, 73, 74, 75, 80, 82, 83, 84, 85, 86, 87, 88, 89, 90, 91, 92, 93, 94, 95, 96, 97, 98, 99, 100, 101, 104, 105, 106, 107, 108, 109, 110, 111, 112, 114, 115, 116, 120, 123, 129, 135, 136, 138, 139, 140, 141, 142, 143, 145, 146, 148, 153, 156, 157, 158, 161, 168, 169, 170, 173, 176, 178, 180 and 182.

[0725] Embodiment 246. The method of embodiment 242, wherein the bacteria comprises one or more bacteria having a 16S rDNA sequence that is at least 85%, at least 90%, at least 95%, at least 96%, at least 97%, at least 98%, at least 99%, or 100% identical to a 16S rDNA sequence set forth in SEQ ID NOs: 16, 17, 18, 53, 54, 60, 77, 79, 81, 103, 119, 125, 132, 133, 134, 164, 175, 179 and 184.

[0726] Embodiment 247. The method of embodiment 242, wherein the bacteria comprises one or more bacteria having a 16S rDNA sequence that is at least 85%, at least 90%, at least 95%, at least 96%, at least 97%, at least 98%, at least 99%, or 100% identical to a 16S rDNA sequence set forth in SEQ ID NOs: 1, 4, 5, 7, 8, 9, 11, 14, 15, 25, 26, 27, 28, 29, 30, 31, 32, 33, 35, 36, 40, 41, 61, 62, 68, 69, 70, 71, 72, 76, 78, 117, 118, 121, 122, 124, 127, 128, 130, 131, 137, 144, 147, 149, 150, 151, 152, 154, 155, 159, 160, 162, 163, 165, 166, 167, 171, 174, 177, 181, 183 and 186.

[0727] Embodiment 248. The method of any of embodiments 234-247, further comprising evaluating the microbiome profile for bacteria that comprises one or more bacteria selected from Holdemania massiliensis, Rothia mucilaginosa, Hungatella sp2, Prevotella copri, Campylobacter concisus, [Atopobium] parvulum, Alistipes onderdonkii, Angelakisella massiliensis, Christensenellaceae NG5 sp2, Cuneatibacter caecimuris, Desulfovibrio fairfieldensis, Ruminococcaceae NG13 sp1, Ruminococcaceae NG16 sp1, [Coprococcus] catus, [Lactobacillus] fermentum, [Romboutsia] timonensis, [Ruminococcus]bromii, [Ruminococcus] gauvreauii, Actinomyces graevenitzii, Agathobaculum butyriciproducens group, Bacteroides caccae, Bacteroides intestinalis, Bittarella massiliensis, Blautia luti group, Clostridium saudiense, Corynebacterium durum, Fusicatenibacter sp2, Lachnospiraceae NG30 sp3, Massilimaliae sp1, Monoglobus pectinilyticus, Rothia dentocariosa, Rothia mucilaginosa, Ruminococcaceae NG17 sp1, Schaalia odontolytica, Streptococcus australis, Streptococcus gordonii, Streptococcus infantis group, Streptococcus parasanguinis, Streptococcus salivarius group, [Atopobium]parvulum, [Ruminococcus] gnavus, Bacteroides dorei group, Blautia sp1, Schaalia sp2, or bacteria having 16S rDNA having at least 94.5%, 95%, 97%, 98%, 98.7% or 99% sequence identity to any one of the 16S rDNA thereof.

[0728] Embodiment 249. The method of any of embodiments 234-247, further comprising evaluating the microbiome profile for bacteria that comprises Holdemania massiliensis, Rothia mucilaginosa, Hungatella sp2, Prevotella copri, Campylobacter concisus, or bacteria having 16S rDNA having at least 94.5%, 95%, 97%, 98%, 98.7% or 99% sequence identity to any one of the 16S rDNA thereof.

[0729] Embodiment 250. The method of any of embodiments 234-247, further comprising evaluating the microbiome profile for bacteria that comprises Rothia mucilaginosa, [Atopobium] parvulum, Holdemania massiliensis, Prevotella copri, Campylobacter concisus, or bacteria having 16S rDNA having at least 94.5%, 95%, 97%, 98%, 98.7% or 99% sequence identity to any one of the 16S rDNA thereof.

[0730] Embodiment 251. The method of any of embodiments 234-247, further comprising evaluating the microbiome profile for bacteria that comprises Alistipes onderdonkii, Angelakisella massiliensis, Christensenellaceae NG5 sp2, Cuneatibacter caecimuris, Desulfovibrio fairfieldensis, Ruminococcaceae NG13 sp1, Ruminococcaceae NG16 sp1, or bacteria having 16S rDNA having at least 94.5%, 95%, 97%, 98%, 98.7% or 99% sequence identity to any one of the 16S rDNA thereof.

[0731] Embodiment 252. The method of any of embodiments 234-247, further comprising evaluating the microbiome profile for bacteria that comprises [Coprococcus] catus, [Lactobacillus] fermentum, [Romboutsia] timonensis, [Ruminococcus] bromii, [Ruminococcus] gauvreauii, Actinomyces graevenitzii, Agathobaculum butyriciproducens group, Bacteroides caccae, Bacteroides intestinalis, Bittarella massiliensis, Blautia luti group, Clostridium saudiense, Corynebacterium durum, Fusicatenibacter sp2, Lachnospiraceae NG30 sp3, Massilimaliae sp1, Monoglobus pectinilyticus, Rothia dentocariosa, Rothia mucilaginosa, Ruminococcaceae NG17 sp1, Schaalia odontolytica, Streptococcus australis, Streptococcus gordonii, Streptococcus infantis group, Streptococcus parasanguinis, Streptococcus salivarius group, or bacteria having 16S rDNA having at least 94.5%, 95%, 97%, 98%, 98.7% or 99% sequence identity to any one of the 16S rDNA thereof.

[0732] Embodiment 253. The method of any of embodiments 234-247, further comprising evaluating the microbiome profile for bacteria that comprises [Atopobium]parvulum, [Ruminococcus] gnavus, Bacteroides dorei group, Blautia sp1, Schaalia sp2, or bacteria having 16S rDNA having at least 94.5%, 95%, 97%, 98%, 98.7% or 99% sequence identity to any one of the 16S rDNA thereof.

[0733] Embodiment 254. The method of any of embodiments 234-247, further comprising evaluating the microbiome profile for bacteria that comprises one or more bacteria having a 16S rDNA sequence that is at least 85%, at least 90%, at least 95%, at least 96%, at least 97%, at least 98%, at least 99%, or 100% identical to a 16S rDNA sequence set forth in SEQ ID NOs: 187, 188, 189, 190, 191, 192, 193, 194, 195, 196, 197, 198, 199, 200, 201, 202, 203, 204, 205, 206, 207, 208, 209, 210, 211, 212, 213, 214, 215, 216, 217, 218, 219, 220, 221, 222, 223, 224, 225, 226, 227, 228, 229, 230, 231, 232, 233, 234, 235, 236, 237, 238, 239, 240, 241, 242, 243, 244, 245, 246, 247, 248, 249, 250, 251, 252, 253, 254, 255, 256, 257, 258, 259, 260, 261, 262, 263, 264, 265, 266, 267, 268, 269, 270, 271, 272, 273, 274, 275, 276, 277, 278, 279, 280, 281, 282, 283, 284, 285, 286, 287, 288, 289, 290, 291, 292, 293, 294, 295, 296, 297, 298, 299, 300, 301, 302, 303, 304, 305, 306, 307, 308, 309, 310, 311, 312, 313, 314, 315, 316, 317, 318, 319, 320, 321, 322, 323, 324, 325, 326, 327, 328, 329, 330, 331, 332, 333, 334, 335, 336, 337, 338, 339, 340, 341, 342, 343, 344, 345, 346, 347, 348, 349, 350, 351, 352, 353, 354, 355, 356, 357, 358, 359, 360, 361, 362, 363, 364, 365, 366, 367, 368, 369, 370, 371, 372, 373, 374, 375, 376, 377, 378, 379, 380, 381, 382, 383, 384, 385, 386, 387, 388, 389, 390, 391, 392, 393, 394, 395, 396, 397, 398, 399, 400, 401, 402, 403, 404, 405, 406, 407, 408, 409, 410, 411, 412, 413, 414, 415, 416, 417, 418, 419, 420, 421, 422, 423, 424, 425, 426, 427, 428, 429, 430, 431, 432, 433, 434, 435, 436, 437, 438, 439, 440, 441, 442, 443, 444, 445, 446, 447, 448, 449, 450, 451, 452, 453, 454, 455, 456, 457, 458, 459, 460, 461, 462, 463, 464, 465, 466, 467, 468, 469, 470, 471, 472, 473, 474, 475, 476, 477, 478, 479, 480, 481, 482, 483, 484, 485, 486, 487, 488, 489, 490, 491, 492, 493, 494, 495, 496, 497, 498, 499, 500, 501, 502, 503, 504, 505, 506, 507, 508, 509, 510, 511, 512, 513, 514, 515, 516, 517, 518, 519, 520, 521, 522, 523, 524, 525, 526, 527, 528, 529, 530, 531, 532, 533, 534, 535, 536, 537, 538, 539, 540, 541, 542, 543, 544, 545, 546, 547, 548, 549, 550, 551, 552, 553, 554, 555, 556, 557, 558, 559, 560, 561, 562, 563, 564, 565, 566, 567, 568, 569, 570, 571, 572, 573, 574, 575, 576, 577, 578, 579, 580, 581, 582, 583, 584, 585, 586, 587, 588, 589, 590, 591, 592, 593, 594, 595, 596, 597, 598, 599, 600, 608, 609, 610, 611, 612, 620, 621, 622, 623, 624, 625, 626, 627, 628, 629, 630, 631, 632, 633, 634, 635, 636, 637, 638, 639, 642, 644, 645, 646, 647, 648, 649, 650, 651, 652, 653, 654, 655, 656, 657, 658, 659, 660, 661, 668, 669, 670, 671, 672, 673, 674, 677, 678, 679, 680, 682, 683, 684, 685, 686, 687, 689, 692, 694, 695, 698, 701, 731, 734 and 764.

[0734] Embodiment 255. The method of any of embodiments 234-247, further comprising evaluating the microbiome profile for bacteria that comprises one or more bacteria having a 16S rDNA sequence that is at least 85%, at least 90%, at least 95%, at least 96%, at least 97%, at least 98%, at least 99%, or 100% identical to a 16S rDNA sequence set forth in SEQ ID NOs: 608, 610, 611, 612, 620, 621, 622, 623, 624, 625, 626, 630, 631, 632, 633, 634, 635, 636, 637, 638, 639, 642, 644, 645, 646, 647, 648, 649, 650, 651, 652, 653, 654, 655, 656, 657, 658, 659, 660, 661, 668, 669, 670, 671, 672, 673, 674, 677, 678, 679, 680, 682, 683, 684, 685, 686, 687, 689, 692, 694, 695, 698, 701, 731, 734 and 764.

[0735] Embodiment 256. The method of any of embodiments 234-247, further comprising evaluating the microbiome profile for bacteria that comprises one or more bacteria having a 16S rDNA sequence that is at least 85%, at least 90%, at least 95%, at least 96%, at least 97%, at least 98%, at least 99%, or 100% identical to a 16S rDNA sequence set forth in SEQ ID NOs: 608, 609, 610, 611, 612, 620, 621, 624, 625, 626, 627, 628, 629, 630, 631, 632, 633, 634, 635, 636, 637, 638, 639, 642, 644, 645, 646, 647, 648, 649, 650, 651, 652, 653, 654, 655, 656, 657, 658, 659, 660, 661, 668, 669, 670, 671, 672, 673, 674, 677, 678, 679, 680, 682, 683, 684, 685, 686, 687, 689, 692, 694, 695, 698, 701, 731 and 764.

[0736] Embodiment 257. The method of any of embodiments 234-247, further comprising evaluating the microbiome profile for bacteria that comprises one or more bacteria having a 16S rDNA sequence that is at least 85%, at least 90%, at least 95%, at least 96%, at least 97%, at least 98%, at least 99%, or 100% identical to a 16S rDNA sequence set forth in SEQ ID NOs: 188, 213, 245, 323, 331, 332, 376, 455, 509, 516, 538 and 582.

[0737] Embodiment 258. The method of any of embodiments 234-247, further comprising evaluating the microbiome profile for bacteria that comprises one or more bacteria having a 16S rDNA sequence that is at least 85%, at least 90%, at least 95%, at least 96%, at least 97%, at least 98%, at least 99%, or 100% identical to a 16S rDNA sequence set forth in SEQ ID NOs: 187, 189, 190, 191, 192, 193, 194, 195, 196, 197, 198, 199, 200, 201, 202, 203, 204, 205, 211, 214, 216, 217, 218, 219, 220, 221, 222, 224, 225, 226, 227, 228, 229, 230, 231, 232, 233, 234, 235, 236, 237, 238, 239, 240, 241, 242, 243, 244, 246, 247, 248, 253, 254, 255, 257, 258, 259, 263, 264, 265, 267, 268, 269, 270, 271, 272, 273, 277, 283, 286, 289, 290, 291, 292, 293, 294, 295, 296, 297, 298, 299, 300, 301, 302, 303, 304, 305, 306, 307, 308, 309, 310, 311, 312, 313, 314, 315, 316, 317, 318, 319, 320, 321, 322, 324, 325, 326, 327, 328, 329, 330, 333, 334, 335, 336, 337, 338, 339, 340, 341, 342, 343, 344, 345, 346, 347, 348, 349, 350, 351, 352, 353, 354, 355, 356, 357, 358, 359, 360, 361, 362, 363, 364, 365, 366, 367, 368, 369, 370, 371, 372, 373, 374, 375, 377, 378, 379, 380, 381, 382, 383, 384, 385, 386, 387, 389, 390, 391, 392, 393, 394, 395, 396, 397, 398, 399, 400, 401, 402, 403, 409, 410, 411, 412, 413, 414, 415, 418, 421, 424, 425, 428, 429, 430, 431, 432, 433, 434, 435, 436, 437, 438, 439, 440, 441, 442, 443, 444, 445, 447, 449, 450, 452, 453, 454, 456, 457, 458, 460, 462, 463, 464, 465, 466, 467, 468, 469, 471, 472, 473, 474, 475, 476, 478, 479, 480, 481, 483, 484, 486, 487, 488, 489, 490, 491, 492, 493, 494, 495, 496, 497, 498, 499, 500, 501, 502, 503, 504, 505, 506, 507, 508, 510, 511, 512, 513, 514, 515, 520, 521, 522, 523, 524, 525, 526, 527, 528, 529, 530, 531, 537, 539, 540, 542, 543, 544, 545, 546, 547, 548, 550, 551, 552, 553, 554, 555, 560, 561, 564, 565, 566, 573, 574, 577, 579, 581, 583, 584, 585, 586, 587, 588, 589, 591, 594, 595, 596, 597, 598, 599 and 600.

[0738] Embodiment 259. The method of any of embodiments 234-247, further comprising evaluating the microbiome profile for bacteria that comprises one or more bacteria having a 16S rDNA sequence that is at least 85%, at least 90%, at least 95%, at least 96%, at least 97%, at least 98%, at least 99%, or 100% identical to a 16S rDNA sequence set forth in SEQ ID NOs: 206, 207, 208, 209, 210, 212, 215, 223, 249, 250, 251, 252, 256, 260, 261, 262, 266, 274, 275, 276, 278, 279, 280, 281, 282, 284, 285, 287, 388, 404, 405, 406, 407, 408, 416, 417, 419, 420, 422, 423, 426, 427, 446, 448, 451, 459, 461, 482, 485, 517, 518, 519, 532, 533, 534, 535, 536, 549, 556, 557, 558, 559, 562, 563, 567, 568, 569, 570, 571, 572, 575, 576, 580, 590 and 593.

[0739] Embodiment 260. The method of any of embodiments 234-259, wherein the method further comprises comparing the microbiome profile to a control microbiome.

[0740] Embodiment 261. The method of embodiment 260, wherein the control microbiome comprises a microbiome sample from a subject determined to be a responder to an anticancer treatment.

[0741] Embodiment 262. The method of embodiment 261, wherein the comparing comprises comparison of the bacteria from any of embodiments 234-247 to the control microbiome from a subject determined to be a responder to an anticancer treatment.

[0742] Embodiment 263. The method of embodiment 260, wherein the control microbiome comprises a microbiome sample from a subject determined to be a non-responder to an anticancer treatment.

[0743] Embodiment 264. The method of embodiment 263, wherein the comparing comprises comparison of the bacteria from any of embodiments 248-259 to the control microbiome from a subject determined to be a non-responder to an anticancer treatment.

### EXAMPLES

[0744] The following examples are included to demonstrate various aspects of the present disclosure. It should be appreciated by those of skill in the art that the techniques disclosed in the examples that follow represent techniques discovered by the inventors to function well in the practice of the disclosure, and thus can be considered to constitute preferred modes for its practice. However, those of skill in the art should, in light of the present disclosure, appreciate that many changes can be made in the specific examples which are disclosed and still obtain a like or similar result without departing from the spirit and scope of the disclosure.

### Example 1: Characterization of Microbiomes Associated with Immunotherapy

[0745] Gut microbiome samples were obtained from patients with metastatic melanoma, lung cancer, urothelial cancer, or renal cell carcinoma immediately before CPI therapy was initiated and also while on treatment. The samples were sequenced using whole metagenome sequencing. Clinical characteristics were obtained from patient medical records; clinical response to CPI was defined as patients obtaining a partial or complete response or remaining on therapy for more than 6 months.

[0746] 97 patients were enrolled and provided samples in this prospective study. The cohorts consisted of patients with metastatic lung cancer (n=44), urothelial cancer (n=25), renal cell carcinoma (RCC) (n=10), or melanoma (n=18). Patients received anti-PD1/anti-PDL1 monotherapy (n=54), anti-PD1+anti-CTLA4 combination therapy (n=17), or a combination of anti-PD1 and chemotherapy (n=26). Clinical response was observed in patients, including partial or complete response (45%) and on treatment for more than 6 months (55%, with 31% on treatment for more than 1 year). The patient characteristics are recorded in Table 1. Table 1 shows the number of patients providing microbiome samples and their therapy outcomes, i.e., responders (R) and non-responders (NR), and specific cancer types, i.e., bladder cancer, lung cancer, melanoma, and renal cell carcinoma (RCC).

TABLE 1
Number of patients providing microbiome
samples and their therapy outcomes

| Cancer Type | Responders (R) | Non-Responders (NR) |
|---|---|---|
| Lung | 22 | 22 |
| Bladder | 13 | 12 |
| Renal Cell | 8 | 2 |
| Carcinoma (RCC) | | |
| Melanoma | 11 | 7 |

[0747] Whole metagenomics sequencing (WMS) raw data were obtained and analyzed as described herein. The WMS sequences were generated using fecal microbiome samples from patients of various types of cancers who were classified as responders or non-responders to immunothepraties. The raw data sets were pre-processed following the guidelines set by the Human Microbiome Project. The pre-processing analysis was used to perform error analysis and removal of low-quality sequences and other undesirable data, such as sequences present from PCR amplification steps. Species-level taxonomic profiles of each WMS sample were obtained using MetaPhlAn 2 with an expanded, proprietary reference database. Briefly, the software tool is used to align each sample to a curated reference database of marker genes, each of which is unique to a bacterial species. The reference database contains more than one million marker genes, representing more than thirteen thousand bacterial species. The alpha diversity of microbiomes, e.g., inversed Simpson index and spore species richness, of WMS samples from responders (R) and non-responders (NR) is shown in FIG. 1.

[0748] Abundance data were obtained after profiling WMS data. For a given sample, the sum of the abundances of all species sums to 100. Prevalence data are discretized so that species are analyzed only as being either present or absent. This is a population-wide data type, meaning that it can only be assessed for a set of samples and not individually for any given sample. For example, the prevalence of a species that appears in 4 out of 10 responders is 40%.

[0749] Microbiome community analysis, i.e., Bray-Curtis, Jaccard, and weighted and unweighted Unifrac, was conducted to characterize these microbiome samples and to identify microbiome signatures associated with responses in the immunotherapies across various cancer types.

[0750] Mann-Whitney U tests were conducted on continuous or integer-based data (e.g., relative abundance, species diversity), while Fisher's exact tests were conducted on categorical data (prevalence data). Wilcoxon rank-sum tests were conducted to compare the axis values between responders and non-responders of weighted UniFrac or unweighted UniFrac analysis.

[0751] Combining all cancer types, the microbiomes of responder and non-responder groups did not differ significantly by beta diversity. According to NMDS plots of the abundance-based Bray-Curtis dissimilarity index (FIGS. 2A and 2C) or the prevalence-based binary Jaccard distance (FIGS. 2B and 2D), the microbiomes did not cluster by specific cancer types or outcomes. The samples from each patient (linked by solid lines in FIGS. 2C and 2D) or as a whole (FIG. 2E) at different time points (i.e., pre-treatment and post treatment) did not show consistent trends on the NMDS plots of these dissimilarity index. As shown in FIG. 2F, these microbiomes show some clustering of responders and nonresponders by the specific cancer types.

[0752] Weighted (FIGS. 3A-3G) and unweighted (FIGS. 4A-4H) Unifrac distance analysis were further conducted. In the weighted Unifrac distance analysis, Axis 1 explained 37.6% of the variance (FIG. 3A) but was not correlated with the R and NR outcomes (Wilcoxon test, p˜0.49, FIG. 3B). Table 2 shows the species having the lowest Axis 1 values.

TABLE 2
Species with lowest axis 1 values

| Species | Axis 1 value |
|---|---|
| Clostridioides_difficile | −0.28 |
| Fusobacterium_ulcerans | −0.26 |
| Anaeromassilibacillus_senegalensis | −0.26 |
| Lactococcus_piscium | −0.25 |
| [Enterococcus]_dispar | −0.24 |
| Prevotella_buccae | −0.24 |
| Streptococcus_infantarius_group | −0.23 |
| Fournierella_massiliensis | −0.23 |

[0753] However, the NMDS plot of the weighted UniFrac distance faceted by specific cancer types, i.e., bladder cancer, lung cancer, melanoma, and RCC showed distinct clustering of R and NR outcomes within individual cancer types (FIG. 3C). FIG. 3D depicts the NMDS plots of the weighted UniFrac index among several major phyla, i.e., Actinobacteria, Bacteroidetes, Firmicutes, and Proteobacteria. FIGS. 3E and 3F show the NDMS plots of the weighted UniFrac index by the best overall responses categories, i.e., 1) complete response, 2) progressive disease, and 3) partial response, overall (FIG. 3E) or faceted by specific cancer types (FIG. 3F). FIG. 3G demonstrated the supervised clustering to identify the top species with the R or NR outcomes based on the clustering of individual cancer types.

[0754] In the unweighted Unifrac distance analysis, Axis 2 explained 7.1% of the variance (FIG. 4A) and was significantly correlated with the R and NR outcomes (Wilcoxon test, p˜0.013, FIG. 4B). Table 3 shows the species having the lowest Axis 2 values.

TABLE 3
Species with lowest axis 2 values

| Species | Axis 2 value |
|---|---|
| [Enorma]_phocaeensis | −0.23 |
| Flavonifractor_sp1 | −0.23 |
| Lachnospiraceae_NG17_sp4 | −0.23 |
| Parabacteroides_timonensis | −0.22 |
| [Enterococcus]_avium | −0.17 |
| Prevotella_salivae | −0.17 |
| Lactobacillus_algidus | −0.17 |
| Clostridium_carnis_group | −0.17 |

[0755] The NMDS plot of the unweighted UniFrac distance faceted by specific cancer types, i.e., bladder cancer, lung cancer, melanoma, and RCC, showed clusters along Axis 2 (FIG. 4C). FIG. 4D depicts the NMDS plots of the unweighted UniFrac index among several major phyla, i.e., Actinobacteria, Bacteroidetes, Firmicutes, and Proteobacteria. FIGS. 4E and 4F show the NDMS plots of the unweighted UniFrac index by the best overall responses categories, i.e., 1) complete response, 2) progressive disease, and 3) partial response, overall (FIG. 4E) or faceted by specific cancer types (FIG. 4F).

[0756] Enrichment analysis revealed that across all cancer types, excluding RCC samples, families Sutterellaceae, Coriobacteriaceae, Akkermansiaceae, or Desulfovibrionaceae were significantly correlated with response (Table 4). Tables 4, 5 and 6 show the overall enrichment analysis results of the microbiome samples. Table 4 shows the top families associated with responders (R) and non-responder (NR) (i.e. Campylobacteraceae). Tables 5 and 6 show the top species associated with responders (R) and non-responders (NR) according to abundance (Table 5) and prevalence (Table 6), respectively.

TABLE 4
Top families associated with responders
(R) and non-responders (NR)

| Family | Unadj P-value | Mean % R | Mean % NR |
|---|---|---|---|
| Sutterellaceae | 0.0027 | 1.1 | 0.61 |
| Coriobacteriaceae | 0.0086 | 2.0 | 1.2 |
| Akkermansiaceae | 0.0099 | 1.9 | 0.60 |
| Campylobacteraceae | 0.013 | 0.00025 | 0.0023 |
| Desulfovibrionaceae | 0.027 | 0.51 | 0.40 |

TABLE 5
Top species associated with responders(R) and
non-responders (NR) according to abundance

| Top 5 enriched in R | | Top 5 enriched in NR | |
|---|---|---|---|
| Species | Unadj P-value | Species | Unadj P-value |
| Dysosmobacter_welbionis | 0.0061 | Holdemania_massiliensis | 0.0037 |
| Anaerobutyricum_hallii | 0.0069 | Rothia_mucilaginosa | 0.0042 |
| Blautia_caecimuris | 0.0093 | Hungatella_sp2 | 0.012 |
| Akkermansia_muciniphila | 0.010 | Prevotella_copri | 0.015 |
| Holdemania_filiformis | 0.012 | Campylobacter_concisus | 0.015 |

TABLE 6
Top species associated with responders (R) and
non-responders (NR) according to prevalence

| Top 5 enriched in R | | Top 5 enriched in NR | |
|---|---|---|---|
| Species | Unadj P-value | Species | Unadj P-value |
| Acetatifactor_sp1 | 0.0031 | Rothia_mucilaginosa | 0.0045 |
| Blautia_wexlerae | 0.0035 | [Atopobium]_parvulum | 0.0090 |
| Ruminococcaceae_NG14_sp1 | 0.0070 | Holdemania_massiliensis | 0.0093 |
| Hungatella_sp2 | 0.0089 | Prevotella_copri | 0.017 |
| Holdemania_filiformis | 0.019 | Campylobacter_concisus | 0.022 |

[0757] According to abundance-based analysis, Akkermansia muciniphila, Dysosmobacter welbionis, Anaerobutyricum hallii, Blautia caecimuris, and Holdemania filiformis were the top species enriched in the R group samples while Holdemania massiliensis, Rothia mucilaginosa, Hungatella sp2, Prevotella copri, and Campylobacter concisus were the top species enriched in the NR group samples. According to prevalence-based analysis, Acetatifactor sp1, Blautia wexlerae, Ruminococcaceae NG14 sp1, Hungatella sp2, and Holdemania filiformis were the top species enriched in the R group samples while Rothia mucilaginosa, [Atopobium]parvulum, Holdemania massiliensis, Prevotella copri, and Campylobacter concisus were the top species enriched in the NR group samples.

[0758] Tables 7, 8 and 9 show the enrichment analysis results of the microbiome samples by specific cancer types. Table 7 shows the result of the permutational multivariate analysis of variance (Permanova). Tables 8 and 9 show the top species associated with R (Table 8) and NR (Table 9) from supervised clustering by specific cancer types, i.e., urothelial (i.e., bladder), lung cancer (i.e., non-small cell lung cancer, NSCLC), and melanoma. As shown in Table 7, PERMANOVA test based on the Bray-Curtis dissimilarity index showed that the interaction of cancer types and outcomes (i.e., R or NR) explained 4.2% of the microbiome compositions with significance (p value˜0.023) but not the individual factors of cancer types or treatment outcomes.

[0759] Using supervised clustering demonstrated in FIG. 3H, the top species of each specific cancer type associated with response and non-response were identified, as shown in Tables 8 and 9.

TABLE 7
Permutational multivariate analysis of variance

| Variable | % Variance Explained | P-value |
|---|---|---|
| Cancer Type | 3.89 | 0.052 |
| Outcome | 1.29 | 0.16 |
| Cancer Type * Outcome | 4.152 | 0.023 |
| Total | 9.33 | |

TABLE 8
Top species associated with R from supervised
clustering by specific cancer types

| Species | Cancer Type |
|---|---|
| Bifidobacterium_catenulatum_group | Urothelial |
| Blautia_wexlerae | Urothelial |
| Hungatella_sp1 | Urothelial |
| Intestinibacter_bartlettii | Urothelial |
| Lachnospiraceae_NG31_sp1 | Urothelial |
| Lactonifactor_longoviformis | Urothelial |
| Leuconostoc_gelidum | Urothelial |
| Sutterella_wadsworthensis | Urothelial |
| [Extibacter]_muris | NSCLC |
| Alistipes_onderdonkii | NSCLC |
| Collinsella_intestinalis | NSCLC |
| Collinsella_stercoris | NSCLC |
| Muricomes_sp1 | NSCLC |
| Neobitarella_massiliensis | NSCLC |
| Prevotellamassilia_sp2 | NSCLC |
| Ruminococcaceae_NG33_sp1 | NSCLC |
| [Adlercreutzia]_equolifaciens_group | Melanoma |
| [Anaerotruncus]_rubiinfantis | Melanoma |
| [Romboutsia]_timonensis | Melanoma |
| Alistipes_finegoldii | Melanoma |
| Alistipes_indistinctus | Melanoma |
| Alistipes_obesi | Melanoma |
| Alistipes_putredinis | Melanoma |
| Alistipes_shahii | Melanoma |
| Anaerofustis_stercorihominis | Melanoma |
| Anaeromassilibacillus_sp3 | Melanoma |
| Barnesiella_intestinihominis | Melanoma |
| Bilophila_wadsworthia | Melanoma |
| Blautia_faecis | Melanoma |
| Coriobacteriaceae_NG5_sp1 | Melanoma |
| Frisingicoccus_sp3 | Melanoma |
| Gordonibacter_pamelaeae | Melanoma |
| Harryflintia_acetispora | Melanoma |
| Lachnospiraceae_NG29_sp1 | Melanoma |
| Marvinbryantia_sp8 | Melanoma |
| Massilimaliae_massiliensis | Melanoma |
| Massilimaliae_timonensis | Melanoma |
| Neglecta_timonensis | Melanoma |
| Parabacteroides_merdae | Melanoma |
| Peptoniphilaceae_NG4_sp1 | Melanoma |
| Peptoniphilaceae_NG4_sp3 | Melanoma |
| Pseudoflavonifractor_capillosus | Melanoma |
| Ruminococcaceae_NG12_sp1 | Melanoma |
| Ruminococcaceae_NG15_sp3 | Melanoma |
| Ruminococcaceae_NG17_sp3 | Melanoma |
| Ruthenibacterium_sp1 | Melanoma |

TABLE 9
Top species associated with NR from supervised
clustering by specific cancer types

| Species | Cancer Type |
|---|---|
| Alistipes_onderdonkii | Urothelial |
| Angelakisella_massiliensis | Urothelial |
| Christensenellaceae_NG5_sp2 | Urothelial |
| Cuneatibacter_caecimuris | Urothelial |
| Desulfovibrio_fairfieldensis | Urothelial |
| Ruminococcaceae_NG13_sp1 | Urothelial |
| Ruminococcaceae_NG16_sp1 | Urothelial |
| [Coprococcus]_catus | NSCLC |
| [Lactobacillus]_fermentum | NSCLC |
| [Romboutsia]_timonensis | NSCLC |
| [Ruminococcus]_bromii | NSCLC |
| [Ruminococcus]_gauvreauii | NSCLC |
| Actinomyces_graevenitzii | NSCLC |
| Agathobaculum_butyriciproducens_group | NSCLC |
| Bacteroides_caccae | NSCLC |
| Bacteroides_intestinalis | NSCLC |
| Bittarella_massiliensis | NSCLC |
| Blautia_luti_group | NSCLC |
| Clostridium_saudiense | NSCLC |
| Corynebacterium_durum | NSCLC |
| Fusicatenibacter_sp2 | NSCLC |
| Lachnospiraceae_NG30_sp3 | NSCLC |
| Massilimaliae_sp1 | NSCLC |
| Monoglobus_pectinilyticus | NSCLC |
| Rothia_dentocariosa | NSCLC |
| Rothia_mucilaginosa | NSCLC |
| Ruminococcaceae_NG17_sp1 | NSCLC |
| Schaalia_odontolytica | NSCLC |
| Streptococcus_australis | NSCLC |
| Streptococcus_gordonii | NSCLC |
| Streptococcus_infantis_group | NSCLC |
| Streptococcus_parasanguinis | NSCLC |
| Streptococcus_salivarius_group | NSCLC |
| [Atopobium]_parvulum | Melanoma |
| [Ruminococcus]_gnavus | Melanoma |
| Bacteroides_dorei_group | Melanoma |
| Blautia_sp1 | Melanoma |
| Schaalia_sp2 | Melanoma |

[0760] The variance in the composition of pretreatment microbiome samples did not explain response alone (R vs NR, PERMANOVA based on the weighted UniFrac distance, p=0.273), a significant portion of the variance in microbiome composition was explained by the interaction of cancer type and outcome (PERMANOVA, p=0.014), suggesting a cancer-specific microbiome relationship.

### Example 2: In Vivo Tumor Models with Non-Responder Fecal Matter Transplants

[0761] A subset of the microbiome samples identified in this NR cluster were evaluated using in vivo preclinical models. Colonization of germ-free mice with stool from NR patients elicited a nonresponsive result in syngeneic tumors treated with CPI in contrast to stool from healthy subjects, which confers anti-tumor response.

[0762] As shown in FIG. 5A, germ-free mice models were inoculated at week −4 with the stool samples from a lung cancer patient who was non-responsive to checkpoint therapy and anti-PD-L1+anti-CTLA4 combination therapy. At Day 0, the mice models were challenged with CT26 tumors. After 9-10 days of tumor establishment, anti-PD-L1+anti-CTLA4 combination therapy or isotype treatment was administered at Day 9/10, Day 14, Day 16/17, and Day 21 before the mice models were sacrificed at Day 22 for analysis. The analysis results, as shown in FIG. 5B, suggests the lack of efficacy in mice colonized with stool from a lung cancer patient who was non-responsive to checkpoint therapy and anti-PD-L1+anti-CTLA4 combination therapy in treating CT26 tumors in an animal model.

[0763] Similar tests were conducted in MC38 tumor models. Briefly, as shown in FIG. 5C, germ-free mice models were inoculated at week −4 with the stool samples from a lung cancer patient who was non-responsive to checkpoint therapy and anti-PD-L1 monotherapy. At Day 0, the mice models were challenged with MC38 tumors. After 5-6 days of tumor establishment, anti-PD-L1 therapy or isotype treatment was administered at Day 5/6, Day 10, Day 14, and Day 18 before the mice models were sacrificed at Day 19 for analysis. The analysis results, as shown in FIG. 5D, suggests the lack of efficacy in mice colonized with stool from a lung cancer patient who was non-responsive to checkpoint therapy and anti-PD-L1 monotherapy in treating MC38 tumors in an animal model.

[0764] Conclusions: Analysis of the gut microbiome composition from patients with metastatic lung cancer, urothelial cancer, renal cell carcinoma, and metastatic melanoma identified a cancer-specific signature of R and NR to CPI. Across three cancer types, a consistent signature of NR was identified and corroborated experimentally in preclinical animal models.

### Example 3: Bacterial Taxonomic Correlates with Outcome

[0765] Gut microbiome samples were obtained from patients with metastatic melanoma, lung, urothelial, or renal cell cancer immediately before CPI therapy was initiated (as described in example 1). Clinical characteristics were obtained from patient medical records; clinical response to CPI was defined as patients obtaining a partial or complete response or remaining on therapy for more than 6 months.

[0766] Shotgun whole metagenomic sequencing of patient stool samples were analyzed via Metaphlan to produce relative abundance of different taxonomic groupings including species, genera, and families. Differential abundance of these taxa between responders and non-responders was tested via non-parametric Wilcoxon ranksum tests and parametric t-tests. There were 112 samples included in this analysis (50NR, 62R). Many taxa were nominally associated with outcome at p<0.05.

[0767] The results of Wilcoxon rank sum non-parametric test for association between quantitative abundance of a taxon against outcome (responder vs non-responder to ICI therapy) are shown in Table 10. This analysis was also performed for individual cancer types: urothelial, lung, and melanoma (see Tables 11-13).

[0768] Thus, the quantitative abundances of several bacterial species are associated with patient response or non-response to CPI when considering all cancer types jointly or when considering urothelial, lung, and melanoma cancer types separately. Differences in taxonomic association among individual cancer types is in agreement with analysis in Example 1 where there is a significant interaction between cancer type and response in regard to microbiome composition. This indicates the relative abundance of bacterial species may be important to response to ICI in different cancer indications, with certain taxa potentially promoting response and certain taxa potentially preventing response.

TABLE 10
Direct associations between taxa abundance with outcome

| Taxa | Taxa Level | wc.pval | Mean.NR | Mean.R |
|---|---|---|---|---|
| Sutterellaceae | Family | 0.000665 | 0.568621761 | 1.041308053 |
| Roseburia_intestinalis | Species | 0.001784 | 0.177107026 | 0.637295571 |
| Hungatella_sp1 | Species | 0.003606 | 0.089281375 | 0.239019008 |
| Lactobacillus | Genus | 0.003671 | 0.098630968 | 0.034492386 |
| Coriobacteriaceae_NG1 | Genus | 0.005854 | 0.018613172 | 0.014840513 |
| Blautia_wexlerae | Species | 0.006317 | 1.346078627 | 2.062722529 |
| [Atopobium]_parvulum | Species | 0.006819 | 0.002140907 | 0.00268814 |
| Ruminococcaceae_NG13_sp1 | Species | 0.008767 | 0.640427595 | 0.133612395 |
| Lactobacilluseae | Family | 0.011059 | 0.214612881 | 0.054915972 |
| Negativibacillus_sp1 | Species | 0.01185 | 0.003491553 | 0.040363482 |
| Lachnospiraceae | Family | 0.012143 | 18.96092172 | 23.41022483 |
| Christensenella_timonensis | Species | 0.013255 | 0.000829049 | 5.10474E−05 |
| Lachnospiraceae_NG18_sp7 | Species | 0.01415 | 0.000837434 | 0.040002837 |
| Rothia_mucilaginosa | Species | 0.01546 | 0.007089752 | 0.005687923 |
| [Lactobacillus]_paracasei | Species | 0.017934 | 0.037207492 | 0.01007938 |
| Propionibacterium_freudenreichii | Species | 0.021432 | 0.004878945 | 0.000352685 |
| Prevotella_buccalis | Species | 0.024029 | 0.000887426 | 6.69363E−05 |
| Agathobaculum | Genus | 0.024411 | 0.147184416 | 0.219885696 |
| Holdemania_massiliensis | Species | 0.025973 | 0.013800455 | 0.00301813 |
| Ruminococcaceae_NG18_sp7 | Species | 0.02608 | 0.075158206 | 0.007105781 |
| Lactobacillus_delbrueckii | Species | 0.026893 | 0.041643503 | 0.000775484 |
| Scardovia | Genus | 0.027061 | 0.000923478 | 0.000140386 |
| Actinomycetaceae_NG7_sp1 | Species | 0.028012 | 0.000123021 | 8.77419E−05 |
| Actinomycetaceae_NG7 | Genus | 0.028012 | 0.000123021 | 8.77419E−05 |
| Agathobaculum_butyriciproducens_group | Species | 0.029575 | 0.124675699 | 0.19633037 |
| Lachnospiraceae_NG17 | Genus | 0.030953 | 0.104924489 | 0.180521288 |
| Campylobacter | Genus | 0.037792 | 0.002252076 | 0.000666115 |
| Campylobacteraceae | Family | 0.037792 | 0.002252076 | 0.000666115 |
| Neobitarella_massiliensis | Species | 0.041278 | 0.000990089 | 0.001722737 |
| Neobitarella | Genus | 0.041278 | 0.000990089 | 0.001722737 |
| Bacteroides_coprocola | Species | 0.041904 | 0.583587343 | 0.088604183 |
| [Clostridium]_asparagiforme_group | Species | 0.041962 | 0.108863981 | 0.064622461 |
| Anaerobutyricum | Genus | 0.04213 | 0.490307117 | 0.806618606 |
| Ruminococcaceae_NG11 | Genus | 0.042909 | 0.251108242 | 0.437416925 |
| [Lactobacillus]_reuteri | Species | 0.043639 | 0.006739489 | 0.00308371 |
| Rothia | Genus | 0.044094 | 0.00794458 | 0.006682386 |
| Micrococcaceae | Family | 0.044094 | 0.00794458 | 0.006682386 |
| Roseburia | Genus | 0.044978 | 3.443646555 | 4.463988005 |
| Negativibacillus | Genus | 0.045504 | 0.118568768 | 0.119489079 |
| Lachnospiraceae_NG31_sp1 | Species | 0.046349 | 0.005526622 | 0.041640896 |
| Lachnospiraceae_NG31 | Genus | 0.046349 | 0.005526622 | 0.041640896 |
| Propionibacterium | Genus | 0.047427 | 0.004988621 | 0.000384194 |
| Propionibacteriaceae | Family | 0.047427 | 0.004992445 | 0.000384194 |
| Lactobacilluseae_NG5 | Genus | 0.048174 | 0.115981913 | 0.020423586 |
| Dialister_invisus | Species | 0.049692 | 0.103947311 | 0.374285534 |

| Taxa | mean.diff | mean.log2ratio | wc.qval | wc.qval.global |
|---|---|---|---|---|
| Sutterellaceae | 0.472686 | 0.872855711 | 0.027937816 | 0.422393175 |
| Roseburia_intestinalis | 0.460189 | 1.847341186 | 0.65162402 | 0.566425524 |
| Hungatella_sp1 | 0.149738 | 1.420694202 | 0.65162402 | 0.582807457 |
| Lactobacillus | −0.06414 | −1.515762758 | 0.541449849 | 0.582807457 |
| Coriobacteriaceae_NG1 | −0.00377 | −0.326782996 | 0.541449849 | 0.608501842 |
| Blautia_wexlerae | 0.716644 | 0.615787085 | 0.65162402 | 0.608501842 |
| [Atopobium]_parvulum | 0.000547 | 0.328385876 | 0.65162402 | 0.608501842 |
| Ruminococcaceae_NG13_sp1 | −0.50682 | −2.260981625 | 0.65162402 | 0.608501842 |
| Lactobacilluseae | −0.1597 | −1.966438948 | 0.170000424 | 0.608501842 |
| Negativibacillus_sp1 | 0.036872 | 3.531109863 | 0.65162402 | 0.608501842 |
| Lachnospiraceae | 4.449303 | 0.304109693 | 0.170000424 | 0.608501842 |
| Christensenella_timonensis | −0.00078 | −4.021549189 | 0.65162402 | 0.608501842 |
| Lachnospiraceae_NG18_sp7 | 0.039165 | 5.577983565 | 0.65162402 | 0.608501842 |
| Rothia_mucilaginosa | −0.0014 | −0.317833019 | 0.65162402 | 0.608501842 |
| [Lactobacillus]_paracasei | −0.02713 | −1.884186257 | 0.65162402 | 0.608501842 |
| Propionibacterium_freudenreichii | −0.00453 | −3.790117001 | 0.65162402 | 0.608501842 |
| Prevotella_buccalis | −0.00082 | −3.728766071 | 0.65162402 | 0.608501842 |
| Agathobaculum | 0.072701 | 0.579128831 | 0.55701311 | 0.608501842 |
| Holdemania_massiliensis | −0.01078 | −2.192989021 | 0.65162402 | 0.608501842 |
| Ruminococcaceae_NG18_sp7 | −0.06805 | −3.402865452 | 0.65162402 | 0.608501842 |
| Lactobacillus_delbrueckii | −0.04087 | −5.746850736 | 0.65162402 | 0.608501842 |
| Scardovia | −0.00078 | −2.717674556 | 0.55701311 | 0.608501842 |
| Actinomycetaceae_NG7_sp1 | −3.5E−05 | −0.487561673 | 0.65162402 | 0.608501842 |
| Actinomycetaceae_NG7 | −3.5E−05 | −0.487561673 | 0.55701311 | 0.608501842 |
| Agathobaculum_butyriciproducens_group | 0.071655 | 0.655103071 | 0.65162402 | 0.608501842 |
| Lachnospiraceae_NG17 | 0.075597 | 0.782817544 | 0.55701311 | 0.608501842 |
| Campylobacter | −0.00159 | −1.757412229 | 0.55701311 | 0.608501842 |
| Campylobacteraceae | −0.00159 | −1.757412229 | 0.331988138 | 0.608501842 |
| Neobitarella_massiliensis | 0.000733 | 0.79907325 | 0.65162402 | 0.608501842 |
| Neobitarella | 0.000733 | 0.79907325 | 0.55701311 | 0.608501842 |
| Bacteroides_coprocola | −0.49498 | −2.719501872 | 0.65162402 | 0.608501842 |
| [Clostridium]_asparagiforme_group | −0.04424 | −0.752419114 | 0.65162402 | 0.608501842 |
| Anaerobutyricum | 0.316311 | 0.718200981 | 0.55701311 | 0.608501842 |
| Ruminococcaceae_NG11 | 0.186309 | 0.80069966 | 0.55701311 | 0.608501842 |
| [Lactobacillus]_reuteri | −0.00366 | −1.127972137 | 0.65162402 | 0.608501842 |
| Rothia | −0.00126 | −0.249607606 | 0.55701311 | 0.608501842 |
| Micrococcaceae | −0.00126 | −0.249607606 | 0.331988138 | 0.608501842 |
| Roseburia | 1.020341 | 0.374396074 | 0.55701311 | 0.608501842 |
| Negativibacillus | 0.00092 | 0.011154719 | 0.55701311 | 0.608501842 |
| Lachnospiraceae_NG31_sp1 | 0.036114 | 2.913531193 | 0.65162402 | 0.608501842 |
| Lachnospiraceae_NG31 | 0.036114 | 2.913531193 | 0.55701311 | 0.608501842 |
| Propionibacterium | −0.0046 | −3.698735485 | 0.55701311 | 0.608501842 |
| Propionibacteriaceae | −0.00461 | −3.699841208 | 0.331988138 | 0.608501842 |
| Lactobacilluseae_NG5 | −0.09556 | −2.505591732 | 0.55701311 | 0.608501842 |
| Dialister_invisus | 0.270338 | 1.848286856 | 0.65162402 | 0.608501842 |

Taxa (name), Taxa Level (species, genus, or family level taxonomic unit), wc.pval (raw p-value from wilcoxon test), Mean.NR (mean abundance of non-responders), mean.R (mean abundance of responders), mean.diff (mean of responders minus mean of non-responders, positive is higher in responder), mean.log2ratio (log2 fold-change of mean responder to mean non-responder, positive is higher in responder), wc.qval (FDR corrected q-value, Benjamini-Hochberg procedure, for analysis WITHIN taxon level), wc.qval.global (FDR corrected q-value, Benjamini-Hochberg procedure, for analysis considering ALL taxon levels)

TABLE 11
Direct associations between taxa abundance with outcome for urothelial cancer

| | Taxa | | | | | | | |
|---|---|---|---|---|---|---|---|---|
| Taxa | Level | wc.pval | Mean.NR | Mean.R | mean.diff | mean.log2ratio | wc.qval | wc.qval.global |
| Lachnospiraceae | Family | 0.000123 | 15.10219 | 27.63152 | 12.52933 | 0.87155735 | 0.005161 | 0.082204496 |
| Ruminococcaceae_NG11 | Genus | 0.000952 | 0.020834 | 0.67852 | 0.657686 | 5.025386625 | 0.093183 | 0.213127352 |
| Anaerostipes | Genus | 0.000956 | 0.42348 | 1.429287 | 1.005808 | 1.754931573 | 0.093183 | 0.213127352 |
| Roseburia | Genus | 0.001859 | 1.882095 | 4.483526 | 2.601431 | 1.252294483 | 0.120848 | 0.310950189 |
| Anaerostipes_hadrus | Species | 0.004781 | 0.372776 | 1.389347 | 1.016571 | 1.898026145 | 0.748495 | 0.639652174 |
| Prevotellaceae | Family | 0.006194 | 1.877201 | 0.478379 | −1.39882 | −1.97235643 | 0.130065 | 0.684175153 |
| Blautia_wexlerae | Species | 0.007159 | 0.666925 | 2.973063 | 2.306138 | 2.156353877 | 0.748495 | 0.684175153 |
| Intestinibacter_bartlettii | Species | 0.009799 | 0.116416 | 0.123506 | 0.00709 | 0.085289281 | 0.748495 | 0.76522366 |
| Faecalibacterium_prausnitzii | Species | 0.011493 | 0.84697 | 0.073341 | −0.77363 | −3.529622751 | 0.748495 | 0.76522366 |
| Ruminococcaceae_NG11_sp5 | Species | 0.012999 | 0.020323 | 0.436265 | 0.415942 | 4.424034047 | 0.748495 | 0.76522366 |
| Roseburia_faecis | Species | 0.02043 | 0.649866 | 1.662439 | 1.012572 | 1.355085896 | 0.748495 | 0.76522366 |
| Prevotella | Genus | 0.02324 | 1.24957 | 0.362958 | −0.88661 | −1.783557357 | 0.775672 | 0.76522366 |
| Roseburia_intestinalis | Species | 0.027748 | 0.14802 | 0.821333 | 0.673313 | 2.472174617 | 0.748495 | 0.76522366 |
| Lachnospiraceae_NG13 | Genus | 0.03095 | 0.451904 | 0.818482 | 0.366578 | 0.856935078 | 0.775672 | 0.76522366 |
| [Merdimonas]_faecis | Species | 0.031222 | 0 | 0.016375 | 0.016375 | | 0.748495 | 0.76522366 |
| Bifidobacterium_animalis | Species | 0.031508 | 0.018062 | 0 | −0.01806 | | 0.748495 | 0.76522366 |
| Ruminococcaceae_NG13_sp1 | Species | 0.031508 | 0.983704 | 0 | −0.9837 | | 0.748495 | 0.76522366 |
| [Ruminococcus]_gnavus | Species | 0.035404 | 0.274483 | 1.46711 | 1.192627 | 2.418189612 | 0.748495 | 0.76522366 |
| Dialister_invisus | Species | 0.044415 | 0.076548 | 0.466525 | 0.389977 | 2.607512134 | 0.748495 | 0.76522366 |
| Leuconostoc_gelidum | Species | 0.046748 | 2.67E−05 | 0.001726 | 0.001699 | 6.016176563 | 0.748495 | 0.76522366 |
| Alistipes_finegoldii | Species | 0.048256 | 0.910167 | 0.162864 | −0.7473 | −2.482466479 | 0.748495 | 0.76522366 |

TABLE 12
Direct associations between taxa abundance with outcome for lung cancer

| | Taxa | | | | | | | |
|---|---|---|---|---|---|---|---|---|
| Taxa | Level | wc.pval | Mean.NR | Mean.R | mean.diff | mean.log2ratio | wc.qval | wc.qval.global |
| Holdemania_massiliensis | Species | 0.00203 | 0.020713 | 0.002395 | −0.01832 | −3.11233 | 0.675926 | 0.70402 |
| Lactobacillus | Genus | 0.005552 | 0.177023 | 0.062739 | −0.11428 | −1.49651 | 0.642538 | 0.70402 |
| Propionibacterium_freudenreichii | Species | 0.00603 | 0.011005 | 8.26E−06 | −0.011 | −10.3795 | 0.675926 | 0.70402 |
| Bacteroides_intestinalis | Species | 0.010737 | 0.063218 | 0.004166 | −0.05905 | −3.92371 | 0.675926 | 0.70402 |
| Thermodesulfobiaceae_NG1_sp1 | Species | 0.01096 | 0.653097 | 0.056735 | −0.59636 | −3.52499 | 0.675926 | 0.70402 |
| Thermodesulfobiaceae_NG1 | Genus | 0.01096 | 0.653097 | 0.056735 | −0.59636 | −3.52499 | 0.642538 | 0.70402 |
| Thermodesulfobiaceae | Family | 0.01096 | 0.653097 | 0.056735 | −0.59636 | −3.52499 | 0.232311 | 0.70402 |
| Gemmiger_sp2 | Species | 0.013732 | 1.256942 | 0.437732 | −0.81921 | −1.5218 | 0.675926 | 0.70402 |
| Coprococcus | Genus | 0.015609 | 0.834732 | 0.005031 | −0.8297 | −7.3742 | 0.642538 | 0.70402 |
| Sutterellaceae | Family | 0.0158 | 0.579347 | 1.267489 | 0.688142 | 1.129473 | 0.232311 | 0.70402 |
| Parabacteroides_merdae | Species | 0.016637 | 1.132578 | 0.500235 | −0.63234 | −1.17893 | 0.675926 | 0.70402 |
| Coriobacteriaceae_NG1 | Genus | 0.016801 | 0.037141 | 0.00645 | −0.03069 | −2.52562 | 0.642538 | 0.70402 |
| Propionibacterium | Genus | 0.016998 | 0.011109 | 4.54E−05 | −0.01106 | −7.93598 | 0.642538 | 0.70402 |
| Propionibacteriaceae | Family | 0.016998 | 0.011118 | 4.54E−05 | −0.01107 | −7.93711 | 0.232311 | 0.70402 |
| Intestinimonas_massiliensis | Species | 0.02133 | 0.072559 | 0.009274 | −0.06329 | −2.96785 | 0.675926 | 0.70402 |
| Alistipes_shahii | Species | 0.021461 | 0.864728 | 0.367111 | −0.49762 | −1.23603 | 0.675926 | 0.70402 |
| Gemmiger_Subdoligranulum | Genus | 0.025745 | 1.76899 | 0.652741 | −1.11625 | −1.43834 | 0.730523 | 0.70402 |
| Marvinbryantia_sp5 | Species | 0.026562 | 0.029754 | 0.008017 | −0.02174 | −1.89197 | 0.675926 | 0.70402 |
| [Anaerotruncus]_rubiinfantis | Species | 0.027056 | 0.011209 | 0.003505 | −0.0077 | −1.6771 | 0.675926 | 0.70402 |
| Marasmitruncus | Genus | 0.027056 | 0.011209 | 0.003505 | −0.0077 | −1.6771 | 0.730523 | 0.70402 |
| Bacteroides_massiliensis | Species | 0.035938 | 1.531609 | 0.688603 | −0.84301 | −1.1533 | 0.675926 | 0.70402 |
| Desulfovibrionaceae_NG5_sp1 | Species | 0.036386 | 0.084696 | 0 | −0.0847 | | 0.675926 | 0.70402 |
| Desulfovibrionaceae_NG5 | Genus | 0.036386 | 0.084696 | 0 | −0.0847 | | 0.795987 | 0.70402 |
| Streptococcus_parasanguinis | Species | 0.036858 | 0.219655 | 0.28578 | 0.066125 | 0.379664 | 0.675926 | 0.70402 |
| Blautia_caecimuris | Species | 0.043334 | 0.187781 | 0.660192 | 0.472411 | 1.813833 | 0.675926 | 0.70402 |
| Bacteroides_faecis | Species | 0.044183 | 0.667635 | 0.0416 | −0.62603 | −4.0044 | 0.675926 | 0.70402 |
| Roseburia_intestinalis | Species | 0.044476 | 0.117159 | 0.72297 | 0.605812 | 2.625472 | 0.675926 | 0.70402 |
| Desulfovibrio_desulfuricans | Species | 0.045435 | 0 | 0.021986 | 0.021986 | | 0.675926 | 0.70402 |
| [Allisonella]_histaminiformans | Species | 0.045759 | 0.013993 | 0.001585 | −0.01241 | −3.14237 | 0.675926 | 0.70402 |
| Lactobacillaceae | Family | 0.047158 | 0.380163 | 0.091366 | −0.2888 | −2.0569 | 0.350657 | 0.70402 |
| [Ruminococcus]_gauvreauii | Species | 0.047434 | 0.000436 | 1.91E−05 | −0.00042 | −4.50876 | 0.675926 | 0.70402 |
| Prevotella_copri | Species | 0.049807 | 1.185374 | 1.391739 | 0.206366 | 0.231547 | 0.675926 | 0.70402 |
| Slackia_isoflavoniconvertens | Species | 0.049807 | 0.058124 | 0.01394 | −0.04418 | −2.05985 | 0.675926 | 0.70402 |

TABLE 13
Direct associations between taxa abundance with outcome for melanoma

| | Taxa | | | | | | | |
|---|---|---|---|---|---|---|---|---|
| Taxa | Level | wc.pval | Mean.NR | Mean.R | mean.diff | mean.log2ratio | wc.qval | wc.qval.global |
| Gordonibacter_pamelaeae | Species | 0.003238 | 0 | 0.015457 | 0.015457 | | 0.615778 | 0.620905 |
| Lactococcus | Genus | 0.004085 | 0.09566 | 0.0004 | −0.09526 | −7.90327 | 0.458511 | 0.620905 |
| Lactococcus_lactis | Species | 0.005191 | 0.062695 | 0.0004 | −0.0623 | −7.29369 | 0.615778 | 0.620905 |
| Coriobacteriaceae_NG5_sp1 | Species | 0.00656 | 0 | 0.173427 | 0.173427 | | 0.615778 | 0.620905 |
| Odoribacteraceae | Family | 0.006702 | 0.201887 | 0.834257 | 0.63237 | 2.046943 | 0.272832 | 0.620905 |
| Odoribacter_splanchnicus | Species | 0.010752 | 0.162764 | 0.574776 | 0.412012 | 1.820215 | 0.615778 | 0.620905 |
| Parabacteroides_merdae | Species | 0.010752 | 0.190125 | 0.993755 | 0.803631 | 2.385944 | 0.615778 | 0.620905 |
| Odoribacter | Genus | 0.010752 | 0.162764 | 0.574776 | 0.412012 | 1.820215 | 0.458511 | 0.620905 |
| [Adlercreutzia]_equolifaciens_group | Species | 0.012231 | 0.032452 | 0.118215 | 0.085763 | 1.865032 | 0.615778 | 0.620905 |
| Adlercreutzia_Asaccharobacter | Genus | 0.012231 | 0.032452 | 0.118215 | 0.085763 | 1.865032 | 0.458511 | 0.620905 |
| Ruminococcaceae_NG15_sp3 | Species | 0.012629 | 0 | 0.198694 | 0.198694 | | 0.615778 | 0.620905 |
| Coriobacteriaceae | Family | 0.012847 | 0.519882 | 1.221923 | 0.702042 | 1.232898 | 0.272832 | 0.620905 |
| Ruminococcaceae_NG12_sp1 | Species | 0.013906 | 2.13E−05 | 0.005941 | 0.005919 | 8.126983 | 0.615778 | 0.620905 |
| Ruminococcaceae_NG12 | Genus | 0.013906 | 2.13E−05 | 0.005941 | 0.005919 | 8.126983 | 0.458511 | 0.620905 |
| Alistipes_putredinis | Species | 0.014737 | 0.479456 | 2.780926 | 2.30147 | 2.536095 | 0.615778 | 0.620905 |
| Barnesiella_intestinihominis | Species | 0.017073 | 0.14669 | 1.182584 | 1.035894 | 3.011099 | 0.615778 | 0.620905 |
| Barnesiella | Genus | 0.017073 | 0.14669 | 1.182584 | 1.035894 | 3.011099 | 0.458511 | 0.620905 |
| [Anaerotruncus]_rubiinfantis | Species | 0.017391 | 0.001803 | 0.011508 | 0.009705 | 2.674266 | 0.615778 | 0.620905 |
| Marasmitruncus | Genus | 0.017391 | 0.001803 | 0.011508 | 0.009705 | 2.674266 | 0.458511 | 0.620905 |
| Bilophila_wadsworthia | Species | 0.019086 | 0.07381 | 0.354725 | 0.280916 | 2.264817 | 0.615778 | 0.620905 |
| Bilophila | Genus | 0.019086 | 0.07381 | 0.354725 | 0.280916 | 2.264817 | 0.458511 | 0.620905 |
| Desulfovibrionaceae | Family | 0.021852 | 0.183389 | 0.517787 | 0.334398 | 1.497454 | 0.272832 | 0.620905 |
| Granulicatella_adiacens | Species | 0.02322 | 0.002723 | 0.000595 | −0.00213 | −2.19528 | 0.615778 | 0.620905 |
| Granulicatella | Genus | 0.02322 | 0.002723 | 0.000595 | −0.00213 | −2.19528 | 0.458511 | 0.620905 |
| Lachnoclostridium | Genus | 0.02322 | 0 | 0.00747 | 0.00747 | | 0.458511 | 0.620905 |
| Ruminococcaceae_NG11 | Genus | 0.02322 | 0 | 0.79652 | 0.79652 | | 0.458511 | 0.620905 |
| Aerococcaceae | Family | 0.02322 | 0.002723 | 0.000595 | −0.00213 | −2.19528 | 0.272832 | 0.620905 |
| Ruthenibacterium | Genus | 0.024017 | 0.138317 | 0.482226 | 0.343908 | 1.801725 | 0.458511 | 0.620905 |
| Massilimaliae_massiliensis | Species | 0.028814 | 0.000238 | 0.002857 | 0.002619 | 3.582739 | 0.615778 | 0.620905 |
| Coriobacteriaceae_NG5 | Genus | 0.028814 | 0.021528 | 0.177794 | 0.156266 | 3.0459 | 0.504248 | 0.620905 |
| Lachnospira_pectinoschiza | Species | 0.031082 | 0.045962 | 0.418858 | 0.372896 | 3.187942 | 0.615778 | 0.620905 |
| Catabacter_Christensenella | Genus | 0.031436 | 0.00033 | 0.008129 | 0.007799 | 4.620971 | 0.507814 | 0.620905 |
| Ruthenibacterium_lactatiformans | Species | 0.031511 | 0.130265 | 0.440734 | 0.310469 | 1.758454 | 0.615778 | 0.620905 |
| Ruthenibacterium_sp1 | Species | 0.035503 | 0.008052 | 0.041491 | 0.033439 | 2.365393 | 0.615778 | 0.620905 |
| Alistipes_finegoldii | Species | 0.037039 | 0.059595 | 1.12569 | 1.066095 | 4.239474 | 0.615778 | 0.620905 |
| Massilimaliae_timonensis | Species | 0.037039 | 0.000458 | 0.004091 | 0.003633 | 3.159679 | 0.615778 | 0.620905 |
| Anaerofustis_stercorihominis | Species | 0.040999 | 0 | 0.00191 | 0.00191 | | 0.615778 | 0.620905 |
| Lachnoclostridium_edouardi | Species | 0.040999 | 0 | 0.002753 | 0.002753 | | 0.615778 | 0.620905 |
| Scardovia_wiggsiae | Species | 0.040999 | 0.000683 | 2.57E−05 | −0.00066 | −4.7301 | 0.615778 | 0.620905 |
| Anaerofustis | Genus | 0.040999 | 0 | 0.00191 | 0.00191 | | 0.51685 | 0.620905 |
| Scardovia | Genus | 0.040999 | 0.000683 | 2.57E−05 | −0.00066 | −4.7301 | 0.51685 | 0.620905 |
| Lachnospiraceae_NG23 | Genus | 0.04256 | 0.003895 | 0.013988 | 0.010093 | 1.844422 | 0.51685 | 0.620905 |
| Lawsonibacter_sp7 | Species | 0.043829 | 0.025363 | 0.06054 | 0.035177 | 1.255141 | 0.615778 | 0.620905 |
| Rikenellaceae | Family | 0.044008 | 4.778801 | 9.439906 | 4.661105 | 0.982124 | 0.353029 | 0.620905 |
| Rothia_mucilaginosa | Species | 0.045683 | 0.002854 | 0.003089 | 0.000234 | 0.113785 | 0.615778 | 0.620905 |

Tables 11-13. Taxa (name), Taxa Level (species, genus, or family level taxonomic unit), wc.pval (raw p-value from wilcoxon test), Mean.NR (mean abundance of non-responders), mean.R (mean abundance of responders), mean.diff (mean of responders minus mean of non-responders, positive is higher in responder), mean.log 2ratio (log 2 fold-change of mean responder to mean non-responder, positive is higher in responder), wc.qval (FDR corrected q-value, Benjamini-Hochberg procedure, for analysis WITHIN taxon level), wc.qval.global (FDR corrected q-value, Benjamini-Hochberg procedure, for analysis considering ALL taxon levels

### Example 4: Stool Metabolite Concentration Correlates with Outcome

[0769] Correlation between stool metabolite levels and treatment outcome (i.e., responder and non-responder) was determined. Briefly, stool metabolite levels were measured by Metabolonn Inc. and returned as log-transformed concentrations in the stool. Targeted analysis of short and medium chain fatty acids was performed separately from global untargeted metabolomics. Differential abundance of these metabolites between responders and non-responders was tested via non-parametric Wilcoxon ranksum tests and parametric t-tests. Super-pathway and sub-pathway enrichment analysis was performed in the global analysis based on Wilcoxon ranksum test outcomes. There were 64 patient samples included in the short chain and medium chain fatty acid (SCFA/MCFA) analysis (30NR, 34R) and 65 patient samples included in the global metabolite analysis (30NR, 35R) with 63 samples analyzed with both methods.

[0770] As shown in Table 14, the SCFA metabolites acetic acid, propionic acid, and butyric acid are higher in responders compared with non-responders as is total SCFA/MCFA concentration (see Table 14). SCFA and MCFA are products of metabolism by specific bacterial taxa, and these functions are enriched or repressed by additional members of the microbial ecology, thus the data indicate that patients with a microbial ecology/microbiome conducive to SCFA/MCFA production are more likely to respond to CPI. The concentration of propionic acid and butyric acid are shown to directly affect expression of several CD8+ T-cell activation markers in Example 5 supporting a direct role for these metabolites in T-cell function.

TABLE 14
SCFA/MCFA metabolites compared to outcome

| Metabolite | NR.Mean | R.Mean | R-NR | wc.pval | wc.qval | ttest.p | ttest.qval |
|---|---|---|---|---|---|---|---|
| Propionic acid | 2.986434326 | 3.134712182 | 0.148277857 | 0.023506889 | 0.070521 | 0.019826 | 0.089823 |
| Acetic.acid | 3.34317748 | 3.500896124 | 0.157718644 | 0.01560315 | 0.070521 | 0.019961 | 0.089823 |
| Total.FA | 3.702817864 | 3.830940821 | 0.128122957 | 0.021856856 | 0.070521 | 0.03578 | 0.107341 |
| Butyric.acid | 2.897343529 | 3.050304222 | 0.152960693 | 0.096807223 | 0.197752 | 0.09862 | 0.221895 |

Metabolite (metabolite measured), NR.Mean (mean of log transformed metabolite concentration in non-responders), R.Mean (mean of log transformed metabolite concentration in responders), R-NR (difference in the mean of the logs, >0 means higher in responders vs non-responders), wc.pval (Wilcoxon rank sum test p-value), wc.qval (Wilcoxon rank sum test q-value FDR corrected), ttest.p (t-test p-value), ttest.qval (t-test q-value FDR corrected)

[0771] Global metabolite analysis identified 40 metabolites in stool samples with significantly different quantitative abundance between CPI responders and non-responders (nominal t-test p-value <0.05). (See Table 15.) Thus, production or depletion of these metabolites by bacterial metabolism may influence response to CPI.

TABLE 15
Global metabolite analysis compared to outcome

| Metabolite | SUPER_PATHWAY | SUB_PATHWAY | NR.Mean | R.Mean |
|---|---|---|---|---|
| X-23587 | | | −1.357779211 | 0.010813212 |
| N-methylalanine | Amino Acid | Alanine and Aspartate | −0.446051099 | 0.101791067 |
| | | Metabolism | | |
| erucate (22:1n9) | Lipid | Long Chain | −0.447037897 | 0.466569868 |
| | | Monounsaturated Fatty | | |
| | | Acid | | |
| dodecenedioate | Lipid | Fatty Acid, | −0.969798398 | −0.402784278 |
| (C12:1-DC)* | | Dicarboxylate | | |
| N- | Amino Acid | Polyamine Metabolism | −1.372474465 | −0.593451745 |
| carbamoylputrescine | | | | |
| 7,12- | Lipid | Secondary Bile Acid | −1.291532846 | −0.76525094 |
| diketolithocholate | | Metabolism | | |
| butyrylputrescine/ | Amino Acid | Polyamine Metabolism | −2.026417264 | −0.681485873 |
| isobutyrylputrescine | | | | |
| glycerophosphoserine* | Lipid | Phospholipid | −0.947240281 | −0.342436038 |
| | | Metabolism | | |
| 2S,3R- | Lipid | Fatty Acid, Dihydroxy | −0.615621454 | −0.21320387 |
| dihydroxybutyrate | | | | |
| N-acetylglucosamine/ | Carbohydrate | Aminosugar | −0.812586315 | −0.287797707 |
| N-acetylgalactosamine | | Metabolism | | |
| X-23450 | | | −0.69346716 | −1.305405299 |
| X-23469 | | | −0.986807881 | −0.392973147 |
| X-25045 | | | −0.777862683 | −0.587836558 |
| tyramine O-sulfate | Amino Acid | Tyrosine Metabolism | −1.0639837 | 0.130294714 |
| N-acetylneuraminate | Carbohydrate | Aminosugar | −0.886467473 | −0.236515121 |
| | | Metabolism | | |
| X-24412 | | | −0.903421829 | −0.252711376 |
| mannose | Carbohydrate | Fructose, Mannose and | −2.268406944 | −1.777925664 |
| | | Galactose Metabolism | | |
| malate | Energy | TCA Cycle | −0.835941808 | −0.384672267 |
| 4-ureidobutyrate | Nucleotide | Pyrimidine Metabolism, | −1.250209283 | −0.709009454 |
| | | Uracil containing | | |
| 2-oleoylglycerol | Lipid | Monoacylglycerol | −1.370105786 | −0.450503754 |
| (18:1) | | | | |
| X-23277 | | | −0.731843137 | −0.276769516 |
| X-25323 | | | −1.314292547 | −1.088912135 |
| 1-palmitoyl-2- | Lipid | Galactosyl | −1.058334327 | −0.673322002 |
| linoleoyl- | | Glycerolipids | | |
| galactosylglycerol | | | | |
| (16:0/18:2)* | | | | |
| adrenate (22:4n6) | Lipid | Long Chain | −1.308424242 | −0.672961052 |
| | | Polyunsaturated Fatty | | |
| | | Acid (n3 and n6) | | |
| benzoate | Xenobiotics | Benzoate Metabolism | −0.019319211 | −0.516787092 |
| 1-myristoylglycerol | Lipid | Monoacylglycerol | −1.40483116 | −0.936728807 |
| (14:0) | | | | |
| X-25009 | | | −1.48324015 | −0.964363009 |
| 1-stearoyl-GPE (18:0) | Lipid | Lysophospholipid | −0.839502564 | −0.210275851 |
| 1-oleoyl-GPE (18:1) | Lipid | Lysophospholipid | −0.571445315 | −0.043112194 |
| X-25949 | | | −1.952160224 | −1.078349158 |
| 1-palmitoyl- | Lipid | Galactosyl | −1.267933374 | −0.57495125 |
| galactosylglycerol | | Glycerolipids | | |
| (16:0)* | | | | |
| rosuvastatin lactone | Xenobiotics | Drug - Metabolic | −1.610503507 | −1.938403416 |
| X-23671 | | | −1.328559631 | −1.55343223 |
| N- | Xenobiotics | Food Component/Plant | −1.251749075 | −0.310117083 |
| carboxymethylalanine | | | | |
| N-carbamoylalanine | Amino Acid | Alanine and Aspartate | −0.551843628 | −0.118054493 |
| | | Metabolism | | |
| N-acetylisoleucine | Amino Acid | Leucine, Isoleucine and | −0.970972019 | −0.377608305 |
| | | Valine Metabolism | | |
| dihomo-linoleate | Lipid | Long Chain | −0.267484754 | 0.271754731 |
| (20:2n6) | | Polyunsaturated Fatty | | |
| | | Acid (n3 and n6) | | |
| rosmarinate | Xenobiotics | Food Component/Plant | −0.803281844 | −1.315609948 |
| X-23173 | | | −0.696242073 | −0.10335303 |
| hypoxanthine | Nucleotide | Purine Metabolism, | −0.504907897 | −0.168548527 |
| | | (Hypo)Xanthine/Inosine | | |
| | | containing | | |

| Metabolite | R-NR | wc.pval | wc.qval | ttest.pval | ttest.qva |
|---|---|---|---|---|---|
| X-23587 | 1.368592 | 0.004264 | 0.956851 | 0.00398 | 0.967745 |
| N-methylalanine | 0.547842 | 0.008032 | 0.956851 | 0.005081 | 0.967745 |
| erucate (22:1n9) | 0.913608 | 0.004463 | 0.956851 | 0.00699 | 0.967745 |
| dodecenedioate | 0.567014 | 0.003635 | 0.956851 | 0.007841 | 0.967745 |
| (C12:1-DC)* | | | | | |
| N- | 0.779023 | 0.011497 | 0.956851 | 0.008522 | 0.967745 |
| carbamoylputrescine | | | | | |
| 7,12- | 0.526282 | 0.013224 | 0.956851 | 0.011343 | 0.967745 |
| diketolithocholate | | | | | |
| butyrylputrescine/ | 1.344931 | 0.021995 | 0.956851 | 0.012954 | 0.967745 |
| isobutyrylputrescine | | | | | |
| glycerophosphoserine* | 0.604804 | 0.012846 | 0.956851 | 0.01338 | 0.967745 |
| 2S,3R- | 0.402418 | 0.01156 | 0.956851 | 0.014329 | 0.967745 |
| dihydroxybutyrate | | | | | |
| N-acetylglucosamine/ | 0.524789 | 0.012425 | 0.956851 | 0.016089 | 0.967745 |
| N-acetylgalactosamine | | | | | |
| X-23450 | −0.61194 | 0.015992 | 0.956851 | 0.019009 | 0.967745 |
| X-23469 | 0.593835 | 0.014572 | 0.956851 | 0.019178 | 0.967745 |
| X-25045 | 0.190026 | 0.030114 | 0.956851 | 0.021375 | 0.967745 |
| tyramine O-sulfate | 1.194278 | 0.019903 | 0.956851 | 0.021963 | 0.967745 |
| N-acetylneuraminate | 0.649952 | 0.038866 | 0.956851 | 0.024754 | 0.967745 |
| X-24412 | 0.65071 | 0.037383 | 0.956851 | 0.025778 | 0.967745 |
| mannose | 0.490481 | 0.071121 | 0.956851 | 0.027718 | 0.967745 |
| malate | 0.45127 | 0.028735 | 0.956851 | 0.028546 | 0.967745 |
| 4-ureidobutyrate | 0.5412 | 0.029189 | 0.956851 | 0.028861 | 0.967745 |
| 2-oleoylglycerol | 0.919602 | 0.037709 | 0.956851 | 0.029036 | 0.967745 |
| (18:1) | | | | | |
| X-23277 | 0.455074 | 0.028777 | 0.956851 | 0.029801 | 0.967745 |
| X-25323 | 0.22538 | 0.0547 | 0.956851 | 0.030324 | 0.967745 |
| 1-palmitoyl-2- | 0.385012 | 0.130745 | 0.956851 | 0.036118 | 0.967745 |
| linoleoyl- | | | | | |
| galactosylglycerol | | | | | |
| (16:0/18:2)* | | | | | |
| adrenate (22:4n6) | 0.635463 | 0.273176 | 0.978644 | 0.037122 | 0.967745 |
| benzoate | −0.49747 | 0.032177 | 0.956851 | 0.03994 | 0.967745 |
| 1-myristoylglycerol | 0.468102 | 0.048228 | 0.956851 | 0.040198 | 0.967745 |
| (14:0) | | | | | |
| X-25009 | 0.518877 | 0.041338 | 0.956851 | 0.041548 | 0.967745 |
| 1-stearoyl-GPE (18:0) | 0.629227 | 0.055389 | 0.956851 | 0.042814 | 0.967745 |
| 1-oleoyl-GPE (18:1) | 0.528333 | 0.031281 | 0.956851 | 0.04346 | 0.967745 |
| X-25949 | 0.873811 | 0.041483 | 0.956851 | 0.043735 | 0.967745 |
| 1-palmitoyl- | 0.692982 | 0.059702 | 0.956851 | 0.043756 | 0.967745 |
| galactosylglycerol | | | | | |
| (16:0)* | | | | | |
| rosuvastatin lactone | −0.3279 | 0.014991 | 0.956851 | 0.04465 | 0.967745 |
| X-23671 | −0.22487 | 0.028125 | 0.956851 | 0.045691 | 0.967745 |
| N- | 0.941632 | 0.083367 | 0.956851 | 0.045692 | 0.967745 |
| carboxymethylalanine | | | | | |
| N-carbamoylalanine | 0.433789 | 0.016679 | 0.956851 | 0.046801 | 0.967745 |
| N-acetylisoleucine | 0.593364 | 0.05516 | 0.956851 | 0.04687 | 0.967745 |
| dihomo-linoleate | 0.539239 | 0.041483 | 0.956851 | 0.047064 | 0.967745 |
| (20:2n6) | | | | | |
| rosmarinate | −0.51233 | 0.006176 | 0.956851 | 0.047639 | 0.967745 |
| X-23173 | 0.592889 | 0.027143 | 0.956851 | 0.04875 | 0.967745 |
| hypoxanthine | 0.336359 | 0.064211 | 0.956851 | 0.049438 | 0.967745 |

Metabolite (Metabolite measured), SUPER_PATHWAY (metabolite class as determined by Metabolon), SUB_PATHWAY (Metabolite sub-class as determined by Metabolon), NR.Mean (Mean of log transformed metabolite concentration in non-responders), R.Mean (Mean of log transformed metabolite concentration in responders), R-NR (difference in the mean of the logs, >0 means higher in responders vs non-responders), wc.pval (Wilcoxon rank sum test p-value), wc.qval (Wilcoxon rank sum test q-value FDR corrected), ttest.pval (t-test p-value), ttest.qval (t-test q-value FDR corrected)

### Example 5: FMT Supernatant and Single Species CD8 Gene Expression Assay Correlates with Outcome

[0772] The effects of cancer patient FMTs on CD8 T cell activation and cytotoxicity using a human CD8 T cell activation assay were assessed. The in vitro assay mimics in vivo T cell activation from antigen-presenting cells by utilizing the two activation signals CD3 and CD28, bound to a three-dimensional bead mimicking antigen-presenting cells (see FIG. 6).

[0773] Patient FMTs from stool samples were prepared in vitro and cultured. FMTs were prepared under anaerobic conditions from patient stool samples for a final concentration of 10% FMT in (0.9% saline+15% glycerol), aliquoted and stored at −80° C. Then, Supernatants were generated and used in a CD8 assay. To generate the supernatants, fecal culture medium 4 (FCM4) media was pre-reduced overnight in the anaerobic chamber. FCM4 is composed of complex carbohydrates and mucin in addition to other nutrients that support growth of numerous phylogenetically diverse anaerobic species found in the colon. One vial of FMT material was thawed at RT and it was the spun at 10,000 g for 10 mins. The FMT vial was brought inside the anaerobic chamber and the supernatant was discarded, the volume of the supernatant was removed and recorded, and the same amount of pre-reduced PBS was added to the vial and mixed. Samples were inoculated at a target titer of 5×10⁶-1×10⁷ in a 2 mL deep well plates. The plates were covered with an Aeraseal membrane and incubated at 37° C. anaerobically for 7 days. The plates were centrifuged at 4000 rpm for 10 minutes, supernatants were passed through filter plates, aliquoted and stored at −80° C. for use in in vitro assays.

[0774] Briefly, the human primary CD8 T cells were thawed at 37° C. for 24 hr and activated by CD3 and CD28 at 37° C. for 2 days. The cells were treated at 37° C. for 24 hr with bacterial supernatants from different cancer (i.e., bladder, melanoma, lung and breast cancer) patient FMTs or negative control bacterial media. The cells were analyzed by flow cytometry for viability and proliferation. At the end of the 24 hr treatment with bacterial supernatants, the cells were lysed and the cell lysates were used in a gene expression analysis using multiplexed molecular barcode (available from NanoString Technologies) or multiplex panels.

[0775] Treatment of activated CD8 T cells with these FMT supernatants significantly modulated the expression of many genes involved in T cell activation, cytotoxicity, exhaustion and effector function (see FIGS. 7A-Q; CCL3, CCL4, CCL5, CD69, CTLA4, GZMA, GZMB, GZMH, TIM-3 (HAVCR2), IFNG, IL2RA, LAG3, PD-1, PRF1, TIGIT, TNFα, XCL1/2). Cancer patient FMTs modulate T cell activation and effector function to variable degrees.

[0776] The results of the in vitro CD8 gene expression assay were correlated with clinical response. CD8 expression profiles were converted to log-2 fold change compared to media control. Differential expression of these genes between responders and non-responders was tested via non-parametric Wilcoxon ranksum tests and parametric t-tests. There were 53 samples included in this analysis (25NR and 28R). Several individual CD8 expression profiles were positively and negatively associated with responder status. Responder FMTs induce significantly higher expression of the CD8 activation marker CD69 (FIG. 8A), an effect that is driven by the lung, melanoma, and renal cell carcinoma (RCC) cancer groups (FIG. 8B). T/NK cell recruiting and activating chemokine CCL5 is correlated with outcome, whereas inhibitory receptor TIM3 is inversely correlated with outcome. That is, responder samples induce significantly higher expression of CCL5 (FIG. 9A), whereas responder FMT samples suppress the expression of TIM-3 (FIG. 9B). In certain cancer types responder FMTs induce higher expression of the CD8 effector cytokines TNFalpha (FIG. 10A) and IFNgamma (FIG. 10B), suggesting a cancer-specific microbiome effect on CD8 T cell effector function.

[0777] The CD8 gene expression assay described above was then run with different methods to prepare the FMT sample. Briefly, input titer of bacterial cells was normalized via dilution, bile-acids were added to outgrowth of the FMT, and a new donor was used to isolate CD8+ T-cells. Individual gene level analysis showed greater variation within responder and non-responder categories such that the univariate associations were no longer significant. However the overall magnitude of the mean differences between the two experiments was largely consistent and significantly correlated (R1 vs R2 Pearson correlation r²=0.43, p=0.0006; FIG. 11). The results of the experiment 1 (R1) and the experiment 2 (R2) are summarized in Table 16.

TABLE 16
CD8 gene-level log2 fold changes in responders vs. non-
responders for experiment 1 (R1) and experiment 2 (R2)

| | R1 t-test | R1 Log2 Fold | R2 t-test | R2 Log2 Fold |
|---|---|---|---|---|
| Gene | p-value | Change | p-value | Change |
| SDHA | 0.018262 | 0.049461543 | 0.55619 | 0.009176165 |
| IL2RA | 0.022572 | −0.126060156 | 0.16881 | −0.098000926 |
| TBP | 0.025021 | −0.041780292 | 0.391801 | −0.019734451 |
| CCL5 | 0.025883 | 0.179741705 | 0.572173 | 0.048050663 |
| CD69 | 0.040606 | 0.08851757 | 0.629959 | −0.023557994 |
| HAVCR2.TIM.3 | 0.046484 | −0.080191956 | 0.33861 | −0.063010487 |
| GZMB | 0.049188 | −0.093354338 | 0.205639 | −0.076579714 |
| IL24 | 0.064497 | 0.262238142 | | |
| CD274.PD.L1 | 0.076417 | 0.116054843 | 0.155815 | 0.118383498 |
| GZMH | 0.114346 | −0.09881079 | 0.324135 | −0.06963858 |
| TIGIT | 0.162259 | −0.063503346 | 0.468535 | −0.042340923 |
| XCL1.2 | 0.1656 | −0.070313442 | 0.221975 | −0.061251938 |
| TNF | 0.207122 | 0.044960334 | 0.664535 | −0.015020493 |
| CTLA4 | 0.209005 | −0.052946268 | 0.272593 | −0.045552829 |
| GZMA | 0.225628 | −0.180635199 | 0.991461 | 0.001321844 |
| ABCF1 | 0.280387 | −0.0122174 | 0.113128 | −0.019072405 |
| PDCD1.PD.1 | 0.337851 | 0.044400947 | 0.457329 | −0.035486896 |
| LAG3 | 0.370951 | −0.031286516 | 0.589852 | −0.021682625 |
| CCL4.L1 | 0.707986 | −0.049602514 | 0.587183 | −0.048436733 |
| PRF1 | 0.73927 | −0.007366742 | 0.219371 | −0.043148937 |
| IFNG | 0.816098 | 0.018540369 | 0.79846 | −0.01603919 |
| G6PD | 0.908788 | 0.002094847 | 0.200437 | 0.031731607 |
| CCL3.L1 | 0.941898 | 0.0100926 | 0.843514 | −0.019698694 |

Spearman correlation of taxa abundance with CD8 expression profile across MSK patients (n = 53 patients).

[0778] The relationship between single species, short chain fatty acids, and CD8 gene expression data was analyzed. Several single species analyzed using the in vitro CD8 gene expression assay, induced expression of several effector genes such as the CD8 T cell effector cytokines IFNG (IFNγ) and TNFα, cytotoxic molecules granzyme B and perforin, and the activation marker CD69 (FIGS. 12A-Q). CD8 gene expression and cytotoxicity data for 34 single species was specifically assessed. Two experiments, in which the supernatants for each of the experiments were generated in two separate in vitro outgrowths, showed that two species (Murimonas intestini and Faecalicatena orotica) in particular enhanced CD8 cytotoxicity in a co-culture killing assay with a colorectal cancer cell line, HT-29 cells (FIGS. 13A and 13B).

[0779] Additionally, data from two different CD8 T cell donors (FIGS. 14A-Q and FIGS. 15A-Q) show a dose-dependent effect on CD8 gene expression [i.e., CCL3, CCL4, CCL5, CD69, CTLA4, GZMA, GZMB, GZMH, HAVCR2 (TIM-3), IFNG, IL2RA LAG3, PDCD1 (PD-1), PRF1, TIGIT, TNFα, XCL 1/2] after treatment with the three SCFAs propionate, butyrate and valerate.

[0780] Thus, the results of the in vitro CD8 T cell assay shows that FMTs from responder and non-responder cancer patients to immune checkpoint inhibition therapy can differentially modulate gene expression in CD8 T cells, suggesting a direct microbiome effect on these immune cells. Treating CD8 T cells with FMT supernatants caused changes in expression of activation, immune cell recruitment and inhibitory receptor genes (i.e., CD69, CCL5 and TIM-3, respectively). Analysis of single bacterial strains in the same assays shows that individual strains can also directly affect T cell activation, effector function and cytotoxicity both at the gene expression level, and at the functional level as shown in co-culture assays with the colorectal cancer cell line, HT-29. Finally, testing the SCFAs propionate, butyrate and valerate in the CD8 assay showed a dose-dependent modulation of gene expression in many genes involved in T cell activation, cytotoxicity and effector function, suggesting that the effects on gene expression for bacterial strains and FMTs are at least in part due to bacterial metabolites.

### Example 6: FMT Supernatant CD8 Gene Expression Composite Score (“PC1”) Correlation with Outcome

[0781] As many CD8 genes were similarly associated with outcome on a univariate (one-by-one) level analysis, and the expression of several CD8 genes were internally correlated across samples (e.g., CCL5 and TIM3 expression are negatively correlated with each other) a principal component analysis (PCA) was conducted. The raw gene-expression profiles above were transformed into a set of orthogonal composite scores using PCA. Generalized linear regression was then applied to test whether any principal component was associated with outcome.

[0782] Principal component 1 (PC1) accounted for 44% of the variation present in all genes. PC1 is a composite score involving all genes but the 6 most important genes were: CCL5 and TNFalpha positively loaded and IL2RA, TIM2, TIGIT, and Granzyme A (GZMA) negatively loaded (FIG. 16). PC1 was positively associated with responder status (p=0.04, FIG. 17). PC1 association varied by cancer type with bladder samples containing a signal opposite to the other three cancer types (FIG. 18). When bladder samples are removed the association with outcome increased in strength (p=0.01, FIG. 19).

[0783] These results suggest that bacterial metabolic output, captured by culture of FMTs derived from the stool of CPI treated patients, create a coherent CD8 T-cell gene response where multiple activation and effector genes move in concert. In addition, the primary axis of variation (PC1) shared by these genes quantitatively differs among patients who responded to CPI compared with those who did not, implying bacterial metabolism relevant to immune activation differs among these patient populations.

### Example 7: Stool Taxonomic Correlates with PC1

[0784] Applying a spearman rank test demonstrates the abundance of certain taxa within patient stool are associated with the PC1 score derived from FMT outgrowths as described in Example 5 and Example 6 (Table 17). Specifically, the abundance of two species Intestinimonas butyriciproducens (FIG. 20A) and Anaerotruncus colihominis (FIG. 20B) were very significantly correlated with PC1 across patients (Intestinimonas butyriciproducens: rho=0.54; p-value=2.6e-5; q-value=0.013; Anaerotruncus colihominis: rho=0.49; p-value=1.7e-4; q-value=0.044). Without wishing to be bound by theory, the significant correlation indicates that each species contributes to the CD8 signature. Additional species also showed a high correlation with PC1 across patients, and were also demonstrated to activate gene pathways useful for treating cancer (e.g., anti-inflammatory) and/or enhance CD8 cytotoxicity with a cancer cell line (e.g., Faecalicatena orotica). This finding implies that increasing abundances of these taxa within a complex community of bacteria, as is found in stool or FMTs, improves the overall ability of a complex community to modulate CD8+ T-cells activity into a state we have demonstrated is correlated with CPI response in patients. Notably, some of these taxa (Lachnospiraceae_NG18 sp7, Negativibacillus sp1, Ruminococcaceae_NG18 sp7, and Coriobacteriaceae_NG1) are associated with both PC1/modulation of CD8+ T-cells and response to CPI therapy.

TABLE 17
Stool taxonomic correlates with PC1

| | Taxa | | | Level_specidic | |
|---|---|---|---|---|---|
| Taxa | Level | spearman.p | spearman.rho | FDR | Global_qval |
| Intestinimonas_butyriciproducens | Species | 2.55747E−05 | 0.543943195 | 0.013119821 | 0.019127402 |
| Intestinimonas | Genus | 4.94248E−05 | 0.527466365 | 0.01057691 | 0.019127402 |
| Anaerotruncus_colihominis | Species | 0.000174662 | 0.493300283 | 0.044800686 | 0.045062679 |
| Lachnospiraceae_NG17_sp3 | Species | 0.000960588 | −0.440601881 | 0.143786765 | 0.144627623 |
| Lachnospiraceae_NG29_sp1 | Species | 0.001121144 | 0.435378156 | 0.143786765 | 0.144627623 |
| Lachnospiraceae_NG29 | Genus | 0.001121144 | 0.435378156 | 0.119962447 | 0.144627623 |
| Fusicatenibacter_sp1 | Species | 0.002568004 | 0.405863148 | 0.203596452 | 0.19466764 |
| Dysosmobacter_welbionis | Species | 0.002591175 | 0.408321239 | 0.203596452 | 0.19466764 |
| Oxalobacter_formigenes | Species | 0.002778119 | 0.402920178 | 0.203596452 | 0.19466764 |
| Oxalobacter | Genus | 0.002778119 | 0.402920178 | 0.174924217 | 0.19466764 |
| Oxalobacteraceae | Family | 0.002778119 | 0.402920178 | 0.130571604 | 0.19466764 |
| Emergencia_timonensis | Species | 0.003269612 | 0.39673953 | 0.209663839 | 0.19466764 |
| Emergencia | Genus | 0.003269612 | 0.39673953 | 0.174924217 | 0.19466764 |
| Dysosmobacter | Genus | 0.006257586 | 0.37284309 | 0.242554343 | 0.345955133 |
| Lachnoclostridium | Genus | 0.006800589 | 0.367420198 | 0.242554343 | 0.350910395 |
| Eisenbergiella_massiliensis | Species | 0.007565859 | 0.362923205 | 0.402548306 | 0.357266814 |
| Lachnoclostridium_edouardi | Species | 0.007846946 | 0.361370513 | 0.402548306 | 0.357266814 |
| Prochlorotrichaceae_NG20_sp1 | Species | 0.01001542 | 0.350789566 | 0.467082772 | 0.407996585 |
| Prochlorotrichaceae_NG20 | Genus | 0.01001542 | 0.350789566 | 0.306185699 | 0.407996585 |
| Butyricicoccus | Genus | 0.012377923 | 0.341316842 | 0.331109429 | 0.479025603 |
| Blautia_coccoides_group | Species | 0.015832609 | 0.329945209 | 0.510152091 | 0.513135436 |
| Coriobacteriaceae_NG1 | Genus | 0.01663508 | −0.327611724 | 0.359472893 | 0.513135436 |
| Anaerotruncus | Genus | 0.016797799 | 0.327150295 | 0.359472893 | 0.513135436 |
| Intestinimonas_timonensis | Species | 0.01695503 | 0.326708028 | 0.510152091 | 0.513135436 |
| Angelakisella_sp1 | Species | 0.017171658 | −0.326104374 | 0.510152091 | 0.513135436 |
| Alistipes_putredinis | Species | 0.019150901 | 0.320869774 | 0.510152091 | 0.513135436 |
| Collinsella_bouchesdurhonensis | Species | 0.019378922 | −0.320296612 | 0.510152091 | 0.513135436 |
| Bacteroides_plebeius | Species | 0.019627656 | 0.319677869 | 0.510152091 | 0.513135436 |
| Clostridium_hylemonae | Species | 0.01975156 | 0.319372123 | 0.510152091 | 0.513135436 |
| Christensenellaceae_NG16_sp1 | Species | 0.021213724 | 0.315881554 | 0.510152091 | 0.513135436 |
| Christensenellaceae_NG16 | Genus | 0.021213724 | 0.315881554 | 0.412703362 | 0.513135436 |
| Lawsonibacter_sp7 | Species | 0.022615005 | 0.312722189 | 0.510152091 | 0.513135436 |
| Coprococcus_catus | Species | 0.022953537 | −0.311983769 | 0.510152091 | 0.513135436 |
| Coriobacteriaceae_NG5_sp1 | Species | 0.023747023 | 0.310288294 | 0.510152091 | 0.513135436 |
| Peptoniphilaceae_NG4_sp2 | Species | 0.023779256 | 0.310220434 | 0.510152091 | 0.513135436 |
| Christensenella_minuta | Species | 0.023866764 | 0.310036593 | 0.510152091 | 0.513135436 |
| Coprobacter_secundus_group | Species | 0.025333184 | −0.307037223 | 0.519836933 | 0.515996955 |
| Gabonia | Genus | 0.025333184 | −0.307037223 | 0.436385531 | 0.515996955 |
| Anaerotignum | Genus | 0.026509401 | 0.304735047 | 0.436385531 | 0.526109659 |
| Erysipelotrichia_NO11_NF1 | Family | 0.033432674 | −0.292693167 | 0.559350727 | 0.646922234 |
| Desulfovibrio | Genus | 0.034943868 | 0.290345175 | 0.534141989 | 0.657778548 |
| Bacteroides_gallinarum | Species | 0.03748788 | −0.286575881 | 0.678922043 | 0.657778548 |
| Negativibacillus_sp1 | Species | 0.038699248 | 0.284854903 | 0.678922043 | 0.657778548 |
| Faecalicatena_orotica | Species | 0.04053956 | 0.282323476 | 0.678922043 | 0.657778548 |
| Lachnospiraceae_NG18_sp7 | Species | 0.042900325 | 0.279210999 | 0.678922043 | 0.657778548 |
| Bittarella | Genus | 0.04330321 | 0.278693945 | 0.575984458 | 0.657778548 |
| Bittarella_massiliensis | Species | 0.043493604 | 0.278450969 | 0.678922043 | 0.657778548 |
| Peptostreptococcaceae | Family | 0.044224038 | −0.277526816 | 0.559350727 | 0.657778548 |
| Intestinibacter_Paraclostridium_Terrisporo- | Genus | 0.045986532 | −0.275347286 | 0.575984458 | 0.657778548 |
| bacter_Candidatus_Dorea_Paeniclostridium_Romboutsia | | | | | |
| Anaerotignum_lactatifermentans | Species | 0.046239118 | 0.275040553 | 0.678922043 | 0.657778548 |
| Bacteroides_cellulosilyticus | Species | 0.046865725 | 0.274285488 | 0.678922043 | 0.657778548 |
| Cuneatibacter_caecimuris | Species | 0.047506224 | 0.27352215 | 0.678922043 | 0.657778548 |
| Alistipes | Genus | 0.047755303 | 0.273227569 | 0.575984458 | 0.657778548 |
| Marvinbryantia_sp5 | Species | 0.047853306 | −0.273112005 | 0.678922043 | 0.657778548 |
| Ruminococcaceae_NG18_sp7 | Species | 0.048305355 | −0.272581442 | 0.678922043 | 0.657778548 |
| Lawsonibacter_sp3 | Species | 0.049816551 | 0.27083664 | 0.678922043 | 0.657778548 |

Taxa (taxonomic group), Taxa Level (Taxonomic level), spearman.p (p-value from spearman correlation), spearman.rho (Rho value from spearman correlation, positive means positively associated with PC1), Level_specidic FDR (FDR corrected q-values within that taxonomic level), Global_qval (FDR corrected q-values across all taxonomic levels)

TABLE A
Species associated with SEQ ID Nos.

| Species | SEQ ID Nos. |
|---|---|
| Massilimaliae_timonensis | 1 |
| Frisingicoccus_sp2 | 9 |
| Alistipes_putredinis | 14 |
| Denitrobacterium_detoxificans | 56 |
| Marvinbryantia_sp8 | 62 |
| Anaerotignum_sp2 | 63 |
| Ruminococcaceae_NG15_sp3 | 69 |
| Neglecta_timonensis | 121 |
| [Anaerotruncus]_rubiinfantis | 124 |
| Prevotellamassilia_timonensis | 126 |
| Massilimaliae_massiliensis | 130 |
| Muricomes_sp1 | 133 |
| Gordonibacter_pamelaeae | 162 |
| Peptoniphilaceae_NG4_sp2 | 172 |
| Ruminococcaceae_NG33_sp1 | 184 |
| Peptoniphilaceae_NG4_sp4 | 185 |
| Ruthenibacterium_sp1 | 186 |
| Monoglobus_pectinilyticus | 196 |
| Corynebacterium_durum | 259 |
| Christensenellaceae_NG5_sp2 | 509 |
| Cuneatibacter_caecimuris | 516 |
| Angelakisella_massiliensis | 538 |
| Massilimaliae_sp1 | 594 |
| [Clostridium]_minihomine | 745 |
| [Allisonella]_histaminiformans | 774 |
| [Merdimonas]_faecis | 1010 |
| Murimonas_intestini | 1621 |
| Prochlorotrichaceae_NG20_sp1 | 1661 |
| Clostridium_disporicum | 1757 |
| Flavonifractor_plautii | 1758 |
| Turicibacter_sanguinis | 1759 |
| Cellulosilyticum_lentocellum | 1760 |
| Erysipelatoclostridium_ramosum | 1761 |
| Dorea_longicatena | 1762 |
| [Clostridium]_aldenense | 1763 |
| [Clostridium]_bolteae | 1764 |
| [Clostridium]_innocuum | 1765 |
| Eisenbergiella_tayi | 1766 |
| Blautia_obeum | 1767 |
| [Clostridium]_scindens | 1768 |
| Eubacterium_callanderi | 1769 |
| Terrisporobacter_petrolearius | 1770 |
| Faecalicatena_contorta_strain | 1771 |
| Escherichia_fergusonii | 1772 |
| Bifidobacterium_dentium | 1773 |
| [Clostridium]_spiroforme | 1774 |
| Roseburia_hominis | 1775 |
| Holdemania_filiformis | 1776 |
| [Clostridium]_symbiosum | 1777 |
| Oscillibacter_valericigenes | 1778 |
| [Clostridium]_leptum | 1779 |
| Actinomycetaceae_NG7_sp1 | 1011, 1012, 1013, 1014, 1015, 1016, 1017 |
| Anaerostipes_hadrus | 1018, 1019, 1020, 1021, 1022, 1023, 1024, 1025, |
| | 1026, 1027, 1028, 1029, 1030, 1031, 1032, 1033, |
| | 1034, 1035, 1036, 1037, 1038, 1039, 1040, 1041, |
| | 1042, 1043, 1044, 1045, 1046, 1047, 1048, 1049, |
| | 1050, 1051, 1052, 1053, 1054, 1055, 1056, 1057 |
| Anaerotignum_lactatifermentans | 1058, 1059, 1060, 1061, 1062, 1063, 1064, 1065 |
| Anaerotruncus_colihominis | 1066, 1067, 1068, 1069, 1070, 1071, 1072, 1073, |
| | 1074, 1075, 1076, 1077, 1078, 1079, 1080, 1081, |
| | 1082, 1083, 1084, 1085 |
| Bacteroides_cellulosilyticus | 1086, 1087, 1088, 1089, 1090, 1091, 1092, 1093, |
| | 1094, 1095, 1096, 1097, 1098, 1099, 1100, 1101, |
| | 1102, 1103, 1104, 1105, 1106 |
| Parabacteroides_merdae | 11, 35, 78, 117, 137 |
| Bacteroides_coprocola | 1107, 1108, 1109, 1110, 1111, 1112 |
| Bacteroides_faecis | 1113, 1114, 1115, 1116, 1117, 1118, 1119, 1120, |
| | 1121, 1122, 1123, 1124, 1125, 1126, 1127 |
| Bacteroides_gallinarum | 1128, 1129 |
| Bacteroides_massiliensis | 1130, 1131, 1132, 1133, 1134, 1135 |
| Bacteroides_plebeius | 1136, 1137, 1138, 1139, 1140, 1141, 1142, 1143, |
| | 1144, 1145, 1146, 1147, 1148, 1149, 1150, 1151, |
| | 1152, 1153, 1154, 1155 |
| Bifidobacterium_animalis | 1156, 1157, 1158, 1159, 1160, 1161, 1162, 1163, |
| | 1164, 1165, 1166, 1167, 1168, 1169, 1170, 1171, |
| | 1172, 1173, 1174, 1175, 1176, 1177, 1178, 1179, |
| | 1180, 1181, 1182, 1183, 1184, 1185, 1186, 1187, |
| | 1188, 1189, 1190, 1191, 1192, 1193, 1194, 1195, |
| | 1196, 1197, 1198, 1199, 1200, 1201, 1202, 1203, |
| | 1204, 1205, 1206, 1207, 1208, 1209, 1210, 1211, |
| | 1212, 1213, 1214, 1215, 1216, 1217, 1218 |
| Intestinibacter_bartlettii | 12, 13, 140, 157 |
| Blautia_coccoides_group | 1219, 1220, 1221, 1222, 1223, 1224, 1225, 1226, |
| | 1227, 1228, 1229, 1230, 1231, 1232, 1233, 1234, |
| | 1235, 1236, 1237, 1238, 1239, 1240, 1241, 1242, |
| | 1243, 1244, 1245, 1246, 1247, 1248, 1249, 1250, |
| | 1251, 1252, 1253, 1254, 1255, 1256, 1257, 1258, |
| | 1259, 1260, 1261, 1262, 1263, 1264, 1265, 1266, |
| | 1267, 1268, 1269, 1270, 1271, 1272 |
| Ruminococcaceae_NG12_sp1 | 122, 174 |
| [Romboutsia]_timonensis | 127, 128, 539, 540 |
| Butyricicoccus_sp2 | 1273, 1274 |
| Christensenella_minuta | 1275, 1276, 1277, 1278, 1279, 1280, 1281, 1282 |
| Christensenella_timonensis | 1283, 1284, 1285 |
| Christensenellaceae_NG16_sp1 | 1286, 1287, 1288 |
| Collinsella_bouchesdurhonensis | 1289, 1290, 1291, 1292 |
| Lactonifactor_longoviformis | 129, 158, 176, 541, 578, 592 |
| Desulfovibrio_desulfuricans | 1293, 1294, 1295, 1296 |
| Dialister_invisus | 1297, 1298, 1299 |
| Eisenbergiella_massiliensis | 1300, 1301, 1302, 1303, 1304, 1305, |
| | 1306, 1307, 1308 |
| Emergencia_timonensis | 1309, 1310, 1311, 1312, 1313, 1314, 1315, 1316, |
| | 1317, 1318, 1319, 1320 |
| Neobitarella_massiliensis | 132, 179 |
| Faecalibacterium_prausnitzii | 1321, 1322, 1323, 1324, 1325, 1326, 1327, 1328, |
| | 1329, 1330, 1331, 1332, 1333, 1334, 1335, 1336, |
| | 1337, 1338, 1339, 1340, 1341, 1342, 1343, 1344, |
| | 1345, 1346, 1347, 1348, 1349 |
| Fusicatenibacter_sp1 | 1350, 1351, 1352, 1353, 1354, 1355 |
| Gemmiger_sp2 | 1356, 1357, 1358, 1359, 1360, 1361, 1362 |
| Granulicatella_adiacens | 1363, 1364, 1365, 1366, 1367, 1368 |
| Intestinimonas_butyriciproducens | 1369, 1370, 1371, 1372, 1373, 1374, 1375, 1376, |
| | 1377, 1378, 1379, 1380, 1381, 1382, 1383, 1384, |
| | 1385, 1386, 1387, 1388, 1389, 1390, 1391, 1392, |
| | 1393, 1394 |
| Intestinimonas_massiliensis | 1395, 1396, 1397, 1398, 1399, 1400, 1401, 1402 |
| Intestinimonas_timonensis | 1403, 1404 |
| Lachnoclostridium_edouardi | 1405, 1406, 1407, 1408, 1409, 1410 |
| Lachnospira_pectinoschiza | 1411, 1412, 1413, 1414, 1415, 1416 |
| Lachnospiraceae_NG17_sp3 | 1417, 1418 |
| Lachnospiraceae_NG18_sp7 | 1419, 1420, 1421, 1422, 1423, 1424, 1425, 1426 |
| Lactobacillus_delbrueckii | 1427, 1428, 1429, 1430, 1431, 1432, 1433, 1434, |
| | 1435, 1436, 1437, 1438, 1439, 1440, 1441, 1442, |
| | 1443, 1444, 1445, 1446, 1447, 1448, 1449, 1450, |
| | 1451, 1452, 1453, 1454, 1455, 1456, 1457, 1458, |
| | 1459, 1460, 1461, 1462, 1463, 1464, 1465, 1466, |
| | 1467, 1468, 1469, 1470, 1471, 1472, 1473, 1474, |
| | 1475, 1476, 1477, 1478, 1479, 1480, 1481, 1482, |
| | 1483, 1484, 1485, 1486, 1487, 1488, 1489, 1490, |
| | 1491, 1492, 1493, 1494, 1495, 1496, 1497, 1498, |
| | 1499, 1500, 1501, 1502, 1503, 1504, 1505 |
| Anaerofustis_stercorihominis | 15, 72, 150, 183 |
| Lactococcus_lactis | 1506, 1507, 1508, 1509, 1510, 1511, 1512, 1513, |
| | 1514, 1515, 1516, 1517, 1518, 1519, 1520, 1521, |
| | 1522, 1523, 1524, 1525, 1526, 1527, 1528, 1529, |
| | 1530, 1531, 1532, 1533, 1534, 1535, 1536, 1537, |
| | 1538, 1539, 1540, 1541, 1542, 1543, 1544, 1545, |
| | 1546, 1547, 1548, 1549, 1550, 1551, 1552, 1553, |
| | 1554, 1555, 1556, 1557, 1558, 1559, 1560, 1561, |
| | 1562, 1563, 1564, 1565, 1566, 1567, 1568, 1569, |
| | 1570, 1571, 1572, 1573, 1574, 1575, 1576, 1577, |
| | 1578, 1579, 1580, 1581, 1582, 1583, 1584, 1585, |
| | 1586, 1587, 1588, 1589, 1590, 1591, 1592, 1593, |
| | 1594, 1595, 1596, 1597, 1598, 1599, 1600, 1601, |
| | 1602, 1603 |
| Collinsella_intestinalis | 16, 17, 79, 81, 134 |
| Lawsonibacter_sp3 | 1604, 1605, 1606, 1607 |
| Lawsonibacter_sp7 | 1608, 1609, 1610, 1611, 1612, 1613, 1614, 1615 |
| Marvinbryantia_sp5 | 1616, 1617, 1618, 1619, 1620 |
| Odoribacter_splanchnicus | 1622, 1623, 1624, 1625, 1626, 1627, 1628, 1629, |
| | 1630, 1631, 1632, 1633, 1634, 1635, 1636, 1637, |
| | 1638, 1639, 1640, 1641, 1642, 1643, 1644, 1645, |
| | 1646, 1647, 1648 |
| Alistipes_indistinctus | 163, 165 |
| Oxalobacter_formigenes | 1649, 1650, 1651, 1652, 1653 |
| Prevotella_buccalis | 1654, 1655, 1656, 1657, 1658, 1659, 1660 |
| Propionibacterium_freudenreichii | 1662, 1663, 1664, 1665, 1666, 1667, 1668, 1669, |
| | 1670, 1671, 1672, 1673, 1674, 1675, 1676, 1677, |
| | 1678, 1679, 1680, 1681, 1682, 1683, 1684, 1685, |
| | 1686, 1687, 1688, 1689, 1690, 1691, 1692, 1693, |
| | 1694, 1695 |
| Roseburia_faecis | 1696, 1697, 1698, 1699, 1700, 1701, |
| | 1702, 1703, 1704 |
| Roseburia_intestinalis | 1705, 1706, 1707, 1708, 1709, 1710, 1711, 1712, |
| | 1713, 1714, 1715, 1716, 1717, 1718, 1719, 1720, |
| | 1721, 1722, 1723, 1724, 1725, 1726, 1727, 1728, |
| | 1729, 1730, 1731, 1732 |
| Ruthenibacterium_lactatiformans | 1733, 1734, 1735, 1736, 1737, 1738, 1739, 1740, |
| | 1741, 1742, 1743, 1744, 1745, 1746, |
| | 1747, 1748, 1749 |
| Scardovia_wiggsiae | 1750, 1751, 1752, 1753, 1754 |
| Slackia_isoflavoniconvertens | 1755, 1756 |
| Collinsella_stercoris | 18, 103 |
| Blautia_luti_group | 187, 189, 200, 201, 325, 326, 327, 328, 409, 429, |
| | 431, 432, 433, 437, 454, 458, 465, 467, 468, 475, |
| | 511, 522, 523, 524, 525, 526, 527, 528, 529, 574, |
| | 579, 581, 586, 587, 595, 596, 599 |
| Ruminococcaceae_NG13_sp1 | 188, 455 |
| Fusicatenibacter_sp2 | 190, 193, 453, 478, 502, 503, 504, 505, 506, 507, |
| | 564, 565 |
| Agathobaculum_butyriciproducens_group | 191, 195, 391, 392, 393, 394, 395, 396, 397, 398, |
| | 413, 452, 457, 466, 469, 471, 472, 473, 474, 476, |
| | 479, 480, 481, 589, 597 |
| [Ruminococcus]_bromii | 192, 381, 382, 383, 414, 415, 425, 428, 430, 434, |
| | 435, 436, 439, 441, 444, 577, 600 |
| Streptococcus_parasanguinis | 194, 217, 224, 234, 235, 236, 248, 257, 258, 273, |
| | 292, 307, 308, 310, 311, 312, 314, 319, 322, 334, |
| | 346, 347, 356, 360, 361, 362, 369, 443, 447, 463, |
| | 494, 554, 555, 573 |
| Streptococcus_australis | 197, 198, 237, 238, 270, 271, 272, 306, 313, 316, |
| | 336, 337, 338, 421, 483, 484, 486, 497, 498, 499, |
| | 501, 508, 510, 547, 548, 550, 551, 552 |
| Lachnospiraceae_NG30_sp3 | 199, 440, 464, 591 |
| Blautia_wexlerae | 2, 3, 6, 10, 19, 20, 21, 22, 23, 24, 73, 80, 82, 83, |
| | 84, 86, 87, 89, 91, 92, 93, 94, 96, 97, 98, 99, 100, |
| | 101, 104, 105, 106, 107, 109, 110, 111, 112, 114, |
| | 116, 123, 135, 136, 139, 143, 145, 146, 148, 156, |
| | 168, 169, 170, 178, 180, 182, 601, 602, 603, 606, |
| | 614, 615, 616, 617, 618, 619, 676, 691, 693, 696, |
| | 697, 699, 700, 702, 704, 705, 706, 709, 710, 711, |
| | 713, 714, 715, 716, 717, 718, 720, 721, 722, 723, |
| | 724, 725, 727, 730, 735, 746, 747, 748, 750, 751, |
| | 752, 757, 759, 761, 762, 763, 769, 770, 772 |
| [Lactobacillus]_fermentum | 202, 203, 204, 205, 267, 268, 269, 343, 344, 377, |
| | 378, 379, 400, 401, 402, 403, 487, 488, 489, 490, |
| | 491, 492, 493, 512, 513, 514, 515, 520, 584, 588 |
| Bacteroides_dorei_group | 206, 207, 208, 209, 210, 215, 223, 249, 250, 251, |
| | 252, 260, 261, 262, 285, 416, 419, 420, 422, 423, |
| | 426, 427, 451, 459, 482, 485, 517, 518, 519, 549, |
| | 556, 557, 558, 559, 562, 563, 590 |
| Streptococcus_gordonii | 211, 231, 232, 233, 289, 293, 321, 339, 340, 341, |
| | 342, 353, 374, 495, 496, 500, 546 |
| [Atopobium]_parvulum | 212, 282, 284, 287, 609, 627, 628, 629 |
| Desulfovibrio_fairfieldensis | 213, 245, 331, 332 |
| Schaalia_odontolytica | 214, 216, 255, 263, 283, 294, 299, 315, |
| | 384, 521, 543 |
| Bacteroides_intestinalis | 218, 410, 418, 438, 442, 445, 449, 450, 456, 460, |
| | 566, 583 |
| Rothia_mucilaginosa | 219, 246, 295, 296, 297, 298, 300, 301, 302, 303, |
| | 304, 330, 349, 352, 357, 358, 359, 363, 365, 366, |
| | 368, 370, 372, 373, 380, 385, 620, 621, 630, 631, |
| | 632, 633, 634, 635, 636, 637, 638, 642, 644, 645, |
| | 646, 647, 648, 649, 650, 651, 652, 653, 654, 655, |
| | 660, 661 |
| Streptococcus_salivarius_group | 220, 221, 222, 226, 277, 286, 309, 329, 371, 375, |
| | 399, 424, 530, 531, 553 |
| Streptococcus_infantis_group | 225, 227, 228, 229, 230, 239, 240, 241, 242, 243, |
| | 244, 253, 254, 264, 290, 291, 305, 317, 318, 320, |
| | 333, 335, 348, 354, 355, 364, 367, 537, 544, 545 |
| Actinomyces_graevenitzii | 247, 265, 387 |
| Pseudoflavonifractor_capillosus | 25, 26 |
| Schaalia_sp2 | 256, 266 |
| Alistipes_finegoldii | 27, 31, 32, 149 |
| [Ruminococcus]_gnavus | 274, 275, 276, 278, 279, 280, 281, 388, 417, 446, |
| | 448, 461, 532, 533, 534, 535, 536, 567, 568, 569, |
| | 570, 571, 572, 575, 576, 580, 593 |
| Bilophila_wadsworthia | 28, 30, 41 |
| Alistipes_shahii | 29, 76 |
| Bittarella_massiliensis | 324, 542 |
| Barnesiella_intestinihominis | 33, 160, 167 |
| Leuconostoc_gelidum | 34, 55, 120 |
| Rothia_dentocariosa | 345, 350, 351, 386 |
| Alistipes_obesi | 36, 166 |
| Sutterella_wadsworthensis | 37, 38, 39, 67, 173 |
| Bacteroides_caccae | 389, 390, 462, 560, 585 |
| Blautia_faecis | 4, 7, 144, 147, 154, 155, 159, 171, 177 |
| [Adlercreutzia]_equolifaciens_group | 40, 68, 70 |
| Blautia_sp1 | 404, 405, 406, 407, 408 |
| [Coprococcus]_catus | 411, 412 |
| Bifidobacterium_catenulatum_group | 42, 43, 44, 45, 46, 47, 48, 50, 51, 52, 57, 58, 59, |
| | 64, 65, 66, 74, 75, 88, 90, 138, 141, 142, 161 |
| Ruminococcaceae_NG18_sp1 | 49, 102, 113, 288, 470, 477 |
| Lachnospiraceae_NG29_sp1 | 5, 8, 151 |
| [Extibacter]_muris | 53, 77, 119, 125, 175 |
| Alistipes_onderdonkii | 54, 60, 164, 323, 376, 582 |
| Clostridium_saudiense | 561, 598 |
| Acetatifactor_sp1 | 604, 607, 675, 707, 708, 712, 719, 726, 728, 729, |
| | 753, 760, 768, 771 |
| Blautia_caecimuris | 605, 733, 754, 756, 765 |
| Campylobacter_concisus | 608, 624, 626, 639, 656, 657, 658, 659, 668, 669, |
| | 670, 671, 672, 673, 674 |
| Anaeromassilibacillus_sp3 | 61, 181 |
| Prevotella_copri | 610, 611, 612, 677, 678, 679, 680, 682, 683, 684, |
| | 685, 686, 687, 689, 692, 694, 695, 698, 701, 731 |
| Holdemania_filiformis | 613, 681, 736, 749 |
| Hungatella_sp2 | 622, 623, 734 |
| Holdemania_massiliensis | 625, 764 |
| Anaerobutyricum_hallii | 640, 641, 688, 690, 703, 737, 738, 739, 740, 741, |
| | 742, 743, 744, 755, 766, 773 |
| Akkermansia_muciniphila | 643, 662, 663, 664, 665, 666, 667, 767 |
| Harryflintia_acetispora | 71, 118, 131, 152 |
| Dysosmobacter_welbionis | 732, 758 |
| [Clostridium]_asparagiforme_group | 775, 776, 777, 778, 779, 780, 781, 782, 783, 784, |
| | 785, 786, 787, 788, 789 |
| [Clostridium]_hylemonae | 790, 791, 792, 793, 794, 795, 796 |
| [Coprobacter]_secundus_group | 797, 798, 799 |
| [Faecalicatena]_orotica | 800, 801, 802, 803, 804, 805, 806, 807, |
| | 808, 809, 810 |
| [Lactobacillus]_paracasei | 811, 812, 813, 814, 815, 816, 817, 818, 819, 820, |
| | 821, 822, 823, 824, 825, 826, 827, 828, 829, 830, |
| | 831, 832, 833, 834, 835, 836, 837, 838, 839, 840, |
| | 841, 842, 843, 844, 845, 846, 847, 848, 849, 850, |
| | 851, 852, 853, 854, 855, 856, 857, 858, 859, 860, |
| | 861, 862, 863, 864, 865, 866, 867, 868, 869, 870, |
| | 871, 872, 873, 874, 875, 876, 877, 878, 879, 880, |
| | 881, 882, 883, 884, 885, 886, 887, 888, 889, 890, |
| | 891, 892, 893, 894, 895, 896, 897, 898, 899, 900, |
| | 901, 902, 903, 904, 905, 906, 907, 908, 909, 910, |
| | 911, 912, 913, 914, 915, 916, 917, 918, 919, 920, |
| | 921, 922, 923, 924, 925, 926, 927, 928, 929, 930 |
| Hungatella_sp1 | 85, 95, 108, 115, 153 |
| [Lactobacillus]_reuteri | 931, 932, 933, 934, 935, 936, 937, 938, 939, 940, |
| | 941, 942, 943, 944, 945, 946, 947, 948, 949, 950, |
| | 951, 952, 953, 954, 955, 956, 957, 958, 959, 960, |
| | 961, 962, 963, 964, 965, 966, 967, 968, 969, 970, |
| | 971, 972, 973, 974, 975, 976, 977, 978, 979, 980, |
| | 981, 982, 983, 984, 985, 986, 987, 988, 989, 990, |
| | 991, 992, 993, 994, 995, 996, 997, 998, 999, |
| | 1000, 1001, 1002, 1003, 1004, 1005, 1006, 1007, |
| | 1008, 1009 |

[0785] It is to be appreciated that the Detailed Description section, and not the Summary and Abstract sections, is intended to be used to interpret the claims. The Summary and Abstract sections may set forth one or more but not all exemplary aspects of the present disclosure as contemplated by the inventor(s), and thus, are not intended to limit the present disclosure and the appended claims in any way.

[0786] The present disclosure has been described above with the aid of functional building blocks illustrating the implementation of specified functions and relationships thereof. The boundaries of these functional building blocks have been arbitrarily defined herein for the convenience of the description. Alternate boundaries can be defined so long as the specified functions and relationships thereof are appropriately performed.

[0787] The foregoing description of the specific aspects will so fully reveal the general nature of the disclosure that others can, by applying knowledge within the skill of the art, readily modify and/or adapt for various applications such specific aspects, without undue experimentation, without departing from the general concept of the present disclosure. Therefore, such adaptations and modifications are intended to be within the meaning and range of equivalents of the disclosed aspects, based on the teaching and guidance presented herein. It is to be understood that the phraseology or terminology herein is for the purpose of description and not of limitation, such that the terminology or phraseology of the present specification is to be interpreted by the skilled artisan in light of the teachings and guidance.

[0788] The breadth and scope of the present disclosure should not be limited by any of the above-described exemplary aspects, but should be defined only in accordance with the following claims and their equivalents.

[0789] The contents of all cited references (including literature references, patents, patent applications, and websites) that may be cited throughout this disclosure are hereby expressly incorporated by reference in their entirety for any purpose, as are the references cited therein.

The application's sequence listing, which the Patent Office published only in electronic form, follows.

SEQUENCE LISTING (1779 sequences)

SEQ ID NO: 1 - DNA, 1522 bp, artificial sequence
  ERR1022299_02642 Massilimaliae_timonensis
taaagagtttgatcctggctcaggacgaacgctgtcggcgcgcctaacacatgcaagtcgaacgaagttgctttgaatgaattcttcggaaggaatttgattcaacttagtggcggacgggtgagtaacgcgtgagtaacctgcctttcagagggggataacgtctggaaacggacgctaataccgcataacatattggtttcgcatggagctgatatcaaaggagcaatccgctgaaagatggactcgcgtccaattagctagttggtgaggtaacggcccaccaaggcgacgattggtagccggactgagaggttgaacggccacattgggactgagacacggcccagactcctacgggaggcagcagtggggaatattgcacaatgggggaaaccctgatgcagcgacgccgagtgagggaagaaggttttcggattgtaaacctctgtccttggtgaagataatgacggtaaccaaggaggaagctacggctaactacgtgccagcagccgcggtaatacgtaggtagcgagcgttgtccggaattactgggtgtaaagggagcgtaggcgggattgcaagttgaatgttaaatctatgggctcaacccatagccgcgttcaaaactgcagttcttgagtgaagtagaggcaggcggaattcctagtgtagcggtgaaatgcgtaaatattaggaggaacaccagtggcgaaggcggcctgctgggctttaactgacgctgaggctcgaaagcgtgggtagcaaacaggattagataccctggtagtccacgctgtaaacgatgattactaggtgtggggggactgaccccttccgtgccggagttaacacaataagtaatccacctggggagtacgaccgcaaggttgaaactcaaaggaattgacgggggcccgcacaagcagtggagtatgtggtttaattcgaagcaacgcgaagaaccttaccaggtcttgacatccggtgcatagcctagagataggtgaagcccttcggggcaccgagacaggtggtgcatggttgtcgtcagctcgtgtcgtgagatgttgggttaagtcccgcaacgagcgcaacccttacgtttagttgctacgcaagagcactctagacggactgccgttgacaaaacggaggaaggtggggatgacgtcaaatcatcatgccccttatgacctgggctacacacgtactacaatggctattaacagagggaagcaagatggtgacatggagcaaacccctaaaaatagtctcagttcggattgcaggctgcaacccgcctgcatgaagccggaattgctagtaatcgcggatcagcatgccgcggtgaatacgttcccgggccttgtacacaccgcccgtcacaccatgagagttggcaacacccgaagccgatagtctaaccgcaagggggacgtcgtcgaaggtggggttgatgattggggtgaagtcgtaacaaggtagccgtatcggaaggtgcggctggatcacctccttt

SEQ ID NO: 2 - DNA, 1527 bp, artificial sequence
  ERR1022377_03675 Blautia_wexlerae
tcagagagtttgatcctggctcaggatgaacgctggcggcgtgcttaacacatgcaagtcgaacgggaattactttattgaaacttcggtcgatttaatttaattctagtggcggacgggtgagtaacgcgtgggtaacctgccttatacagggggataacagtcagaaatggctgctaataccgcataagcgcacagagctgcatggctcagtgtgaaaaactccggtggtataagatggacccgcgttggattagctagttggtggggtaacggcccaccaaggcgacgatccatagccggcctgagagggtgaacggccacattgggactgagacacggcccagactcctacgggaggcagcagtggggaatattgcacaatgggggaaaccctgatgcagcgacgccgcgtgaaggaagaagtatctcggtatgtaaacttctatcagcagggaagatagtgacggtacctgactaagaagccccggctaactacgtgccagcagccgcggtaatacgtagggggcaagcgttatccggatttactgggtgtaaagggagcgtagacggtgtggcaagtctgatgtgaaaggcatgggctcaacctgtggactgcattggaaactgtcatacttgagtgccggaggggtaagcggaattcctagtgtagcggtgaaatgcgtagatattaggaggaacaccagtggcgaaggcggcttactggacggtaactgacgttgaggctcgaaagcgtggggagcaaacaggattagataccctggtagtccacgccgtaaacgatgaatactaggtgtcgggtggcagagccattcggtgccgtcgcaaacgcagtaagtattccacctggggagtacgttcgcaagaatgaaactcaaaggaattgacggggacccgcacaagcggtggagcatgtggtttaattcgaagcaacgcgaagaaccttaccaagtcttgacatccgcctgaccgatccttaaccggatctttccttcgggacaggcgagacaggtggtgcatggttgtcgtcagctcgtgtcgtgagatgttgggttaagtcccgcaacgagcgcaacccctatcctcagtagccagcatttaaggtgggcactctggggagactgccagggataacctggaggaaggcggggatgacgtcaaatcatcatgccccttatgatttgggctacacacgtgctacaatggcgtaaacaaagggaagcgagattgtgagatggagcaaatcccaaaaataacgtcccagttcggactgtagtctgcaacccgactacacgaagctggaatcgctagtaatcgcggatcagaatgccgcggtgaatacgttcccgggtcttgtacacaccgcccgtcacaccatgggagtcagtaacgcccgaagtcagtgacctaactgcaaagaaggagctgccgaaggcgggaccgatgactggggtgaagtcgtaacaaggtagccgtatcggaaggtgcggctggatcacctccttt

SEQ ID NO: 3 - DNA, 1527 bp, artificial sequence
  >ERR1022379_03717 Blautia_wexlerae
tcagagagtttgatcctggctcaggatgaacgctggcggcgtgcttaacacatgcaagtcgaacgggaattactttattgaaacttcggtcgatttaatttaattctagtggcggacgggtgagtaacgcgtgggtaacctgccttatacagggggataacagtcagaaatggctgctaataccgcataagcgcacagagctgcatggctcagtgtgaaaaactccggtggtataagatggacccgcgttggattagcttgttggtggggtaacggcccaccaaggcgacgatccatagccggcctgagagggtgaacggccacattgggactgagacacggcccagactcctacgggaggcagcagtggggaatattgcacaatgggggaaaccctgatgcagcgacgccgcgtgaaggaagaagtatctcggtatgtaaacttctatcagcagggaagatagtgacggtacctgactaagaagccccggctaactacgtgccagcagccgcggtaatacgtagggggcaagcgttatccggatttactgggtgtaaagggagcgtagacggtgtggcaagtctgatgtgaaaggcatgggctcaacctgtggactgcattggaaactgtcatacttgagtgccggaggggtaagcggaattcctagtgtagcggtgaaatgcgtagatattaggaggaacaccagtggcgaaggcggcttactggacggtaactgacgttgaggctcgaaagcgtggggagcaaacaggattagataccctggtagtccacgccgtaaacgatgaatactaggtgtcgggtggcagagccattcggtgccgtcgcaaacgcagtaagtattccacctggggagtacgttcgcaagaatgaaactcaaaggaattgacggggacccgcacaagcggtggagcatgtggtttaattcgaagcaacgcgaagaaccttaccaagtcttgacatccgcctgaccgatccttaaccggatctttccttcgggacaggcgagacaggtggtgcatggttgtcgtcagctcgtgtcgtgagatgttgggttaagtcccgcaacgagcgcaacccctatcctcagtagccagcatttaaggtgggcactctggggagactgccagggataacctggaggaaggcggggatgacgtcaaatcatcatgccccttatgatttgggctacacacgtgctacaatggcgtaaacaaagggaagcgagattgtgagatggagcaaatcccaaaaataacgtcccagttcggactgtagtctgcaacccgactacacgaagctggaatcgctagtaatcgcggatcagaatgccgcggtgaatacgttcccgggtcttgtacacaccgcccgtcacaccatgggagtcagtaacgcccgaagtcagtgacctaactgcaaagaaggagctgccgaaggcgggaccgatgactggggtgaagtcgtaacaaggtagccgtatcggaaggtgcggctggatcacctccttt

SEQ ID NO: 4 - DNA, 1528 bp, artificial sequence
  >ERR1022424_04081 Blautia_faecis
tcagagagtttgatcctggctcaggatgaacgctggcggcgtgcttaacacatgcaagtcgaacgggaaacatttcattgaggcttcggcggatttgatctgtttctagtggcggacgggtgagtaacgcgtgggtaacctgccttatactgggggataacagccagaaatgactgctaataccgcataagcgcacagaaccgcatggttcggtgtgaaaaactccggtggtataagatggacccgcgttggattagctagttggcagggcagcggcctaccaaggcgacgatccatagccggcctgagagggtgaacggccacattgggactgagacacggcccagactcctacgggaggcagcagtggggaatattgcacaatgggggaaaccctgatgcagcgacgccgcgtgaaggaagaagtatctcggtatgtaaacttctatcagcagggaagataatgacggtacctgactaagaagccccggctaactacgtgccagcagccgcggtaatacgtagggggcaagcgttatccggatttactgggtgtaaagggagcgtagacggcgcagcaagtctgatgtgaaaggcaggggcttaacccctggactgcattggaaactgctgtgcttgagtgccggaggggtaagcggaattcctagtgtagcggtgaaatgcgtagatattaggaggaacaccagtggcgaaggcggcttactggacggtaactgacgttgaggctcgaaagcgtggggagcaaacaggattagataccctggtagtccacgccgtaaacgatgaatactaggtgtcagggagcacagctctttggtgccgccgcaaacgcattaagtattccacctggggagtacgttcgcaagaatgaaactcaaaggaattgacggggacccgcacaagcggtggagcatgtggtttaattcgaagcaacgcgaagaaccttaccaaatcttgacatccctctgaccgggacttaaccgtccctttccttcgggacaggggagacaggtggtgcatggttgtcgtcagctcgtgtcgtgagatgttgggttaagtcccgcaacgagcgcaacccctatccttagtagccagcacgtaatggtgggcactctgaggagactgccagggataacctggaggaaggcggggatgacgtcaaatcatcatgccccttatgatttgggctacacacgtgctacaatggcgtaaacaaagggaagcgaacccgcgagggtgggcaaatctcaaaaataacgtcccagttcggactgcagtctgcaactcgactgcacgaagctggaatcgctagtaatcgcggatcagaatgccgcggtgaatacgttcccgggtcttgtacacaccgcccgtcacaccatgggagtcagtaacgcccgaagtcagtgacctaaccgcaagggaggagctgccgaaggcgggaccgatgactggggtgaagtcgtaacaaggtagccgtatcggaaggtgcggctggatcacctccttt

SEQ ID NO: 5 - DNA, 1526 bp, artificial sequence
  >ERR1022433_05061 Lachnospiraceae_NG29_sp1
atgagagtttgatcctggctcaggatgaacgctggcggcgtgcctaacacatgcaagtcgaacgaagcacttatgacgattccttcgggatgaagcgtttgtgacttagtggcggacgggtgagtaacgcgtgggtaacctgccttatacagggggataacagttagaaatgactgctaataccgcataagcgcacagtctcgcatgggacagtgtgaaaaactaaggtggtataagatggacccgcgtctgattagctagttggtggggtaaaggcctaccaaggcgacgatcagtagccgacctgagagggtgatcggccacattgggactgagacacggcccaaactcctacgggaggcagcagtggggaatattgcacaatgggggaaaccctgatgcagcaacgccgcgtgaaggaagaagtatctcggtatgtaaacttctatcagcagggaagaaaatgacggtacctgactaagaagctccggctaaatacgtgccagcagccgcggtaatacgtatggagcaagcgttatccggatttactgggtgtaaagggagcgtaggcggttatgcaagtcagatgtgaaagcccggggcttaaccccgggactgcatttgaaactgtgtaactagagtgtcggagaggtaagtggaattcctagtgtagcggtgaaatgcgtagatattaggaggaacaccagtggcgaaggcggcttactggacgataactgacgctgaggctcgaaagcgtggggagcaaacaggattagataccctggtagtccacgccgtaaacgatgaatactaggtgttggggagcaaagctcttcggtgccgcagcaaacgcaataagtattccacctggggagtacgttcgcaagaatgaaactcaaaggaattgacggggacccgcacaagcggtggagcatgtggtttaattcgaagcaacgcgaagaaccttaccaagtcttgacatctggatgaccggaccgtaatgggtcctttccttcgggacatccaagacaggtggtgcatggttgtcgtcagctcgtgtcgtgagatgttgggttaagtcccgcaacgagcgcaacccttatccttagtagccagcagtaagatgggcactctagggagactgccggagacaatccggaggaaggtggggatgacgtcaaatcatcatgccccttatgacttgggctacacacgtgctacaatggcgtaaacaaagggaagcgagaccgcgaggttaagcaaatctcaaaaataacgtctcagttcggattgtagtctgcaactcgactacatgaagctggaatcgctagtaatcgcgaatcagcatgtcgcggtgaatacgttcccgggtcttgtacacaccgcccgtcacaccatgggagtcgataacgcccgaagccggtgactcaaccgaaaggagagagccgtcgaaggcgggatggataactggggtgaagtcgtaacaaggtagccgtatcggaaggtgcggctggatcacctccttt

SEQ ID NO: 6 - DNA, 1526 bp, artificial sequence
  >ERR1203942_01900 Blautia_wexlerae
cagagagtttgatcctggctcaggatgaacgctggcggcgtgcttaacacatgcaagtcgaacgggaaatatttcattgagacttcggtggatttgatctatttctagtggcggacgggtgagtaacgcgtgggtaacctgccttatacagggggataacagtcagaaatggctgctaataccgcataagcgcacagagctgcatggctcagtgtgaaaaactccggtggtataagatggacccgcgttggattagctagttggtggggtaacggcccaccaaggcgacgatccatagccggcctgagagggtgaacggccacattgggactgagacacggcccagactcctacgggaggcagcagtggggaatattgcacaatgggggaaaccctgatgcagcgacgccgcgtgaaggaagaagtatctcggtatgtaaacttctatcagcagggaagatagtgacggtacctgactaagaagccccggctaactacgtgccagcagccgcggtaatacgtagggggcaagcgttatccggatttactgggtgtaaagggagcgtagacggtgtggcaagtctgatgtgaaaggcatgggctcaacctgtggactgcattggaaactgtcatacttgagtgccggaggggtaagcggaattcctagtgtagcggtgaaatgcgtagatattaggaggaacaccagtggcgaaggcggcttactggacggtaactgacgttgaggctcgaaagcgtggggagcaaacaggattagataccctggtagtccacgccgtaaacgatgaatactaggtgtcgggtggcagagccattcggtgccgtcgcaaacgcagtaagtattccacctggggagtacgttcgcaagaatgaaactcaaaggaattgacggggacccgcacaagcggtggagcatgtggtttaattcgaagcaacgcgaagaaccttaccaagtcttgacatccccctgaccgatccttaaccggatctttccttcgggacaggcgagacaggtggtgcatggttgtcgtcagctcgtgtcgtgagatgttgggttaagtcccgcaacgagcgcaacccctatcctcagtagccagcatttaaggtgggcactctggggagactgccagggataacctggaggaaggcggggatgacgtcaaatcatcatgccccttatgatttgggctacacacgtgctacaatggcgtaaacaaagggaagcgagattgtgagatggagcaaatcccaaaaataacgtcccagttcggactgtagtctgcaacccgactacacgaagctggaatcgctagtaatcgcggatcagaatgccgcggtgaatacgttcccgggtcttgtacacaccgcccgtcacaccatgggagtcagtaacgcccgaagtcagtgacctaactgcaaagaaggagctgccgaaggcgggaccgatgactggggtgaagtcgtaacaaggtagccgtatcggaaggtgcggctggatcacctccttt

SEQ ID NO: 7 - DNA, 1528 bp, artificial sequence
  >ERR2221269_02987 Blautia_faecis
tcagagagtttgatcctggctcaggatgaacgctggcggcgtgcttaacacatgcaagtcgaacgggaaatactttattgaaacttcggtggatttaatttatttctagtggcggacgggtgagtaacgcgtgggtaacctgccttatactgggggataacagccagaaatgactgctaataccgcataagcgcacagaaccgcatggttcggtgtgaaaaactccggtggtataagatggacccgcgttggattagctagttggcagggcagcggcctaccaaggcgacgatccatagccggcctgagagggtgaacggccacattgggactgagacacggcccagactcctacgggaggcagcagtggggaatattgcacaatgggggaaaccctgatgcagcgacgccgcgtgaaggaagaagtatctcggtatgtaaacttctatcagcagggaagataatgacggtacctgactaagaagccccggctaactacgtgccagcagccgcggtaatacgtagggggcaagcgttatccggatttactgggtgtaaagggagcgtagacggcgcagcaagtctgatgtgaaaggcaggggcttaacccctggactgcattggaaactgctgtgcttgagtgccggaggggtaagcggaattcctagtgtagcggtgaaatgcgtagatattaggaggaacaccagtggcgaaggcggcttactggacggtaactgacgttgaggctcgaaagcgtggggagcaaacaggattagataccctggtagtccacgccgtaaacgatgaatactaggtgtcagggagcacagctctttggtgccgccgcaaacgcattaagtattccacctggggagtacgttcgcaagaatgaaactcaaaggaattgacggggacccgcacaagcggtggagcatgtggtttaattcgaagcaacgcgaagaaccttaccaaatcttgacatccctctgaccgggacttaaccgtccctttccttcgggacaggggagacaggtggtgcatggttgtcgtcagctcgtgtcgtgagatgttgggttaagtcccgcaacgagcgcaacccctatccttagtagccagcacgtaatggtgggcactctgaggagactgccagggataacctggaggaaggcggggatgacgtcaaatcatcatgccccttatgatttgggctacacacgtgctacaatggcgtaaacaaagggaagcgaacccgcgagggtgggcaaatctcaaaaataacgtcccagttcggactgcagtctgcaactcgactgcacgaagctggaatcgctagtaatcgcggatcagaatgccgcggtgaatacgttcccgggtcttgtacacaccgcccgtcacaccatgggagtcagtaacgcccgaagtcagtgacctaaccgcaagggaggagctgccgaaggcgggaccgatgactggggtgaagtcgtaacaaggtagccgtatcggaaggtgcggctggatcacctccttt

SEQ ID NO: 8 - DNA, 1528 bp, artificial sequence
  >ERR2221278_04839 Lachnospiraceae_NG29_sp1
atgagagtttgatcctggctcaggatgaacgctggcggcgtgcctaacacatgcaagtcgaacgaagcacttataactgattccttcggggagaagaaatatgtgactgagtggcggacgggtgagtaacgcgtgggtaacctgccttatacagggggataacagttagaaatgactgctaataccgcataagcgcacggtctcgcatgagatagtgtgaaaaactccggtggtataagatggacccgcgtctgattagctagttggtggggtaacggctcaccaaggcgacgatcagtagccgacctgagagggtgatcggccacattgggactgagacacggcccaaactcctacgggaggcagcagtggggaatattgcacaatgggggaaaccctgatgcagcaacgccgcgtgaaggaagaagtatctcggtatgtaaacttctatcagcagggaagaaaatgacggtacctgactaagaagctccggctaaatacgtgccagcagccgcggtaatacgtatggagcaagcgttatccggatttactgggtgtaaagggagcgtaggcggttatgcaagtccgatgtgaaagcccggggcttaaccccgggactgcattagaaactgtgtaactagagtgtcggagaggtaagtggaattcctagtgtagcggtgaaatgcgtagatattaggaggaacaccagtggcgaaggcggcttactggacgataactgacgctgaggctcgaaagcgtggggagcaaacaggattagataccctggtagtccacgccgtaaacgatgaatactaggtgttggggagcaaagctcttcggtgccgcagcaaacgcaataagtattccacctggggagtacgttcgcaagaatgaaactcaaaggaattgacggggacccgcacaagcggtggagcatgtggtttaattcgaagcaacgcgaagaaccttaccaagtcttgacatctggatgactggtgcgtaatggcacctttcctacgggacatccaagacaggtggtgcatggttgtcgtcagctcgtgtcgtgagatgttgggttaagtcccgcaacgagcgcaacccttatccttagtagccagcagtaagatgggaactctagggagactgccggagacaatccggaggaaggtggggatgacgtcaaatcatcatgccccttatgacttgggctacacacgtgctacaatggcgtaaacaaagggaagcgagaccgcgaggttaagcaaatctcaaaaataacgtctcagttcggattgtagtctgcaactcgactacatgaagctggaatcgctagtaatcgcgaatcagcatgtcgcggtgaatacgttcccgggtcttgtacacaccgcccgtcacaccatgggagtcgataacgcccgaagccggtgactcaaccgaaaggagagagccgtcgaaggcgggatggataactggggtgaagtcgtaacaaggtagccgtatcggaaggtgcggctggatcacctccttt

SEQ ID NO: 9 - DNA, 1528 bp, artificial sequence
  >ERR2221389_05636 Frisingicoccus_sp2
atgagagtttgatcctggctcaggatgaacgctggcggcgtgcttaacacatgcaagtcgaacgaagcatttttattgagaccttcgggtggatctaaaaatgactgagtggcggacgggtgagtaacgcgtgggtaacctgcctcatactgggggataacagttagaaatgactgctaataccgcataagcgcacagagctgcatggctcggtgtgaaaaactccggtggtatgagatggacccgcgtctgattaggtagttggtgaggtaacggcccaccaagccgacgatcagtagccgacctgagagggtgatcggccacattgggactgagacacggcccaaactcctacgggaggcagcagtggggaatattgcacaatgggggaaaccctgatgcagcgacgccgcgtgaaggaagacgtatctcggtatgtaaacttctatcagcagggaagataatgacggtacctgactaagaagccccggctaactacgtgccagcagccgcggtaatacgtagggggcaagcgttatccggatttactgggtgtaaagggagcgtaggcggccagtcaagtcagaagtgaaagcccggggcttaaccccgggactgcttttgaaactgtctggctagattgcaggagaggtaagtggaattcctagtgtagcggtgaaatgcgtagatattaggaggaacaccagtggcgaaggcggcttactggactgtaaatgacgctgaggctcgaaagcgtggggagcaaacaggattagataccctggtagtccacgccgtaaacgatgaatactaggtgtcgggggtcaaaagactttcggtgccgcagcaaacgcaataagtattccacctggggagtacgttcgcaagaatgaaactcaaaggaattgacggggacccgcacaagcggtggagcatgtggtttaattcgaagcaacgcgaagaaccttaccaagtcttgacatcccaatgaccggtgcgtaatggcaccttcccttcggggcattggtgacaggtggtgcatggttgtcgtcagctcgtgtcgtgagatgttgggttaagtcccgcaacgagcgcaacccctattttcagtagccagcatttaaggtgggcactctggagagactgccagggataacctggaggaaggtggggatgacgtcaaatcatcatgccccttatgacttgggctacacacgtgctacaatggtgacaacaaagtgaagcagcgccgcgaggctgagcaaatcacaaaaaagtcatctcagttcggattgtagtctgcaactcgactacatgaagctggaatcgctagtaatcgcgaatcagaatgtcgcggtgaatacgttcccgggtcttgtacacaccgcccgtcacaccatgggagttggaaatgcccgaagtcagtgacccaaccgcaaggagggagctgccgaaggtggagccgatgactggggtgaagtcgtaacaaggtagccgtatcggaaggtgcggctggatcacctccttt

SEQ ID NO: 10 - DNA, 1527 bp, artificial sequence
  >ERR2230049_03624 Blautia_wexlerae
tcagagagtttgatcctggctcaggatgaacgctggcggcgtgcttaacacatgcaagtcgaacgggaaatatttcattgagacttcggtggatttgatctatttctagtggcggacgggtgagtaacgcgtgggtaacctgccttatacagggggataacagtcagaaatggctgctaataccgcataagcgcacagagctgcatggctcagtgtgaaaaactccggtggtataagatggacccgcgttggattagctagttggtggggtaacggcccaccaaggcgacgatccatagccggcctgagagggtgaacggccacattgggactgagacacggcccagactcctacgggaggcagcagtggggaatattgcacaatgggggaaaccctgatgcagcgacgccgcgtgaaggaagaagtatctcggtatgtaaacttctatcagcagggaagatagtgacggtacctgactaagaagccccggctaactacgtgccagcagccgcggtaatacgtagggggcaagcgttatccggatttactgggtgtaaagggagcgtagacggtgtggcaagtctgatgtgaaaggcatgggctcaacctgtggactgcattggaaactgtcatacttgagtgccggaggggtaagcggaattcctagtgtagcggtgaaatgcgtagatattaggaggaacaccagtggcgaaggcggcttactggacggtaactgacgttgaggctcgaaagcgtggggagcaaacaggattagataccctggtagtccacgccgtaaacgatgaatactaggtgtcgggtggcaaagccattcggtgccgtcgcaaacgcagtaagtattccacctggggagtacgttcgcaagaatgaaactcaaaggaattgacggggacccgcacaagcggtggagcatgtggtttaattcgaagcaacgcgaagaaccttaccaagtcttgacatccgcctgaccgatccttaaccggatctttccttcgggacaggcgagacaggtggtgcatggttgtcgtcagctcgtgtcgtgagatgttgggttaagtcccgcaacgagcgcaacccctatcctcagtagccagcatttaaggtgggcactctggggagactgccagggataacctggaggaaggcggggatgacgtcaaatcatcatgccccttatgatttgggctacacacgtgctacaatggcgtaaacaaagggaagcgagatcgtgagatggagcaaatcccaaaaataacgtcccagttcggactgtagtctgcaacccgactacacgaagctggaatcgctagtaatcgcggatcagaatgccgcggtgaatacgttcccgggtcttgtacacaccgcccgtcacaccatgggagtcagtaacgcccgaagtcagtgacctaactgcaaagaaggagctgccgaaggcgggaccgatgactggggtgaagtcgtaacaaggtagccgtatcggaaggtgcggctggatcacctccttt

SEQ ID NO: 11 - DNA, 810 bp, artificial sequence
  >GCF_000154105.1_03159 Parabacteroides_merdae
cgaagagtttgatcctggctcaggatgaacgctagcgacaggcttaacacatgcaagtcgaggggcagcatgatttgtagcaatacagattgatggcgaccggcgcacgggtgagtaacgcgtatgcaacttacctatcagagggggatagcccggcgaaagtcggattaataccccataaaacaggggtcccgcatgggaatatttgttaaagattcatcgctgatagataggcatgcgttccattaggcagttggcggggtaacggcccaccaaaccgacgatggataggggttctgagaggaaggtcccccacattggtactgagacacggaccaaactcctacgggaggcagcagtgaggaatattggtcaatggccgagaggctgaaccagccaagtcgcgtgaaggaagaaggatctatggtttgtaaacttcttttataggggaataaagtggaggacgtgtcctttttttgtatgtaccctatgaataagcatcggctaactccgtgccagcagccgcggtaatacggaggatgcgagcgttatccggatttattgggtttaaagggtgcgtaggtggtgatttaagtcagcggtgaaagtttgtggctcaaccataaaattgccgttgaaactgggttacttgagtgtgtttgagtaggcgaatgcgtgtgtagcgtgaaatgcatagatatcacgcagaactccgatgcgagcagctactaaatcatactgacactgagcacgaagcgtgggatcaacaggatagatacctggtagtccacgcagtaacgatgattacta

SEQ ID NO: 12 - DNA, 1169 bp, artificial sequence
  >GCF_000154445.1_02787 Intestinibacter_bartlettii
gaggcagcagtggggaatattgcacaatgggcgaaagcctgatgcagcaacgccgcgtgagcgatgaaggccttcgggtcgtaaagctctgtcctcaaggaagataatgacggtacttgaggaggaagccccggctaactacgtgccagcagccgcggtaatacgtagggggctagcgttatccggatttactgggcgtaaagggtgcgtaggcggtcttttaagtcaggagtgaaaggctacggctcaaccgtagtaagctcttgaaactggaggacttgagtgcaggagaggagagtggaattcctagtgtagcggtgaaatgcgtagatattaggaggaacaccagtagcgaaggcggctctctggactgtaactgacgctgaggcacgaaagcgtggggagcaaacaggattagataccctggtagtccacgccgtaaacgatgagtactagctgtcggaggttacccccttcggtggcgcagctaacgcattaagtactccgcctggggagtacgctcgcaagagtgaaactcaaaggaattgacggggacccgcacaagtagcggagcatgtggtttaattcgaagcaacgcgaagaaccttacctaagcttgacatccttttgaccgatgcctaatcgcatctttcccttcggggacagaagtgacaggtggtgcatggttgtcgtcagctcgtgtcgtgagatgttgggttaagtcccgcaacgagcgcaacccttgcctttagttgccatcattaagttgggcactctagagggactgccagggataacctggaggaaggtggggatgacgtcaaatcatcatgccccttatgcttagggctacacacgtgctacaatgggtggtacagagggcagcgaagtcgtgaggccaagctaatcccttaaagccattctcagttcggattgtaggctgaaactcgcctacatgaagctggagttactagtaatcgcagatcagaatgctgcggtgaatgcgttcccgggtcttgtacacaccgcccgtcacaccatgggagttgggggcgcccgaagccggctagctaaccttttggaagcggtcgtcgaaggtgaaaccaataactggggtgaagtcgtaacaaggtagccgtatcggaaggtgcggctggatcacctccttt

SEQ ID NO: 13 - DNA, 904 bp, artificial sequence
  >GCF_000154445.1_02811 Intestinibacter_bartlettii
tgcagtcgagcgatcttcttcggagagagcggcggacgggggagtaacgcgtgggtaacctgccctgtacacacggattacataccgaaaggtatgctaatacgggataacataagaaattcgcatgtttttcttatcaaagctccggcggtacaggatggacccgcgtctgattagctagttggtgaggtaacggctcaccaaggcgacgatcagtagccgacctgagagggtgatcggccacattggaactgagacacggtccaaactcctacgggaggcagcagtggggaatattgcacaatgggcgaaagcctgatgcagcaacgccgcgtgagcgatgaaggccttcgggtcgtaaagctctgtcctcaaggaagataatgacggtacttgaggaggaagccccggctaactacgtgccagcagccgcggtaatacgtagggggctagcgttatccggatttactgggcgtaaagggtgcgtaggcggtcttttaagtcaggagtgaaaggctacggctcaaccgtagtaagctcttgaaactggaggacttgagtgcaggagaggagagtggaattcctagtgtagcggtgaaatgcgtagatattaggaggaacaccagtagcgaaggcggctctctggactgtaactgacgctgaggcacgaaagcgtggggagcaaacaggattaaataccctggtattccacgccgtaaacgatgagtactagctgtcggaggttaccccctttcggtggcgcagctaacgcataaatactcgcctggggagtacgctcgctagagtgaaattaacagaattgactggatcctgcccaattagcggaacatgtgcttgactcgtaccaacggaaaaaccttagcattcctgcttccttgacgtg

SEQ ID NO: 14 - DNA, 1524 bp, artificial sequence
  >GCF_000154465.1_00423 Alistipes_putredinis
atggagagtttgatcctggctcaggatgaacgctagcggcaggcttaacacatgcaagtcgaggggcagcataatggatagcaatatctatggtggcgaccggcgcacgggtgcgtaacgcgtatgcaacctacctttaacagggggataacactgagaaattggtactaataccccataatatcatagaaggcatcttttatggttgaaaattccgatggttagagatgggcatgcgttgtattagctagttggtggggtaacggctcaccaaggcgacgatacatagggggactgagaggttaaccccccacactggtactgagacacggaccagactcctacgggaggcagcagtgaggaatattggtcaatggacgcaagtctgaaccagccatgccgcgtgcaggatgacggctctatgagttgtaaactgcttttgtacgagggtaaacgcagatacgtgtatctgtctgaaagtatcgtacgaataaggatcggctaactccgtgccagcagccgcggtaatacggaggattcaagcgttatccggatttattgggtttaaagggtgcgtaggcggtttgataagttagaggtgaaatttcggggctcaaccctgaacgtgcctctaatactgttgagctagagagtagttgcggtaggcggaatgtatggtgtagcggtgaaatgcttagagatcatacagaacaccgattgcgaaggcagcttaccaaactatatctgacgttgaggcacgaaagcgtggggagcaaacaggattagataccctggtagtccacgcagtaaacgatgataactcgttgtcggcgatacacagtcggtgactaagcgaaagcgataagttatccacctggggagtacgttcgcaagaatgaaactcaaaggaattgacgggggcccgcacaagcggaggaacatgtggtttaattcgatgatacgcgaggaaccttacccgggcttgaaagttagcgacgattcttgaaagaggatttcccttcggggcgcgaaactaggtgctgcatggttgtcgtcagctcgtgccgtgaggtgtcgggttaagtcccataacgagcgcaacccctaccgttagttgccatcaggtgaagctgggcactctggcgggactgccggtgtaagccgagaggaaggtggggatgacgtcaaatcagcacggcccttacgtccggggctacacacgtgttacaatggtaggtacagagggcagctacccagcgatgggatgcgaatctcgaaagcctatctcagttcggattggaggctgaaacccgcctccatgaagttggattcgctagtaatcgcgcatcagccatggcgcggtgaatacgttcccgggccttgtacacaccgcccgtcaagccatgggagccgggggtgcctgaagttcgtgaccgcaaggagcgacctagggcaaaactggtgactggggctaagtcgtaacaaggtagccgtaccggaaggtgcggctggaacacctccttt

SEQ ID NO: 15 - DNA, 1517 bp, artificial sequence
  >GCF_000154825.1_01650 Anaerofustis_stercorihominis
ttttgagagtttgatcctggctcaggacgaacgctggcggcgtgcttaacacatgcaagtcgaacgagaaacttataaatgatccttcgggtgaatctataagcggacagtggcgaacgggtgagtaacgcgtaggtaaccaacctcatgcagggggatagcccagggaaacttggattaaacccgcataagaccacagcaccgcatggtgcaggggtaaaaactccggtggcatgagacggacctgcgtcttattaggtagttggtgaggtaacggctcaccaagccaacgatgagtagccgacctgagagggtgatcggccacattgggactgagacacggcccagactcctacgggaggcagcagtggggaatattgcgcaatgggggaaaccctgacgcagcaacgccgcgtgagcgatgaaggttttcggatcgtaaagctctgtctttggggaagataatgacggtacccaaggaggaagctccggctaactacgtgccagcagccgcggtaatacgtagggagcaagcgttgtccggattcactgggcgtaaagagcacgtaggcggttaattaagtcaggtgtgaaagttttcggctcaaccggaaaagtgcacttgaaactggataacttgagtatcggagaggtaagcggaattcctagtgtagcggtgaaatgcgtagagattaggaagaacaccggtggcgaaggcggcttactggacgataactgacgctgaggtgcgaaagcgtggggagcgaacaggattagataccctggtagtccacgccgtaaacgatgaatactaggtgttggggtaactcagtgccgcagttaacacattaagtattccgcctggggagtacgctcgcaagagtgaaactcaaaggaattgacgggggcccgcacaagcagcggagcatgtggtttaattcgaagcaacgcgaagaaccttaccaggtcttgacatcccttgaccgcctaagagattaggctttccttcgggacaaggagacaggtggtgcatggttgtcgtcagctcgtgtcgtgagatgttgggttaagtcccgcaacgagcgcaacccttatgtttagttactaacattcagttgaggactctagacagactgcccttgaaagagggaggaaggtggggacgacgtcaaatcatcatgccccttacgacctgggctacacacgtgctacaatggtctgtacagagggttgcgaagcagtgatgctaagctaatctcaaaaagcagatctcagttcggattgcaggctgcaactcgcctgcatgaagtcggagttgctagtaatcgcgaatcagaatgtcgcggtgaatgcgttcccgggccttgtacacaccgcccgtcacaccacgagagttggtaacacccgaagccagtgagctaaccattaggaggcagctgtcgaaggtgggatcagtaattggggtgaagtcgtaacaaggtagccgtatcggaaggtgcggctggatcacctccttt

SEQ ID NO: 16 - DNA, 1504 bp, artificial sequence
  >GCF_000156175.1_00009 Collinsella_intestinalis
cggagagttcgatcctggctcaggatgaacgctggcggcgcgcctaacacatgcaagtcgaacggcacccaccctcgggtggaagcgagtggcgaacggctgagtaacacgtggagaacccgccccctcctccgggatagcctcgggaaaccgtgggtaataccggatgaccccgcagggccgcatggccccgcgggcaaagcccagacgggaggggatggctccgcggcccatcaggtagacggcggggtgacggcccaccgtgccgacgacgggtagccgggttgagagaccgaccggccagattgggactgagacacggcccagactcctacgggaggcagcagtggggaatcttgcgcaatggggggaacccgtgacgcagcgacgccgcgtgcgggacgaaggccctcgggtcgtaaaccgctttcagcagggatgagacaagacggtacctgcagaagaagccccggctaactacgtgccagcagccgcggtaatacgtagggggcgagcgttatccggattcattgggcgtaaagcgcgcgtaggcggcccggcaggcagggggtcaaatggcggggctcaaccccgtcccgccccctgaaccgccgggctcgggtccggtaggggagggtggaacacccggtgtagcggtggaatgcgcagatatcgggtggaacaccggtggcgaaggcggccctctgggccgagaccgacgctgaggcgcgaaagctgggggagcgaacaggattagataccctggtagtcccagccgtaaacgatggacgctaggtgtggggggacgatccctccgtgccgcagccaacgcattaagcgtcccgcctggggagtacggccgcaaggctaaaactcaaaggaattgacgggggcccgcacaagcagcggagcatgtggcttaattcgaagcaacgcgaagaaccttaccagggcttgacatgaccgtgaagccggggagacccggtggccgagaggagcggtcacaggtggtgcatggctgtcgtcagctcgtgtcgtgagatgtttggttaagtccagcaacgagcgcaacccccgccgccatgttgccagcacctcgggtggggcacccatgcgggaccgccggagtcaatccggaggagggcggggacgacgtcaagtcatcatgccccttatgccctgggctgcacacgtgctacaatggccggtacagcgggatgcgatggcgcgagccggagcggatccctgaaagccggccccagttcggattgggggctgcaacccgcccccatgaagtcggagttgctagtaatcgcggatcagcatgccgcggtgaatgcgttcccgggccttgtacacaccgcccgtcacaccacccgagtcgtctgcacccgaagtcgccggcccaaccatctggggggaggcgccgaaggtgtggagggtgaggggggtgaagtcgtaacaaggtagccgtacgggaacgtgcggctggatcacctccttt

SEQ ID NO: 17 - DNA, 1501 bp, artificial sequence
  >GCF_000156175.1_01553 Collinsella_intestinalis
cggagagttcgatcctggctcaggatgaacgctggcggcgcgcctaacacatgcaagtcgaacggcacccaccctcgggtggaagcgagtggcgaacggctgagtaacacgtggagaacccgccccctcctccgggatagcctcgggaaaccgtgggtaataccggatgaccccgcagggccgcatggccccgcgggcaaagcccagacgggaggggatggctccgcggcccatcaggtagacggcggggtgacggcccaccgtgccgacgacgggtagccgggttgagagaccgaccggccagattgggactgagacacggcccagactcctacgggaggcagcagtggggaatcttgcgcaatggggggaaccctgacgcagcgacgccgcgtgcgggacgaaggccctcgggtcgtaaaccgctttcagcagggatgagacaagacggtacctgcagaagaagccccggctaactacgtgccagcagccgcggtaatacgtagggggcgagcgttatccggattcattgggcgtaaagcgcgcgtaggcggcccggcaggcagggggtcaaatggcggggctcaaccccgtcccgccccctgaaccgccgggctcgggtccggtaggggagggtggaacacccggtgtagcggtggaatgcgcagatatcgggtggaacaccggtggcgaaggcggccctctgggccgagaccgacgctgaggcgcgaaagctgggggagcgaacaggattagataccctggtagtcccagccgtaaacgatggacgctaggtgtggggggacgatccctccgtgccgcagccaacgcattaagcgtcccgcctggggagtacggccgcaaggctaaaactcaaaggaattgacgggggcccgcacaagcagcggagcatgtggcttaattcgaagcaacgcgaagaaccttaccagggcttgacatgaccgtgaagccggggagacccggtggccgagaggagcggtcacaggtggtgcatggctgtcgtcagctcgtgtcgtgagatgtttggttaagtccagcaacgagcgcaacccccgccgcatgttgccagcacctcgggtgggcacccatgcgggaccgccggagtcaatccggaggagggcggggacgacgtcaagtcatcatgccccttatgccctgggctgcacacgtgctacaatggccggtacagcgggatgcgatggcgcgagccggagcggatccctgaaagccggccccagttcggattgggggctgcaacccgcccccatgaagtcggagttgctagtaatcgcggatcagcatgccgcggtgaatgcgttcccgggccttgtacacaccgcccgtcacaccacccgagtcgtctgcacccgaagtcgccggcccaaccatctggggggaggcgccgaaggtgtggagggtgaggggggtgaagtcgtaacaaggtagccgtacgggaacgtgcggctggatcacctccttt

SEQ ID NO: 18 - DNA, 1501 bp, artificial sequence
  >GCF_000156215.1_00170 Collinsella_stercoris
cggagagttcgatcctggctcaggatgaacgctggcggcgcgcctaacacatgcaagtcgaacggcacccgccctcgggcggaagcgagtggcgaacggctgagtaacacgtggagaacccgccccctcctccgggatagcctcgggaaaccgtgggtaataccggatgaccccggcaggccgcatggccggccgggcaaagcccagacgggaggggatggctccgcggcccatcaggtagacggcggggtgacggcccaccgtgccgacgacgggtagccgggttgagagaccgaccggccagattgggactgagacacggcccagactcctacgggaggcagcagtggggaatcttgcgcaatggggggaaccctgacgcagcgacgccgcgtgcgggacgaaggccctcgggtcgtaaaccgctttcagcagggatgagacaagacggtacctgcagaagaagccccggctaactacgtgccagcagccgcggtaatacgtagggggcgagcgttatccggattcattgggcgtaaagcgcgcgtaggcggcccggcaggcagggggtcaaatggcggggctcaaccccgtcccgccccctgaaccgccgggctcgggtccggtaggggagggtggaacacccggtgtagcggtggaatgcgcagatatcgggtggaacaccggtggcgaaggcggccctctgggccgagaccgacgctgaggcgcgaaagctgggggagcgaacaggattagataccctggtagtcccagccgtaaacgatggacgctaggtgtgggaggggaacccttccgtgccgcagccaacgcattaagcgtcccgcctggggagtacggccgcaaggctaaaactcaaaggaattgacgggggcccgcacaagcagcggagcatgtggcttaattcgaagcaacgcgaagaaccttaccagggcttgacatgcgcgtgaagccggggagacccggtggccgagaggagcgcgcacaggtggtgcatggctgtcgtcagctcgtgtcgtgagatgtttggttaagtccagcaacgagcgcaacccccgccgcatgttgccagcacctcgggtgggcacccatgcgggaccgccggagtcaatccggaggagggcggggacgacgtcaagtcatcatgccccttatgccctgggctgcacacgtgctacaatggccggtacagcgggatgcgatggcgcgagccggagcggatccctgaaagccggccccagttcggattgggggctgcaacccgcccccatgaagtcggagttgctagtaatcgcggatcagcatgccgcggtgaatgcgttcccgggccttgtacacaccgcccgtcacaccacccgagtcgtctgcacccgaagtcgccggcccaaccgagaggggggaggcgcctaaggtgtggagggtgaggggggtgaagtcgtaacaaggtagccgtacgggaacgtgcggctggatcacctccttt

SEQ ID NO: 19 - DNA, 1528 bp, artificial sequence
  >GCF_000159975.2_00057 Blautia_wexlerae
tcagagagtttgatcctggctcaggatgaacgctggcggcgtgcttaacacatgcaagtcgaacgggaattactttattgaaacttcggtcgatttaatttaattctagtggcggacgggtgagtaacgcgtgggtaacctgccttatacagggggataacagtcagaaatggctgctaataccgcataagcgcacagagctgcatggctcagtgtgaaaaactccggtggtataagatggacccgcgttggattagctagttggtggggtaacggcccaccaaggcgacgatccatagccggcctgagagggtgaacggccacattgggactgagacacggcccagactcctacgggaggcagcagtggggaatattgcacaatgggggaaaccctgatgcagcgacgccgcgtgaaggaagaagtatctcggtatgtaaacttctatcagcagggaagatagtgacggtacctgactaagaagccccggctaactacgtgccagcagccgcggtaatacgtagggggcaagcgttatccggatttactgggtgtaaagggagcgtagacggtgtggcaagtctgatgtgaaaggcatgggctcaacctgtggactgcattggaaactgtcatacttgagtgccggaggggtaagcggaattcctagtgtagcggtgaaatgcgtagatattaggaggaacaccagtggcgaaggcggcttactggacggtaactgacgttgaggctcgaaagcgtggggagcaaacaggattagataccctggtagtccacgccgtaaacgatgaatactaggtgtcgggtggcagagccattcggtgccgtcgcaaacgcagtaagtattccacctggggagtacgttcgcaagaatgaaactcaaaggaattgacggggacccgcacaagcggtggagcatgtggtttaattcgaagcaacgcgaagaaccttaccaagtcttgacatccgcctgactgatccttaaccggatctttccttcgggacaggcgagacaggtggtgcatggttgtcgtcagctcgtgtcgtgagatgttgggttaagtcccgcaacgagcgcaacccctatcctcagtagccagcatttaaggtgggcactctggggagactgccagggataacctggaggaaggcggggatgacgtcaaatcatcatgccccttatgatttgggctacacacgtgctacaatggcgtaaacaaagggaagcgagattgtgagatggagcaaatcccaaaaataacgtcccagttcggactgtagtctgcaacccgactacacgaagctggaatcgctagtaatcgcggatcagaatgccgcggtgaatacgttcccgggtcttgtacacaccgcccgtcacaccatggggagtcagtaacgcccgaagtcagtgacctaaccgaaagggaggagctgccgaaggcgggaccgatgactggggtgaagtcgtaacaaggtagccgtatcggaaggtgcggctggatcacctccttt

SEQ ID NO: 20 - DNA, 1526 bp, artificial sequence
  >GCF_000159975.2_00407 Blautia_wexlerae
cagagagtttgatcctggctcaggatgaacgctggcggcgtgcttaacacatgcaagtcgaacgggaattactttattgaaacttcggtcgatttaatttaattctagtggcggacgggtgagtaacgcgtgggtaacctgccttatacagggggataacagtcagaaatggctgctaataccgcataagcgcacagagctgcatggctcagtgtgaaaaactccggtggtataagatggacccgcgttggattagctggttggtggggtaacggcccaccaaggcgacgatccatagccggcctgagagggtgaacggccacattgggactgagacacggcccagactcctacgggaggcagcagtggggaatattgcacaatgggggaaaccctgatgcagcgacgccgcgtgaaggaagaagtatctcggtatgtaaacttctatcagcagggaagatagtgacggtacctgactaagaagccccggctaactacgtgccagcagccgcggtaatacgtagggggcaagcgttatccggatttactgggtgtaaagggagcgtagacggtgtggcaagtctgatgtgaaaggcatgggctcaacctgtggactgcattggaaactgtcatacttgagtgccggaggggtaagcggaattcctagtgtagcggtgaaatgcgtagatattaggaggaacaccagtggcgaaggcggcttactggacggtaactgacgttgaggctcgaaagcgtggggagcaaacaggattagataccctggtagtccacgccgtaaacgatgaatactaggtgtcgggtagcatagctcttcggtgccgtcgcaaacgcagtaagtattccacctggggagtacgttcgcaagaatgaaactcaaaggaattgacggggacccgcacaagcggtggagcatgtggtttaattcgaagcaacgcgaagaaccttaccaagtcttgacatccctctgaccgaaacttaatcggatctttccttcgggacagacgagacaggtggtgcatggttgtcgtcagctcgtgtcgtgagatgttgggttaagtcccgcaacgagcgcaacccctatcctcagtagccagcatttaaggtgggcactctggggagactgccagggataacctggaggaaggcggggatgacgtcaaatcatcatgccccttatgatttgggctacacacgtgctacaatggcgtaaacaaagggaagcgagattgtgagatggagcaaatcccaaaaataacgtcccagttcggactgtagtctgcaacccgactacacgaagctggaatcgctagtaatcgcggatcagaatgccgcggtgaatacgttcccgggtcttgtacacaccgcccgtcacaccatgggagtcagtaacgcccgaagtcagtgacctaactgcaaagaaggagctgccgaaggcgggaccgatgactggggtgaagtcgtaacaaggtagccgtatcggaaggtgcggctggatcacctccttt

SEQ ID NO: 21 - DNA, 1325 bp, artificial sequence
  >GCF_000159975.2_02849 Blautia_wexlerae
tcagagagtttgatcctggctcaggatgaacgctggcggcgtgcttaacacatgcaagtcgaacgggaaatatttcattgagacttcggtggatttgatctatttctagtggcggacgggtgagtaacgcgtgggtaacctgccttatacagggggataacagtcagaaatggctgctaataccgcataagcgcacagagctgcatggctcagtgtgaaaaactccggtggtataagatggacccgcgttggattagctggttggtggggtaacggcccaccaaggcgacgatccatagccggcctgagagggtgaacggccacattgggactgagacacggcccagactcctacgggaggcagcagtggggaatattgcacaatgggggaaaccctgatgcagcgacgccgcgtgaaggaagaagtatctcggtatgtaaacttctatcagcagggaagatagtgacggtacctgactaagaagccccggctaactacgtgccagcagccgcggtaatacgtagggggcaagcgttatccggatttactgggtgtaaagggagcgtagacggtgtggcaagtctgatgtgaaaggcatgggctcaacctgtggactgcattggaaactgtcatacttgagtgccggaggggtaagcggaattcctagtgtagcggtgaaatgcgtagatattaggaggaacaccagtggcgaaggcggcttactggacggtaactgacgttgaggctcgaaagcgtggggagcaaacaggattagataccctggtagtccacgccgtaaacgatgaatactaggtgtcggggagcatggctcttcggtgccgtcgcaaacgcagtaagtattccacctggggagtacgttcgcaagaatgaaactcaaaggaattgacggggacccgcacaagcggtggagcatgtggtttaattcgaagcaacgcgaagaaccttaccaagtcttgacatccgcctgaccgatccttaaccggatctttccttcgggacaggcgagacaggtggtgcatggttgtcgtcagctcgtgtcgtgagatgttgggttaagtcccgcaacgagcgcaacccctatcctcagtagccagcatttaaggtgggcactctggggagactgccagggataacctggaggaaggcggggatgacgtcaaatcatcatgccccttatgatttgggctacacacgtgctacaatggcgtaaacaaagggaagcgagattgtgagatggagcaaatcccaaaaataacgtcccagttcggactgtagtctgcaacccgactacacgaagctggaa

SEQ ID NO: 22 - DNA, 1526 bp, artificial sequence
  >GCF_000159975.2_03032 Blautia_wexlerae
cagagagtttgatcctggctcaggatgaacgctggcggcgtgcttaacacatgcaagtcgaacgggaattactttattgaaacttcggtcgatttaatttaattctagtggcggacgggtgagtaacgcgtgggtaacctgccttatacagggggataacagtcagaaatggctgctaataccgcataagcgcacagagctgcatggctcagtgtgaaaaactccggtggtataagatggacccgcgttggattagctagttggtggggtaacggcccaccaaggcgacgatccatagccggcctgagagggtgaacggccacattgggactgagacacggcccagactcctacgggaggcagcagtggggaatattgcacaatgggggaaaccctgatgcagcgacgccgcgtgaaggaagaagtatctcggtatgtaaacttctatcagcagggaagatagtgacggtacctgactaagaagccccggctaactacgtgccagcagccgcggtaatacgtagggggcaagcgttatccggatttactgggtgtaaagggagcgtagacggtgtggcaagtctgatgtgaaaggcatgggctcaacctgtggactgcattggaaactgtcatacttgagtgccggaggggtaagcggaattcctagtgtagcggtgaaatgcgtagatattaggaggaacaccagtggcgaaggcggcttactggacggtaactgacgttgaggctcgaaagcgtggggagcaaacaggattagataccctggtagtccacgccgtaaacgatgaatactaggtgtcggggagcatggctcttcggtgccgtcgcaaacgcagtaagtattccacctggggagtacgttcgcaagaatgaaactcaaaggaattgacggggacccgcacaagcggtggagcatgtggtttaattcgaagcaacgcgaagaaccttaccaagtcttgacatccgcctgaccgatccttaaccggatctttccttcgggacaggcgagacaggtggtgcatggttgtcgtcagctcgtgtcgtgagatgttgggttaagtcccgcaacgagcgcaacccctatcctcagtagccagcatttaaggtgggcactctggggagactgccagggataacctggaggaaggcggggatgacgtcaaatcatcatgccccttatgatttgggctacacacgtgctacaatggcgtaaacaaagggaagcgagattgtgagatggagcaaatcccaaaaataacgtcccagttcggactgtagtctgcaacccgactacacgaagctggaatcgctagtaatcgcggatcagaatgccgcggtgaatacgttcccgggtcttgtacacaccgcccgtcacaccatgggagtcagtaacgcccgaagtcagtgacctaactgcaaagaaggagctgccgaaggcgggaccgatgactggggtgaagtcgtaacaaggtagccgtatcggaaggtgcggctggatcacctccttt

SEQ ID NO: 23 - DNA, 1527 bp, artificial sequence
  >GCF_000159975.2_03150 Blautia_wexlerae
tcagagagtttgatcctggctcaggatgaacgctggcggcgtgcttaacacatgcaagtcgaacgggaattactttattgaaacttcggtcgatttaatttaattctagtggcggacgggtgagtaacgcgtgggtaacctgccttatacagggggataacagtcagaaatggctgctaataccgcataagcgcacagagctgcatggctcagtgtgaaaaactccggtggtataagatggacccgcgttggattagcttgttggtgaggtaacggcccaccaaggcgacgatccatagccggcctgagagggtgaacggccacattgggactgagacacggcccagactcctacgggaggcagcagtggggaatattgcacaatgggggaaaccctgatgcagcgacgccgcgtgaaggaagaagtatctcggtatgtaaacttctatcagcagggaagatagtgacggtacctgactaagaagccccggctaactacgtgccagcagccgcggtaatacgtagggggcaagcgttatccggatttactgggtgtaaagggagcgtagacggtgtggcaagtctgatgtgaaaggcatgggctcaacctgtggactgcattggaaactgtcatacttgagtgccggaggggtaagcggaattcctagtgtagcggtgaaatgcgtagatattaggaggaacaccagtggcgaaggcggcttactggacggtaactgacgttgaggctcgaaagcgtggggagcaaacaggattagataccctggtagtccacgccgtaaacgatgaatactaggtgtcggggagcatggctcttcggtgccgtcgcaaacgcagtaagtattccacctggggagtacgttcgcaagaatgaaactcaaaggaattgacggggacccgcacaagcggtggagcatgtggtttaattcgaagcaacgcgaagaaccttaccaagtcttgacatccctctgaccggaacttaatcgttcctttccttcgggacagaggagacaggtggtgcatggttgtcgtcagctcgtgtcgtgagatgttgggttaagtcccgcaacgagcgcaacccctatcctcagtagccagcatttaaggtgggcactctggggagactgccagggataacctggaggaaggcggggatgacgtcaaatcatcatgccccttatgatttgggctacacacgtgctacaatggcgtaaacaaagggaagcgagattgtgagatggagcaaatcccaaaaataacgtcccagttcggactgtagtctgcaacccgactacacgaagctggaatcgctagtaatcgcggatcagaatgccgcggtgaatacgttcccgggtcttgtacacaccgcccgtcacaccatgggagtcagtaacgcccgaagtcagtgacctaactgcaaagaaggagctgccgaaggcgggaccgatgactggggtgaagtcgtaacaaggtagccgtatcggaaggtgcggctggatcacctccttt

SEQ ID NO: 24 - DNA, 1527 bp, artificial sequence
  >GCF_000159975.2_03212 Blautia_wexlerae
tcagagagtttgatcctggctcaggatgaacgctggcggcgtgcttaacacatgcaagtcgaacgggaaatatttcattgagacttcggtggatttgatctatttctagtggcggacgggtgagtaacgcgtgggtaacctgccttatacagggggataacagtcagaaatggctgctaataccgcataagcgcacagagctgcatggctcagtgtgaaaaactccggtggtataagatggacccgcgttggattagctggttggtggggtaacggcccaccaaggcgacgatccatagccggcctgagagggtgaacggccacattgggactgagacacggcccagactcctacgggaggcagcagtggggaatattgcacaatgggggaaaccctgatgcagcgacgccgcgtgaaggaagaagtatctcggtatgtaaacttctatcagcagggaagatagtgacggtacctgactaagaagccccggctaactacgtgccagcagccgcggtaatacgtagggggcaagcgttatccggatttactgggtgtaaagggagcgtagacggtgtggcaagtctgatgtgaaaggcatgggctcaacctgtggactgcattggaaactgtcatacttgagtgccggaggggtaagcggaattcctagtgtagcggtgaaatgcgtagatattaggaggaacaccagtggcgaaggcggcttactggacggtaactgacgttgaggctcgaaagcgtggggagcaaacaggattagataccctggtagtccacgccgtaaacgatgaatactaggtgtcgggtggcagagccattcggtgccgtcgcaaacgcagtaagtattccacctggggagtacgttcgcaagaatgaaactcaaaggaattgacggggacccgcacaagcggtggagcatgtggtttaattcgaagcaacgcgaagaaccttaccaagtcttgacatccctctgaccggaacttaatcgttcctttccttcgggacagaggagacaggtggtgcatggttgtcgtcagctcgtgtcgtgagatgttgggttaagtcccgcaacgagcgcaacccctatcctcagtagccagcatttaaggtgggcactctggggagactgccagggataacctggaggaaggcggggatgacgtcaaatcatcatgccccttatgatttgggctacacacgtgctacaatggcgtaaacaaagggaagcgagattgtgagatggagcaaatcccaaaaataacgtcccagttcggactgtagtctgcaacccgactacacgaagctggaatcgctagtaatcgcggatcagaatgccgcggtgaatacgttcccgggtcttgtacacaccgcccgtcacaccatgggagtcagtaacgcccgaagtcagtgacctaactgcaaagaaggagctgccgaaggcgggaccgatgactggggtgaagtcgtaacaaggtagccgtatcggaaggtgcggctggatcacctccttt

SEQ ID NO: 25 - DNA, 1530 bp, artificial sequence
  >GCF_000169255.2_00339 Pseudoflavonifractor_capillosus
tattgagagtttgatcctggctcaggatgaacgctggcggcgtgcttaacacatgcaagtcgaacggagagctcatgacagaggattcgtccaatggattgggtttcttagtggcggacgggtgagtaacgcgtgaggaacctgcctcggagtggggaataacagtccgaaaggactgctaataccgcataatgcagctgagtcgcatgacactggctgccaaagatttatcgctctgagatggcctcgcgtctgattagctagttggcggggtaacggcccaccaaggcgacgatcagtagccggactgagaggttggccggccacattgggactgagacacggcccagactcctacgggaggcagcagtggggaatattgggcaatgggcgcaagcctgacccagcaacgccgcgtgaaggatgaaggctttcgggttgtaaacttcttttatcagggacgaaataaatgacggtacctgatgaataagccacggctaactacgtgccagcagccgcggtaatacgtaggtggcaagcgttatccggatttactgggtgtaaagggcgtgtaggcgggactgcaagtcaggtgtgaaaaccacgggctcaacctgtggcctgcatttgaaactgtagttcttgagtgctggagaggcaatcggaattccgtgtgtagcggtgaaatgcgtagatatacggaggaacaccagtggcgaaggcggattgctggacagtaactgacgctgaggcgcgaaagcgtggggagcaaacaggattagataccctggtagtccacgccgtaaacgatggatactaggtgtggggggactgaccccctccgtgccgcagttaacacaataagtatcccacctggggagtacgatcgcaaggttgaaactcaaaggaattgacgggggcccgcacaagcggtggagtatgtggtttaattcgaagcaacgcgaagaaccttaccagggcttgacatccgactaacgaagcagagatgcattaggtgcccttcggggaaagtcgagacaggtggtgcatggttgtcgtcagctcgtgtcgtgagatgttgggttaagtcccgcaacgagcgcaacccttattgttagttgctacgcaagagcactctagcgagactgccgttgacaaaacggaggaaggtggggacgacgtcaaatcatcatgccccttatgtcctgggccacacacgtactacaatggtggttaacagagggaagcaatgccgcgaggtggagcaaatccctaaaagccatcccagttcggattgcaggctgaaacccgcctgtatgaagttggaatcgctagtaatcgcggatcagcatgccgcggtgaatacgttcccgggccttgtacacaccgcccgtcacaccatgagagtcgggaacacccgaagtccgtagcctaaccgcaaggagggcgcggccgaaggtgggttcgataattggggtgaagtcgtaacaaggtagccgtatcggaaggtgcggctggatcacctccttt

SEQ ID NO: 26 - DNA, 1491 bp, artificial sequence
  >GCF_000169255.2_00816 Pseudoflavonifractor_capillosus
cgtgcttacacatgcaagtcgaacggagagctcatgacagacgatacgtccaatggattgggtttcttagtggcggacgggtgagtaacgcgtgaggaacctgcctcggagtggggaataacagtccgaaaggactgctaataccgcataatgcagctgagtcgcatgacactggctgccaaagatttatcgctctgagatggcctcgcgtctgattagctagttggcggggtaacggcccaccaaggcgacgatcagtagccggactgagaggttggccggccacattgggactgagacacggcccagactcctacgggaggcagcagtggggaatattgggcaatgggcgcaagcctgacccagcaacgccgcgtgaaggatgaaggctttcgggttgtaaacttcttttatcagggacgaaataaatgacggtacctgatgaataagccacggctaactacgtgccagcagccgcggtaatacgtaggtggcaagcgttatccggatttactgggtgtaaagggcgtgtaggcgggactgcaagtcaggtgtgaaaaccacgggctcaacctgtggcctgcatttgaaactgtagttcttgagtgctggagaggcaatcggaattccgtgtgtagcggtgaaatgcgtagatatacggaggaacaccagtggcgaaggcggattgctggacagtaactgacgctgaggcgcgaaagcgtggggagcaaacaggattagataccctggtagtccacgccgtaaacgatggatactaggtgtggggggactgaccccctccgtgccgcagttaacacaataagtatcccacctggggagtacgatcgcaaggttgaaactcaaaggaattgacgggggcccgcacaagcggtggagtatgtggtttaattcgaagcaacgcgaagaaccttaccagggcttgacatccgactaacgaagcagagatgcattaggtgcccttcggggaaagtcgagacaggtggtgcatggttgtcgtcagctcgtgtcgtgagatgttgggttaagtcccgcaacgagcgcaacccttattgttagttgctacgcaagagcactctagcgagactgccgttgacaaaacggaggaaggtggggacgacgtcaaatcatcatgccccttatgtcctgggccacacacgtactacaatggtggttaacagagggaagcaatgccgcgaggtggagcaaatccctaaaagccatcccagttcggattgcaggctgaaacccgcctgtatgaagttggaatcgctagtaatcgcggatcagcatgccgcggtgaatacgttcccgggccttgtacacaccgcccgtcacaccatgagagtcgggaacacccgaagtccgtagcctaaccgcaaggaggggcgcggccgaaaggtgggttcgataattggggtgaagtcgtaacaaggtagccgtatcggaaggtgcggctggatcacctccttt

SEQ ID NO: 27 - DNA, 1427 bp, artificial sequence
  >GCF_000183485.2_00151 Alistipes_finegoldii
gaccggcgcacgggtgcgtaacgcgtatgcaacctacctttaacaggggcataacactgagaaattggtactaattccccataacattcgagaaggcatcttcttgggttaaaaactccggtggttaaagatgggcatgcgttgtattagctagttggtgaggtaacggctcaccaaggcaacgatacatagggggactgagaggttaaccccccacattggtactgagacacggaccaaactcctacgggaggcagcagtgaggaatattggtcaatggacgcaagtctgaaccagccatgccgcgtgcaggaagacagctctatgagttgtaaactgcttttgtactagggtaaacgctcctacgtgtaggagtctgaaagtatagtacgaataaggatcggctaactccgtgccagcagccgcggtaatacggaggatccaagcgttatccggatttattgggtttaaagggtgcgtaggcggtttgataagttagaggtgaaataccggggctcaactccggaactgcctctaatactgttgaactagagagtagttgcggtaggcggaatgtatggtgtagcggtgaaatgcttagagatcatacagaacaccgattgcgaaggcagcttaccaaactatatctgacgttgaggcacgaaagcgtggggagcaaacaggattagataccctggtagtccacgcagtaaacgatgataactcgttgtcggcgatacacagtcggtgactaagcgaaagcgataagttatccacctggggagtacgttcgcaagaatgaaactcaaaggaattgacgggggcccgcacaagcggaggaacatgtggtttaattcgatgatacgcgaggaaccttacccgggcttgaaagttagtgacgattctggaaacaggatttcccttcggggcacgaaactaggtgctgcatggttgtcgtcagctcgtgccgtgaggtgtcgggttaagtcccataacgagcgcaacccctaccgttagttgccatcaggtcaagctgggcactctggcgggactgccggtgtaagccgagaggaaggtggggatgacgtcaaatcagcacggcccttacgtccggggctacacacgtgttacaatggtaggtacagagggccgctaccccgtgaggggatgccaatctcgaaagcctatctcagttcggatcggaggctgaaacccgcctccgtgaagttggattcgctagtaatcgcgcatcagccatggcgcggtgaatacgttcccgggccttgtacacaccgcccgtcaagccatggaagctgggggtgcctgaagttcgtgaccgcaaggagcgacctagggcaaaaccggtgactggggctaagtcgtaacaaggtagccgtaccggaaggtgcggctggaacacctccttt

SEQ ID NO: 28 - DNA, 1548 bp, artificial sequence
  >GCF_000185705.2_01077 Bilophila_wadsworthia
ctggagagtttgattctggctcagattgaacgctggcggcgtgcttaacacatgcaagtcgaacgtgaaagtccttcggggcgagtaaagtggcgcacgggtgagtaacgcgtggataatctacccttaagatggggataacggctggaaacggtcgctaataccgaatacgctcccgattttatcgttggggggaaagatggcctctgcttgcaagctatcgcttaaggatgagtccgcgtcccattagctagttggcggggtaacggcccaccaaggcgacgatgggtagccggtctgagaggatgaccggccacactggaactggaacacggtccagactcctacgggaggcagcagtggggaatattgcgcaatgggcgaaagcctgacgcagcgacgccgcgtgagggatgaaggttctcggatcgtaaacctctgtcaggggggaagaaaccccctcgtgtgaataatgcgagggcttgacggtacccccaaaggaagcaccggctaactccgtgccagcagccgcggtaatacggagggtgcaagcgttaatcggaatcactgggcgtaaagcgcacgtaggcggcttggtaagtcaggggtgaaatcccacagcccaactgtggaactgcctttgatactgccaggcttgagtaccggagagggtggcggaattccaggtgtaggagtgaaatccgtagatatctggaggaacaccggtggcgaaggcggccacctggacggtaactgacgctgaggtgcgaaagcgtgggtagcaaacaggattagataccctggtagtccacgctgtaaacgatgggtgctgggtgctgggatgtatgtctcggtgccgtagctaacgcgataagcaccccgcctggggagtacggtcgcaaggctgaaactcaaagaaattgacgggggcccgcacaagcggtggagtatgtggtttaattcgatgcaacgcgaagaaccttacccaggcttgacatctagggaacccttcggaaatgaaggggtgcccttcggggagccctaagacaggtgctgcatggctgtcgtcagctcgtgccgtgaggtgttgggttaagtcccgcaacgagcgcaacccctatcttcagttgccagcaggtaaggctgggcactctggagagaccgccccggtcaacggggaggaaggtggggacgacgtcaagtcatcatggcccttacgcctggggctacacacgtactacaatggcgcgcacaaagggtagcgagaccgcgaggtggagccaatcccaaaaaacgcgtcccagtccggattggagtctgcaactcgactccatgaagtcggaatcgctagtaattcgagatcagcatgctcgggtgaatgcgttcccgggccttgtacacaccgcccgtcacaccacgaaagtcggttttacccgaagccggtgagctaactcgcaagaggagcagccgtctacggtagggccgatgattggggtgaagtcgtaacaaggtagccgtaggggaacctgcggctggatcacctccttt

SEQ ID NO: 29 - DNA, 1521 bp, artificial sequence
  >GCF_000210575.1_00729 Alistipes_shahii
atggagagtttgatcctggctcaggatgaacgctagcggcaggcctaacacatgcaagtcgaggggcagcacggtgtagcaatacactggtggcgaccggcgcacgggtgcgtaacgcgtatgcaacctacccataacagggggataacactgagaaattggtactaataccccataacatcaggaccggcatcggttctggttgaaaactccggtggttatggatgggcatgcgttgtattagctggttggtgaggtaacggctcaccaaggcaacgatacatagggggactgagaggttaaccccccacattggtactgagacacggaccaaactcctacgggaggcagcagtgaggaatattggtcaatggacgcaagtctgaaccagccatgccgcgtgcaggaagacggctctatgagttgtaaactgcttttgtacgagggtaaacgctcttacgtgtaagagcctgaaagtatcgtacgaataaggatcggctaactccgtgccagcagccgcggtaatacggaggatccaagcgttatccggatttattgggtttaaagggtgcgtaggcggtttgataagttagaggtgaaataccggtgcttaacaccggaactgcctctaatactgttggactagagagtagttgcggtaggcggaatgtatggtgtagcggtgaaatgcttagagatcatacagaacaccgattgcgaaggcagcttaccaaactatatctgacgttgaggcacgaaagcgtggggagcaaacaggattagataccctggtagtccacgcagtaaacgatgataactcgctgtcggcgatacacggtcggcggctaagcgaaagcgataagttatccacctggggagtacgttcgcaagaatgaaactcaaaggaattgacgggggcccgcacaagcggaggaacatgtggtttaattcgatgatacgcgaggaaccttacccgggcttgaaagttactgacgattctggaaacaggatttcccttcggggcaggaaactaggtgctgcatggttgtcgtcagctcgtgccgtgaggtgtcgggttaagtcccataacgagcgcaacccctaccgttagttgccatcaggtcaagctgggcactctggcgggactgccggtgtaagccgagaggaaggtggggatgacgtcaaatcagcacggcccttacgtccggggctacacacgtgttacaatggtaggtacagagggcagctacccagtgatgggatgcgaatctcgaaagcctatctcagttcggatcggaggctgaaacccgcctccgtgaagttggattcgctagtaatcgcgcatcagccatggcgcggtgaatacgttcccgggccttgtacacaccgcccgtcaagccatggaagctgggggtgcctgaagttcgtgaccgcaaggagcgacctagggcaaaaccggtgactggggctaagtcgtaacaaggtagccgtaccggaaggtgcggctggaacacctccttt

SEQ ID NO: 30 - DNA, 1548 bp, artificial sequence
  >GCF_000224655.1_01376 Bilophila_wadsworthia
ctggagagtttgattctggctcagattgaacgctggcggcgtgcttaacacatgcaagtcgaacgtgaaagtccttcgggatgagtaaagtggcgcacgggtgagtaacgcgtggataatctacccttaagatggggataacggctggaaacggtcgctaataccgaatacgctcccgattttatcgttggggggaaagatggcctctgcttgcaagctatcgcttaaggatgagtccgcgtcccattagctagttggcggggtaacggcccaccaaggcaacgatgggtagccggtctgagaggatgaccggccacactggaactggaacacggtccagactcctacgggaggcagcagtggggaatattgcgcaatgggcgaaagcctgacgcagcgacgccgcgtgagggatgaaggttctcggatcgtaaacctctgtcaggggggaagaaaccccctcgtgtgaataatgcgagggcttgacggtacccccaaaggaagcaccggctaactccgtgccagcagccgcggtaatacggagggtgcaagcgttaatcggaatcactgggcgtaaagcgcacgtaggcggcttggtaagtcaggggtgaaatcccacagcccaactgtggaactgcctttgatactgccaggcttgagtaccggagagggtggcggaattccaggtgtaggagtgaaatccgtagatatctggaggaacaccggtggcgaaggcggccacctggacggtaactgacgctgaggtgcgaaagcgtgggtagcaaacaggattagataccctggtagtccacgctgtaaacgatgggtgctgggtgctgggatgtatgtctcggtgccgtagctaacgcgataagcaccccgcctggggagtacggtcgcaaggctgaaactcaaagaaattgacgggggcccgcacaagcggtggagtatgtggtttaattcgatgcaacgcgaagaaccttacccaggcttgacatctagggaacccttcggaaatgaaggggtgcccttcggggagccctaagacaggtgctgcatggctgtcgtcagctcgtgccgtgaggtgttgggttaagtcccgcaacgagcgcaacccctatcttcagttgccagcaggtaaggctgggcactctggagagaccgccccggtcaacggggaggaaggtggggacgacgtcaagtcatcatggcccttacgcctggggctacacacgtactacaatggcgcgcacaaagggtagcgagaccgcgaggtggagccaatcccaaaaaacgcgtcccagtccggattggagtctgcaactcgactccatgaagtcggaatcgctagtaattcgagatcagcatgctcgggtgaatgcgttcccgggccttgtacacaccgcccgtcacaccacgaaagtcggttttacccgaagccggtgagctaactcgcaagaggagcagccgtctacggtagggccgatgattggggtgaagtcgtaacaaggtagccgtaggggaacctgcggctggatcacctccttt

SEQ ID NO: 31 - DNA, 1521 bp, artificial sequence
  >GCF_000265365.1_00096 Alistipes_finegoldii
atggagagtttgatcctggctcaggatgaacgctagcggcaggcttaacacatgcaagtcgaggggcagcacgaggtagcaatactttggtggcgaccggcgcacgggtgcgtaacgcgtatgcaacctacctttaacaggggcataacactgagaaattggtactaattccccataacattcgagaaggcatcttcttgggttaaaaactccggtggttaaagatgggcatgcgttgtattagctagttggtgaggtaacggctcaccaaggcaacgatacatagggggactgagaggttaaccccccacattggtactgagacacggaccaaactcctacgggaggcagcagtgaggaatattggtcaatggacgcaagtctgaaccagccatgccgcgtgcaggaagacggctctatgagttgtaaactgcttttgtactagggtaaacgctcttacgtgtaggagcctgaaagtatagtacgaataaggatcggctaactccgtgccagcagccgcggtaatacggaggatccaagcgttatccggatttattgggtttaaagggtgcgtaggcggtttgataagttagaggtgaaataccggggctcaactccggaactgcctctaatactgttgaactagagagtagttgcggtaggcggaatgtatggtgtagcggtgaaatgcttagagatcatacagaacaccgattgcgaaggcagcttaccaaactatatctgacgttgaggcacgaaagcgtggggagcaaacaggattagataccctggtagtccacgcagtaaacgatgataactcgttgtcggcgatacacagtcggtgactaagcgaaagcgataagttatccacctggggagtacgttcgcaagaatgaaactcaaaggaattgacgggggcccgcacaagcggaggaacatgtggtttaattcgatgatacgcgaggaaccttacccgggcttgaaagttagtgacgattctggaaacaggatttcccttcggggcacgaaactaggtgctgcatggttgtcgtcagctcgtgccgtgaggtgtcgggttaagtcccataacgagcgcaacccctaccgttagttgccatcaggtcaagctgggcactctggcgggactgccggtgtaagccgagaggaaggtggggatgacgtcaaatcagcacggcccttacgtccggggctacacacgtgttacaatggtaggtacagagggccgctaccccgcgaggggatgccaatctcgaaagcctatctcagttcggatcggaggctgaaacccgcctccgtgaagttggattcgctagtaatcgcgcatcagccatggcgcggtgaatacgttcccgggccttgtacacaccgcccgtcaagccatggaagctgggggtgcctgaagttcgtgaccgcaaggagcgacctagggcaaaaccggtgactggggctaagtcgtaacaaggtagccgtaccggaaggtgcggctggaacacctccttt

SEQ ID NO: 32 - DNA, 1521 bp, artificial sequence
  >GCF_000265365.1_01929 Alistipes_finegoldii
atggagagtttgatcctggctcaggatgaacgctagcggcaggcttaacacatgcaagtcgaggggcagcggggagtagcaatactccgccggcgaccggcgcacgggtgcgtaacgcgtatgcaacctacctttaacaggggcataacactgagaaattggtactaattccccataacattcgagaaggcatcttcttgggttaaaaactccggtggttaaagatgggcatgcgttgtattagctagttggtgaggtaacggctcaccaaggcaacgatacatagggggactgagaggttaaccccccacattggtactgagacacggaccaaactcctacgggaggcagcagtgaggaatattggtcaatggacgcaagtctgaaccagccatgccgcgtgcaggaagacggctctatgagttgtaaactgcttttgtactagggtaaacgcttctacgtgtaggagcctgaaagtatagtacgaataaggatcggctaactccgtgccagcagccgcggtaatacggaggatccaagcgttatccggatttattgggtttaaagggtgcgtaggcggtttgataagttagaggtgaaataccggggctcaactccggaactgcctctaatactgttgaactagagagtagttgcggtaggcggaatgtatggtgtagcggtgaaatgcttagagatcatacagaacaccgattgcgaaggcagcttaccaaactatatctgacgttgaggcacgaaagcgtggggagcaaacaggattagataccctggtagtccacgcagtaaacgatgataactcgttgtcggcgatacacagtcggtgactaagcgaaagcgataagttatccacctggggagtacgttcgcaagaatgaaactcaaaggaattgacgggggcccgcacaagcggaggaacatgtggtttaattcgatgatacgcgaggaaccttacccgggcttgaaagttagtgacgattctggaaacaggatttcccttcggggcacgaaactaggtgctgcatggttgtcgtcagctcgtgccgtgaggtgtcgggttaagtcccataacgagcgcaacccctaccgttagttgccatcaggtcaagctgggcactctggcgggactgccggtgtaagccgagaggaaggtggggatgacgtcaaatcagcacggcccttacgtccggggctacacacgtgttacaatggtaggtacagagggccgctaccccgcgaggggatgccaatctcgaaagcctatctcagttcggatcggaggctgaaacccgcctccgtgaagttggattcgctagtaatcgcgcatcagccatggcgcggtgaatacgttcccgggccttgtacacaccgcccgtcaagccatggaagctgggggtgcctgaagttcgtgaccgcaaggagcgacctagggcaaaaccggtgactggggctaagtcgtaacaaggtagccgtaccggaaggtgcggctggaacacctccttt

SEQ ID NO: 33 - DNA, 1528 bp, artificial sequence
  >GCF_000296465.1_02047 Barnesiella_intestinihominis
cgaagagtttgatcctggctcaggatgaacgctagcgacaggcctaacacatgcaagtcgaggggcagcggggaggtagcaatacctttgccggcgaccggcgcacgggtgagtaacacgtatgcaatccacctgtaacagggggataacccggagaaatccggactaataccccataatatgggcgctccgcatggagagttcattaaagagagcaattttggttacagacgagcatgcgctccattagccagttggcggggtaacggcccaccaaagcgacgatggataggggttctgagaggaaggtcccccacattggaactgagacacggtccaaactcctacgggaggcagcagtgaggaatattggtcaatggtcggcagactgaaccagccaagtcgcgtgagggaagacggccctacgggttgtaaacctcttttgtcggagagtaaagtacgctacgtgtagcgtattgcaagtatccgaagaaaaagcatcggctaactccgtgccagcagccgcggtaatacggaggatgcgagcgttatccggatttattgggtttaaagggtgcgtaggcggcacgccaagtcagcggtgaaatttccgggctcaacccggagtgtgccgttgaaactggcgagctagagtacacaagaggcaggcggaatgcgtggtgtagcggtgaaatgcatagatatcacgcagaaccccgattgcgaaggcagcctgctagggtgaaacagacgctgaggcacgaaagcgtgggtatcgaacaggattagataccctggtagtccacgcagtaaacgatgaatactaactgtttgcgatacaatgtaagcggtacagcgaaagcgttaagtattccacctggggagtacgccggcaacggtgaaactcaaaggaattgacgggggcccgcacaagcggaggaacatgtggtttaattcgatgatacgcgaggaaccttacccgggctcaaacgcagggggaatgtcggtgaaagccggcagctagtaatagtcacctgcgaggtgctgcatggttgtcgtcagctcgtgccgtgaggtgtcggcttaagtgccataacgagcgcaacccctatcgacagttactaacgggtgaagccgaggactctgtcgagactgccggcgcaagccgcgaggaaggtggggatgacgtcaaatcagcacggcccttacgtccggggcgacacacgtgttacaatggcaggtacagaaggcagccagtcagcaatgacgcgcgaatcccgaaaacctgtctcagttcggattggagtctgcaacccgactccatgaagctggattcgctagtaatcgcgcatcagccatggcgcggtgaatacgttcccgggccttgtacacaccgcccgtcaagccatggaagccgggagtacctgaagcatgcaaccgcaaggagcgtacgaaggtaataccggtaactggggctaagtcgtaacaaggtagccgtaccggaaggtgcggctggaacacctccttt

SEQ ID NO: 34 - DNA, 1547 bp, artificial sequence
  >GCF_000298875.1_01725 Leuconostoc_gelidum
attgagagtttgatcctggctcaggatgaacgctggcggcgtgcctaatacatgcaagtcgaacgcacagcgaaaggtgcttgcacctttcaagtgagtggcgaacgggtgagtaacacgtggataacctacctcaaggttggggataacatttggaaacagatgctaataccgaataaaacttcgtatcgcatgatacaaggttaaaaggcgctacggcgtcacctagagatggatccgcggtgcattagttagttggtggggtaaaggcctaccaagacaatgatgcatagccgagttgagagactgatcggccacattgggactgagacacggcccaaactcctacgggaggctgcagtagggaatcttccacaatgggcgaaagcctgatggagcaacgccgcgtgtgtgatgaaggctttcgggtcgtaaagcactgttgtatgggaagaacagctagagtagggaatgactttagtttgacggtaccataccagaaagggacggctaaatacgtgccagcagccgcggtaatacgtatgtcccgagcgttatccggatttattgggcgtaaagcgagcgcagacggttgattaagtctgatgtgaaagcccggagctcaactccggaaaggcattggaaactggtcaacttgagtgcagtagaggtaagtggaactccatgtgtagcggtggaatgcgtagatatatggaagaacaccagcggcgaaggcggcttactggactgtaactgacgttgaggctcgaaagtgtgggtagcaaacaggattagataccctggtagtccacaccgtaaacgatgaacactaggtgttaggaggtttccgcctcttagtgccgaagctaacgcattaagtgttccgcctggggagtacgaccgcaaggttgaaactcaaaggaattgacggggacccgcacaagcggtggagcatgtggtttaattcgaagcaacgcgaagaaccttaccaggtcttgacatcctttgaagcttttagagatagaagtgttctcttcggagacaaagtgacaggtggtgcatggtcgtcgtcagctcgtgtcgtgagatgttgggttaagtcccgcaacgagcgcaacccttattgttagttgccagcattcagatgggcactctagcgagactgccggtgacaaaccggaggaaggcggggacgacgtcagatcatcatgccccttatgacctgggctacacacgtgctacaatggcgtatacaacgagttgccaacctgtgaaggtgagctaatctcttaaagtacgtctcagttcggactgcagtctgcaactcgactgcacgaagtcggaatcgctagtaatcgcggatcagcacgccgcggtgaatacgttcccgggtcttgtacacaccgcccgtcacaccatgggagtttgtaatgcccaaagccggtggcctaaccgtaaggagggaaccgtctaaggcaggacagatgactggggtgaagtcgtaacaaggtagccgtaggagaacctgcggctggatcacctccttt

SEQ ID NO: 35 - DNA, 1527 bp, artificial sequence
  >GCF_000307495.1_03082 Parabacteroides_merdae
cgaagagtttgatcctggctcaggatgaacgctagcgacaggcttaacacatgcaagtcgaggggcagcatgatttgtagcaatacagattgatggcgaccggcgcacgggtgagtaacgcgtatgcaacttacctatcagagggggatagcccggcgaaagtcggattaataccccataaaacaggggtcccgcatgggaatatttgttaaagattcatcgctgatagataggcatgcgttccattaggcagttggcggggtaacggcccaccaaaccgacgatggataggggttctgagaggaaggtcccccacattggtactgagacacggaccaaactcctacgggaggcagcagtgaggaatattggtcaatggccgagaggctgaaccagccaagtcgcgtgaaggaagaaggatctatggtttgtaaacttcttttataggggaataaagtggaggacgtgtccttttttgtatgtaccctatgaataagcatcggctaactccgtgccagcagccgcggtaatacggaggatgcgagcgttatccggatttattgggtttaaagggtgcgtaggtggtgatttaagtcagcggtgaaagtttgtggctcaaccataaaattgccgttgaaactgggttacttgagtgtgtttgaggtaggcggaatgcgtggtgtagcggtgaaatgcatagatatcacgcagaactccgattgcgaaggcagcttactaaaccataactgacactgaagcacgaaagcgtggggatcaaacaggattagataccctggtagtccacgcagtaaacgatgattactaggagtttgcgatacaatgtaagctctacagcgaaagcgttaagtaatccacctggggagtacgccggcaacggtgaaactcaaaggaattgacgggggcccgcacaagcggaggaacatgtggtttaattcgatgatacgcgaggaaccttacccgggtttgaacgtagtctgaccggagtggaaacactccttctagcaatagcagattacgaggtgctgcatggttgtcgtcagctcgtgccgtgaggtgtcggcttaagtgccataacgagcgcaacccttatcactagttactaacaggtgaagctgaggactctggtgagactgccagcgtaagctgtgaggaaggtggggatgacgtcaaatcagcacggcccttacatccggggcgacacacgtgttacaatggcatggacaaagggcagctacctggcgacaggatgctaatctccaaaccatgtctcagttcggatcggagtctgcaactcgactccgtgaagctggattcgctagtaatcgcgcatcagccatggcgcggtgaatacgttcccgggccttgtacacaccgcccgtcaagccatgggagccgggggtacctgaagtccgtaaccgcaaggatcggcctagggtaaaactggtgactggggctaagtcgtaacaaggtagccgtaccggaaggtgcggctggaacacctccttt

SEQ ID NO: 36 - DNA, 1539 bp, artificial sequence
  >GCF_000311925.1_02655 Alistipes_obesi
atggagagtttgatcctggctcaggatgaacgctagcggcaggcttaacacatgcaagtcgaggggcagcatgaaagtagcaatacttttgatggcgaccggcggacgggtgcgtaacgcgtatgcaacctaccctttacagggggataacactgagaaatcggtactaataccccataatattccgggaggcatctttcggagttgaaagctttggtggtaaaggatgggcatgcgttgtattagctagttggtaaggtaacggcttaccaaggcgacgatacatagggggactgagaggttaaccccccacattggtactgagacacggaccaaactcctacgggaggcagcagtgaggaatattggtcaatggacggaagtctgaaccagccatgccgcgtgcaggaagacggctctatgagttgtaaactgcttttgtacgagggtaaacgcagatacgtgtatctgcctgaaagtatcgtacgaataaggatcggctaactccgtgccagcagccgcggtaatacggaggatccaagcgttatccggatttattgggtttaaagggtgcgtaggcggtttagtaagtcagcggtgaaattttggtgcttaacaccaaacgtgccgttgatactgctgggctagagagtagttgcggtaggcggaatgtatggtgtagcggtgaaatgcttagagatcatacagaacaccgattgcgaaggcagcttaccaaactatatctgacgttgaggcacgaaagcgtggggagcaaacaggattagataccctggtagtccacgcagtaaacgatgatagctcgttgtcggcgatacacagtcggtgactaagagaaatcgataagctatccacctggggagtacgttcgcaagaatgaaactcaaaggaattgacgggggcccgcacaagcggaggaacatgtggtttaattcgatgatacgcgaggaaccttacccgggcttgaaagttactgacgattctggaaacaggatttcccttcggggcaggaaactaggtgctgcatggttgtcgtcagctcgtgccgtgaggtgtcgggttaagtcccataacgagcgcaacccctactgatagttgccatcagagcgtttgagcgatcaaacaagctgggcactctatcgggactgccggtgtaagccgagaggaaggtggggatgacgtcaaatcagcacggcccttacgtccggggcgacacacgtgttacaatggtaggtacagagggcagccacccagtgatggggagcgaatctcgaaagcctatctcagttcggattggaggctgaaactcgcctccatgaagttggattcgctagtaatcgcgcatcagccatggcgcggtgaatacgttcccgggccttgtacacaccgcccgtcaagccatgggagttgggggtgcctgaagttcgtgaccgaaaggagcgacctagggcaaaaccgatgactggggctaagtcgtaacaaggtagccgtaccggaaggtgcggctggaacacctccttt

SEQ ID NO: 37 - DNA, 1531 bp, artificial sequence
  >GCF_000411515.1_00321 Sutterella_wadsworthensis
taaagagtttgatcctggctcagattgaacgctggcggcatgctttacacatgcaagtcgaacggcagcgcggggagcttgctccctggcggcgagtggcgcacgggtgagtaatacatcggaacgtgtcttctagtgggggataactgcccgaaagggcagctaataccgcatgagacctgagggtgaaagcgggggatcgcaagacctcgcgctggaagagcggccgatgtccgattagctagttggtgaggtaaaggctcaccaaggcgacgatcggtagctggtctgagaggacgaccagccacactgggactgagacacggcccagactcctacgggaggcagcagtggggaattttggacaatgggggcaaccctgatccagccatgccgcgtgcaggatgaaggtcttcggattgtaaactgcttttgtcagggacgaaaagggatgcgataacaccgtattccgctgacggtacctgaagaataagcaccggctaactacgtgccagcagccgcggtaatacgtagggtgcaagcgttaatcggaattactgggcgtaaagcgtgcgcaggcggttctgtaagatagatgtgaaatccccgggctcaacctgggaattgcatatatgactgcaggacttgagtttgtcagaggagggtggaattccacgtgtagcagtgaaatgcgtagatatgtggaagaacaccgatggcgaaggcagccctctggggcatgactgacgctcatgcacgaaagcgtggggagcaaacaggattagataccctggtagtccacgccctaaacgatgtctactagttgttggggacgatagtccttggtaacgcagctaacgcgtgaagtagaccgcctggggagtacggtcgcaagattaaaactcaaaggaattgacggggacccgcacaagcggtggatgatgtggattaattcgatgcaacgcgaaaaaccttacctagccttgacatgccaggaaggtctgagagatcagaccgtgcccgcaagggaatctggacacaggtgctgcatggctgtcgtcagctcgtgtcgtgagatgttgggttaagtcccgcaacgagcgcaacccttgtcattagttgctacgaaagggcactctaatgagactgccggtgacaaaccggaggaaggtggggatgacgtcaagtcctcatggcccttatggctagggcctcacacgtcatacaatggtcggaacagagggaagcgaagccgcgaggtgaagccaatcccagaaaaccgatcgtagtccggattgcagtctgcaactcgactgcatgaagtcggaatcgctagtaatcgcggatcagcatgccgcggtgaatacgttcccgggtcttgtacacaccgcccgtcacaccatgggagtggggttcaccagaagacgtttgcccaaccgaaaggaaggcggcgtccacggtgggcttcatgactggggtgaagtcgtaacaaggtagccgtaccggaaggtgcggctggatcacctccttt

SEQ ID NO: 38 - DNA, 921 bp, artificial sequence
  >GCF_000411515.1_01408 Sutterella_wadsworthensis
  misc_feature (921)..(921): n is a, c, g, or t
taaagagtttgatcctggctcagattgaacgctggcggcatgctttacacatgcaagtcgaacggcagcgcggggagcttgctccctggcggcgagtggcgcacgggtgagtaatacatcggaacgtgtcttctagtgggggataactgcccgaaagggcagctaataccgcatgagacctgagggtgaaagcgggggatcgcaagacctcgcgctggaagagcggccgatgtccgattagctagttggtgaggtaaaggctcaccaaggcgacgatcggtagctggtctgagaggacgaccagccacactgggactgagacacggcccagactcctacgggaggcagcagtggggaattttggacaatgggggcaaccctgatccagccatgccgcgtgcaggatgaaggtcttcggattgtaaactgcttttgtcagggacgaaaagggatgcgataacaccgtattccgctgacggtacctgaagaataagcaccggctaactacgtgccagcagccgcggtaatacgtagggtgcaagcgttaatcggaattactgggcgtaaagcgtgcgcaggcggttctgtaagatagatgtgaaatccccgggctcaacctgggaattgcatatatgactgcaggacttgagtttgtcagaggagggtggaattccacgtgtagcagtgaaatgcgtagatatgtggaagaacaccgatggcgaaggcagccctctgggacatgactgacgctcatgcacgaaagcgtggggagcaaacaggattagataccctggtagtccacgccctaaacgatgtctactagttgttggggacgatagtccttggtaacgcagctaacgcgtgaagtagaccgcctggggagtacggtcgcaagattaaaactcaaaggaattgacgggn

SEQ ID NO: 39 - DNA, 1531 bp, artificial sequence
  >GCF_000411515.1_01970 Sutterella_wadsworthensis
taaagagtttgatcctggctcagattgaacgctggcggcatgctttacacatgcaagtcgaacggcagcgcggggagcttgctccctggcggcgagtggcgcacgggtgagtaatacatcggaacgtgtcttctagtgggggataactgtccgaaagggcagctaataccgcatgagacctgagggtgaaagcgggggatcgcaagacctcgcgctggaagagcggccgatgtccgattagctagttggtgaggtaaaggctcaccaaggcgacgatcggtagctggtctgagaggacgaccagccacactgggactgagacacggcccagactcctacgggaggcagcagtggggaattttggacaatgggggcaaccctgatccagccatgccgcgtgcaggatgaaggtcttcggattgtaaactgcttttgtcagggacgaaaagggatgcgataacaccgtattccgctgacggtacctgaagaataagcaccggctaactacgtgccagcagccgcggtaatacgtagggtgcaagcgttaatcggaattactgggcgtaaagcgtgcgcaggcggttctgtaagatagatgtgaaatccccgggctcaacctgggaattgcatatatgactgcaggacttgagtttgtcagaggagggtggaattccacgtgtagcagtgaaatgcgtagatatgtggaagaacaccgatggcgaaggcagccctctgggacatgactgacgctcatgcacgaaagcgtggggagcaaacaggattagataccctggtagtccacgccctaaacgatgtctactagttgttggggacgatagtccttggtaacgcagctaacgcgtgaagtagaccgcctggggagtacggtcgcaagattaaaactcaaaggaattgacggggacccgcacaagcggtggatgatgtggattaattcgatgcaacgcgaaaacccttccctagccttgacatgccaggaaggtctgagagatcagaccgtgcccgcaagggaatctggacacaggtgctgcatggctgtcgtcagctcgtgtcgtgagatgttgggttaagtcccgcaacgagcgcaacccttgtcattagttgctacgaaagggcactctaatgagactgccggtgacaaaccggaggaaggtggggatgacgtcaagtcctcatggcccttatggctagggcctcacacgtcatacaatggtcggaacagagggaagcgaagccgcgaggtgaagccaatcccagaaaaccgatcgtagtccggattgcagtctgcaactcgactgcatgaagtcggaatcgctagtaatcgcggatcagcatgccgcggtgaatacgttcccgggtcttgtacacaccgcccgtcacaccatgggagtggggttcaccagaagacgtttgcccaaccgaaaggaaggcggcgtccacggtgggcttcatgactggggtgaagtcgtaacaaggtagccgtaccggaaggtgcggctggatcacctccttt

SEQ ID NO: 40 - DNA, 1504 bp, artificial sequence
  >GCF_000478885.1_01434 [Adlercreutzia]_equolifaciens_group
cggagagtttgatcctggctcaggatgaacgctggcggcgtgcttaacacatgcaagtcgaacgattaagacggcttcggccgtgtatagagtggcgaacgggtgagtaacacgtgaccaacctgccccgcgctccgggacaaccgctggaaacggcggctaataccggatgctccggggaggccccatggcctccccgggaaagccctgacggcgcgggatggggtcgcggcccattaggtagacggcggggtaacggcccaccgtgcccgcgatgggtagccggactgagaggtcgaccggccacattgggactgagatacggcccagactcctacgggaggcagcagtggggaattttgcgcaatgggggcaaccctgacgcagcaacgccgcgtgcgggacgaaggccttcgggttgtaaaccgctttcagcagggaagacatagacggtacctgcagaagaagctccggctaactacgtgccagcagccgcggtaatacgtagggggcgagcgttatccggattcattgggcgtaaagcgcgcgtaggcggccgcctaagcggaacctctaatcccggggctcaacctcgggccgggttccggactgggcggctcgagtgcggtagaggcaggcggaattcccggtgtagcggtggaatgcgcagatatcgggaagaacaccgatggcgaaggcagcctgctgggccgccactgacgctgaggcgcgaaagctgggggagcgaacaggattagataccctggtagtcccagccgtaaacgatggacgctaggtgtggggggaccatccccccgtgccgcagccaacgcattaagcgtcccgcctggggagtacggccgcaaggctaaaactcaaaggaattgacgggggcccgcacaagcagcggagcatgtggcttaattcgaagcaacgcgaagaaccttaccagggcttgacatgcgagtgaagccgcggagacgcggtggccgagaggagctcgcgcaggtggtgcatggctgtcgtcagctcgtgtcgtgagatgttgggttaagtcccgcaacgagcgcaacccccgtcccgtgttgccagcattcagttggggactcgcgggagactgccggcgtcaagccggaggaaggtggggacgacgtcaagtcatcatgccccttatgccctgggctgcacacgtgctacaatggccggtacagagggttgccaccccgcgagggggagcggatcccggaaagccggtcccagttcggatcgcaggctgcaacccgcctgcgtgaagtcggagttgctagtaatcgcggatcagcatgccgcggtgaatacgttcccgggccttgtacacaccgcccgtcacaccacccgagtcgtctgcacccgaagccgccggccgaacccttctggggcggaggcgtcgaaggtgtggagggtaaggggggtgaagtcgtaacaaggtagccgtaccggaaggtgcggctggatcacctccttt

SEQ ID NO: 41 - DNA, 1548 bp, artificial sequence
  >GCF_000701705.1_04188 Bilophila_wadsworthia
ctggagagtttgattctggctcagattgaacgctggcggcgtgcttaacacatgcaagtcgaacgtgaaagtccttcggggcgagtaaagtggcgcacgggtgagtaacgcgtggataatctacccttaagatggggataacggctggaaacggtcgctaataccgaatacgctcccgattttatcattggggggaaagatggcctctgcttgcaagctatcgcttaaggatgagtccgcgtcccattagctagttggcggggtaacggcccaccaaggcaacgatgggtagccggtctgagaggatgaccggccacactggaactggaacacggtccagactcctacgggaggcagcagtggggaatattgcgcaatgggcgaaagcctgacgcagcgacgccgcgtgagggatgaaggttctcggatcgtaaacctctgtcaggggggaagaaaccccctcgtgtgaataatgcgagggcttgacggtacccccaaaggaagcaccggctaactccgtgccagcagccgcggtaatacggagggtgcaagcgttaatcggaatcactgggcgtaaagcgcacgtaggcggcttggtaagtcaggggtgaaatcccacagcccaactgtggaactgcctttgatactgccaggcttgagtaccggagagggtggcggaattccaggtgtaggagtgaaatccgtagatatctggaggaacaccggtggcgaaggcggccacctggacggtaactgacgctgaggtgcgaaagcgtgggtagcaaacaggattagataccctggtagtccacgctgtaaacgatgggtgctgggtgctgggatgtatgtctcggtgccgtagctaacgcgataagcaccccgcctggggagtacggtcgcaaggctgaaactcaaagaaattgacgggggcccgcacaagcggtggagtatgtggtttaattcgatgcaacgcgaagaaccttacccaggcttgacatctagggaacccttcggaaatgaaggggtgcccttcggggagccctaagacaggtgctgcatggctgtcgtcagctcgtgccgtgaggtgttgggttaagtcccgcaacgagcgcaacccctatcttcagttgccagcaggtaaggctgggcactctggagagaccgccccggtcaacggggaggaaggtggggacgacgtcaagtcatcatggcccttacgcctggggctacacacgtactacaatggcgcgcacaaagggtagcgagaccgcgaggtggagccaatcccaaaaaacgcgtcccagtccggattggagtctgcaactcgactccatgaagtcggaatcgctagtaattcgagatcagcatgctcgggtgaatgcgttcccgggccttgtacacaccgcccgtcacaccacgaaagtcggttttacccgaagccggtgagctaactcgcaagaggagcagccgtctacggtagggccgatgattggggtgaagtcgtaacaaggtagccgtaggggaacctgcggctggatcacctccttt

SEQ ID NO: 42 - DNA, 1548 bp, artificial sequence; identical to SEQ ID NO: 41
  >GCF_000741565.1_00287 Bifidobacterium_catenulatum_group

SEQ ID NO: 43 - DNA, 1528 bp, artificial sequence
  >GCF_000741565.1_00350 Bifidobacterium_catenulatum_group
tgtggagggttcgattctggctcaggatgaacgctggcggcgtgcttaacacatgcaagtcgaacgggatccaggcagcttgctgcctggtgagagtggcgaacgggtgagtaatgcgtgaccgacctgccccatacaccggaatagctcctggaaacgggtggtaatgccggatgctccgactccttcgcatggggtgtcgggaaagatttcatcggtatgggatggggtcgcgtcctagtcaggtagtgcggcgggtaacggcccaccgagcctacgacgggtagccggcctgagagggcgaccggccacattgggactgagatacggcccagactcctacgggaggcagcagtggggaatattgcacaatgggcgcaagcctgatgcagcgacgccgcgtgcgggatgacggccttcgggttgtaaaccgcttttgatcgggagcaagccttcgggtgagtgtacctttcgaataagcaccggctaactacgtgccagcagccgcggtaatacgtagggtgcaagcgttatccggaattattgggcgtaaagggctcgtaggcggttcgtcgcgtccggtgtgaaagtccatcgcttaacggtggatctgcgccgggtacgggcgggctggagtgcggtaggggagactggaattcccggtgtaacggtggaatgtgtagatatcgggaagaacaccaatggcgaaggcaggtctctgggccgttactgacgctgaggagcgaaagcgtggggagcgaacaggattagataccctggtagtccacgccgtaaacggtggatgctggatgtggggcccgttccacgggttccgtgtcggagctaacgcgttaagcatcccgcctggggagtacggccgcaaggctaaaactcaaagaaattgacgggggcccgcacaagcggcggagcatgcggattaattcgatgcaacgcgaagaaccttacctgggcttgacatgttcccgacagccgtagagatacggtctcccttcggggcgggttcacaggtggtgcatggtcgtcgtcagctcgtgtcgtgagatgttgggttaagtcccgcaacgagcgcaaccctcgccctgtgttgccagcacgtcatggtgggaactcacgggggaccgccggggtcaactcggaggaaggtggggatgacgtcagatcatcatgccccttacgtccagggcttcacgcatgctacaatggccggtacaacgggatgcgacatggcgacatggagcggatccctgaaaaccggtctcagttcggattggagtctgcaacccgactccatgaaggcggagtcgctagtaatcgcggatcagcaacgccgcggtgaatgcgttcccgggccttgtacacaccgcccgtcaagtcatgaaagtgggtagcacccgaagccggtggcctaaccccttgtgggatggagccgtctaaggtgagactcgtgattgggactaagtcgtaacaaggtagccgtaccggaaggtgcggctggatcacctccttt

SEQ ID NO: 44 - DNA, 1528 bp, artificial sequence
  >GCF_000741565.1_01000 Bifidobacterium_catenulatum_group
tgtggagggttcgattctggctcaggatgaacgctggcggcgtgcttaacacatgcaagtcgaacgggatccaggcagcttgctgcctggtgagagtggcgaacgggtgagtaatgcgtgaccgacctgccccatacaccggaatagctcctggaaacgggtggtaatgccggatgctccgactcctcgcatggggtgtcgggaaagatttcatcggtatgggatggggtcgcgtcctatcaggtagtcggcggggtaacggcccaccgagcctacgacgggtagccggcctgagagggcgaccggccacattgggactgagatacggcccagactcctacgggaggcagcagtggggaatattgcacaatgggcgcaagcctgatgcagcgacgccgcgtgcgggatgacggccttcgggttgtaaaccgcttttgatcgggagcaagccttcgggtgagtgtacctttcgaataagcaccggctaactacgtgccagcagccgcggtaatacgtagggtgcaagcgttatccggaattattgggcgtaaagggctcgtaggcggttcgtcgcgtccggtgtgaaagtccatcgcttaacggtggatctgcgccgggtacgggcgggctggagtgcggtaggggagactggaattcccggtgtaacggtggaatgtgtagatatcgggaagaacaccaatggcgaaggcaggtctctgggccgttactgacgctgaggagcgaaagcgtggggagcgaacaggattagataccctggtagtccacgccgtaaacggtggatgctggatgtggggcccgttccacgggttccgtgtcggagctaacggcgttaagcatcccgcctggggagtacggccgcaaggctaaaactcaaagaaattgacgggggcccgcacaagcggcggagcatgcggattaattcgatgcaacgcgaagaaccttacctgggcttgacatgttcccgacagccgtagagatacgggtctcccttcggggcgggttcacaggtggtgcatggtcgtcgtcagctcgtgtcgtgagatgttgggttaagtcccgcaacgagcgcaaccctcgccctgtgttgccagcacgtcatggtgggaactcacgggggaccgccggggtcaactcggaggaaggtggggatgacgtcagatcatcatgccccttacgtccagggcttcacgcatgctacaatggccggtacaacgggatgcgacatggcgacatggagcggatccctgaaaaccggtctcagttcggattggagtctgcaacccgactccatgaaggcggagtcgctagtaatcgcggatcagcaacgccgcggtgaatgcgttcccgggccttgtacacaccgcccgtcaagtcatgaaagtgggtagcacccgaagccggtggcctaaccccttgtgggatggagccgtctaaggtgagactcgtgattgggactaagtcgtaacaaggtagccgtaccggaaggtgcggctggatcacctccttt

SEQ ID NO: 45 - DNA, 1530 bp, artificial sequence
  >GCF_000741565.1_01669 Bifidobacterium_catenulatum_group
tgtggagggttcgattctggctcaggatgaacgctggcggcgtgcttaacacatgcaagtcgaacgggatccaggcagcttgctgcctggtgagagtggcgaacgggtgagtaatgcgtgaccgacctgccccatacaccggaatagctcctggaaacgggtggtaatgccggatgctccgactcctcgcatggggtgtcgggaaagatttcatcggtatgggatggggtcgcgtcctatcaggtagtcggcggggtaacggcccaccgagcctacgacgggtagccggcctgagagggcgaccggccacattgggactgagatacggcccagactcctacgggaggcagcagtggggaatattgcacaatgggcgcaagcctgatgcagcgacgccgcgtgcgggatgacggccttcgggttgtaaaccgcttttgatcgggagcaagccttcgggtgagtgtacctttcgaataagcaccggctaactacgtgccagcagccgcggtaatacgtagggtgcaagcgttatccggaattattgggcgtaaagggctcgtaggcggttcgtcgcgtccggtgtgaaagtccatcgcttaacggtggatctgcgccgggtacgggcgggctggagtgcggtaggggagactggaattcccggtgtaacggtggaatgtgtagatatcgggaagaacaccaatggcgaaggcaggtctctgggccgttactgacgctgaggagcgaaagcgtggggagcgaacaggattagataccctggtagtccacgccgtaaacggtggatgctggatgtggggcccgttccacgggttccgtgtcggagctaacgcgttaagcatcccgcctggggagtacggccgcaaggctaaaactcaaagaaattgacgggggcccgcacaagcggcggagcatgcggattaattcgatgcaacgcgaagaaccttacctgggcttgacatgttcccgacagccgtagagatacggtctcccttcggggcgggttcacaggtggtgcatggtcgtcgtcagctcgtgtcgtgagatgttgggttaagtcccgcaacgagcgcaaccctcgccctgtgttgccagcacgtcatggtgggaactcacggggggaccgccgggggtcaactcggaggaaggtgggggatgacgtcagatcatcatgcccccttacgtccagggcttcacgcatgctacaatggccggtacaacgggatgcgacatggcgacatggagcggatccctgaaaaccggtctcagttcggattggagtctgcaacccgactccatgaaggcggagtcgctagtaatcgcggatcagcaacgccgcggtgaatgcgttcccgggccttgtacacaccgcccgtcaagtcatgaaagtgggtagcacccgaagccggtggcctaaccccttgtgggatggagccgtctaaggtgagactcgtgattgggactaagtcgtaacaaggtagccgtaccggaaggtgcggctggatcacctccttt

SEQ ID NO: 46 - DNA, 1525 bp, artificial sequence
  >GCF_000741605.1_00302 Bifidobacterium_catenulatum_group
tgtggagggttcgattctggctcaggatgaacgctggcggcgtgcttaacacatgcaagtcgaacgggatcccaggagcttgctcctgggtgagagtggcgaacgggtgagtaatgcgtgaccgacctgccccatgcaccggaatagctcctggaaacgggtggtaatgccggatgctccatcacactgcatggtgtgttgggaaagcctttgcggcatgggatggggtcgcgtcctatcagcttgatggcggggtaacggcccaccatggcttcgacgggtagccggcctgagagggcgaccggccacattgggactgagatacggcccagactcctacgggaggcagcagtggggaatattgcacaatgggcgcaagcctgatgcagcgacgccgcgtgcgggatgacggccttcgggttgtaaaccgcttttgatcgggagcaagccttcgggtgagtgtacctttcgaataagcaccggctaactacgtgccagcagccgcggtaatacgtagggtgcaagcgttatccggaattattgggcgtaaagggctcgtaggcggttcgtcgcgtccggtgtgaaagtccatcgcttaacggtggatctgcgccgggtacgggcgggctggagtgcggtaggggagactggaattcccggtgtaacggtggaatgtgtagatatcgggaagaacaccaatggcgaaggcaggtctctgggccgttactgacgctgaggagcgaaagcgtggggagcgaacaggattagataccctggtagtccacgccgtaaacggtggatgctggatgtggggcccgttccacgggttccgtgtcggagctaacgcgttaagcatcccgcctggggagtacggccgcaaggctaaaactcaaagaaattgacgggggcccgcacaagcggcggagcatgcggattaattcgatgcaacgcgaagaaccttacctgggcttgacatgttcccgaccgttccagagatggggcttcccttcggggcgggttcacaggtggtgcatggtcgtcgtcagctcgtgtcgtgagatgttgggttaagtcccgcaacgagcgcaaccctcgccctgtgttgccagcacgtcatggtgggaactcacgggggaccgccggggtcaactcggaggaaggtggggatgacgtcagatcatcatgccccttacgtccagggcttcacgcatgctacaatggccggtacaacgggatgcgacacggcgacgtggagcggatccctgaaaaccggtctcagttcggattggagtctgcaacccgactccatgaaggcggagtcgctagtaatcgcggatcagcaacgccgcggtgaatgcgttcccgggccttgtacacaccgcccgtcaagtcatgaaagtgggtagcacccgaagccggtggcctaacccttcgtgggatggagccgtctaaggtgagactcgtgattgggactaagtcgtaacaaggtagccgtaccggaaggtgcggctggatcacctccttt

SEQ ID NO: 47 - DNA, 1528 bp, artificial sequence
  >GCF_000741685.1_01470 Bifidobacterium_catenulatum_group
tgtggagggttcgattctggctcaggatgaacgctggcggcgtgcttaacacatgcaagtcgaacgggatccatcaggctttgcttggtggtgagagtggcgaacgggtgagtaatgcgtgaccgacctgccccatacaccggaatagctcctggaaacgggtggtaatgccggatgctccgactcctcgcatgggggtgtcgggaaagatttcatcggtatgggatgggggtcgcgtcctatcaggtagtcggcggggtaacggcccaccgagcctacgacgggtagccggcctgagagggcgaccggccacattgggactgagatacggcccagactcctacgggaggcagcagtggggaatattgcacaatgggcgcaagcctgatgcagcgacgccgcgtgcgggatgacggccttcgggttgtaaaccgcttttgatcgggagcaagccttcgggtgagtgtacctttcgaataagcaccggctaactacgtgccagcagccgcggtaatacgtagggtgcaagcgttatccggaattattgggcgtaaagggctcgtaggcggttcgtcgcgtccggtgtgaaagtccatcgcttaacggtggatctgcgccgggtacgggcgggctggagtgcggtaggggagactggaattcccggtgtaacggtggaatgtgtagatatcgggaagaacaccaatggcgaaggcaggtctctgggccgttactgacgctgaggagcgaaagcgtggggagcgaacaggattagataccctggtagtccacgccgtaaacggtggatgctggatgtggggcccgttccacgggttccgtgtcggagctaacgcgttaagcatcccgcctggggagtacggccgcaaggctaaaactcaaagaaattgacgggggcccgcacaagcggcggagcatgcggattaattcgatgcaacgcgaagaaccttacctgggcttgacatgttcccgacagccgtagagatatggcctcccttcggggcgggttcacaggtggtgcatggtcgtcgtcagctcgtgtcgtgagatgttgggttaagtcccgcaacgagcgcaaccctcgccctgtgttgccagcacgtcatggtgggaactcacgggggaccgccggggtcaactcggaggaaggtggggatgacgtcagatcatcatgccccttacgtccagggcttcacgcatgctacaatggccggtacaacgggatgcgacacggcgacgtggagcggatccctgaaaaccggtctcagttcggattggagtctgcaacccgactccatgaaggcggagtcgctagtaatcgcggatcagcaacgccgcggtgaatgcgttcccgggccttgtacacaccgcccgtcaagtcatgaaagtgggtagcacccgaagccggtggcctaaccctttgtggatggagccgtctaaggtgagactcgtgattgggactaagtcgtaacaaggtagccgtaccggaaggtgcggctggatcacctccttt

SEQ ID NO: 48 - DNA, 1538 bp, artificial sequence
  >GCF_000741685.1_01606 Bifidobacterium_catenulatum_group
  misc_feature (133)..(133): n is a, c, g, or t
gggttcgattctggctcaggatgaacgctggcggcgtgcttaacacatgcaaggtcgaacgggagttccatcaggctttggcttggtggtgagagtggcgaacgggtgagtaatgcgtgaccgacctgccccnaatacaccgggaatagctcctggaaacgggtggtaatgccggagtgctccggaactccttcgcatggggtggtcgggaaagatttcgatcggtatgggatggggtcgcgtcctagtcaggtagtgcggcgggtaacggcccaccgagcctacgacgggtagccggcctgagagggcgaccggccacattgggactgagatacggcccagactcctacgggaggcagcagtggggaatattgcacaatgggcgcaagcctgatgcagcgacgccgcgtgcgggatgacggccttcgggttgtaaaccgcttttgatcgggagcaagccttcgggtgagtgtacctttcgaataagcaccggctaactacgtgccagcagccgcggtaatacgtagggtgcaagcgttatccggaattattgggcgtaaagggctcgtaggcggttcgtcgcgtccggtgtgaaagtccatcgcttaacggtggatctgcgccgggtacgggcgggctggagtgcggtagggggagactggaattcccggtgtaacggtggaatgtgtagatatcgggaagaacaccaatggcgaaggcaggtctctgggccgttactgacgctgaggagcgaaagcgtggggagcgaacaggattagataccctggtagtccacgccgtaaacggtggatgctggatgtggggcccgttccacgggttccgtgtcggagctaacgcgttaagcatcccgcctggggagtacggccgcaaggctaaaactcaaagaaattgacgggggcccgcacaagcggcggagcatgcggattaattcgatgcaacgcgaagaaccttacctgggcttgacatgttcccgacagccgtagagatatcggcctcccttcggggcgggttcacaggtggtgcatggtcgtcgtcagctcgtgtcgtgagatgttgggttaagtcccgcaacgagcgcaaccctcgccctgtgttgccagcacgtcatggtgggaactcacgggggaccgccggggtcaactcggaggaaggtggggatgacgtcagatcatcatgccccttacgtccagggcttcacgcatgctacaatggccggtacaacgggatgcgacacggcgacgtggagcggatccctgaaaaccggtctcagttcggattggagtctgcaacccgactccatgaaggcggagtcgctagtaatcgcggatcagcaacgccgcggtgaatgcgttcccgggccttgtacacaccgcccgtcaagtcatgaaagtgggtagcatcccgaagccggtggccgtaaccctttgtggatggagccgtctaaggtgagactcgtgattgggactaagtcgtaacaaggtagccgtaccggaaggtgcggctggatcacctccttt

SEQ ID NO: 49 - DNA, 1529 bp, artificial sequence
  >GCF_000765235.1_00962 Ruminococcaceae_NG18_sp1
tattgagagtttgatcctggctcaggacgaacgctggcggcgtgcttaacacatgcaagtcgaacgagaatctactgaaagagttttcggacaatggatgtagaggaaagtggcggacgggtgagtaacgcgtgaggaacctgccttgaagagggggacaacagttggaaacgactgctaataccgcatgatgcataggggtcgcatgatctttatgccaaagatttatcgcttcaagatggcctcgcgtctgattagctagttggcggggtaacggcccaccaaggcgacgatcagtagccggactgagaggttgaacggccacattgggactgagatacggcccagactcctacgggaggcagcagtggggaatattgggcaatgggcgcaagcctgacccagcaacgccgcgtgaaggaagaaggctttcgggttgtaaacttcttttaagagggaagagcagaagacggtacctctagaataagccacggctaactacgtgccagcagccgcggtaatacgtaggtggcaagcgttgtccggatttactgggtgtaaagggcgtgcagccgggtctgcaagtcagatgtgaaatccatgggctcaacccatgaactgcatttgaaactgtagatcttgagtgtcggaggggcaatcggaattcctagtgtagcggtgaaatgcgtagatattaggaggaacaccagtggcgaaggcggattgctggacgataactgacggtgaggcgcgaaagtgtggggagcaaacaggattagataccctggtagtccacactgtaaacgatgaatactaggtgtgcggggactgaccccctgcgtgccgcagtaaacacaataagtattccacctggggagtacgatcgcaaggttgaaactcaaaggaattgacgggggcccgcacaagcggtggattatgtggtttaattcgaagcaacgcgaagaaccttaccagggtttgacatcctgctaacgaagtagagatacattaggtgcccttcggggaaagcagagacaggtggtgcatggttgtcgtcagctcgtgtcgtgagatgttgggttaagtcccgcaacgagcgcaacccctattgttagttgctacgcaagagcactctagcgagactgccgttgacaaaacggaggaaggtggggacgacgtcaaatcatcatgccccttatatcctgggctacacacgtaatacaatggcggtcaacagagggaagcaaagccgcgaggcagagcaaacccccaaaagccgtcccagttcggattgtaggctgcaactcgcctgcatgaagtcggaatcgctagtaatcgcggatcagcatgccgcggtgaatacgttcccgggccttgtacacaccgcccgtcacaccatgagagtcgggaacacccgaagtccgtagcctaacctgaaaaggagggcgcggccgaaggtgggttcgataattggggtgaagtcgtaacaaggtagccgttcgagaacgagcggctggatcacctccttt

SEQ ID NO: 50 - DNA, 1518 bp, artificial sequence
  >GCF_000800455.1_01615 Bifidobacterium_catenulatum_group
tgtggagggttcgattctggctcaggatgaacgctggcggcgtgcttaacacatgcaagtcgaacgggatccatcaggctttgcttggtggtgagagtggcgaacgggtgagtaatgcgtgaccgacctgccccatacaccggaatagctcctggaaacgggtggtaatgcggatgctccagccttccgcatggtgggctgggaaagattctatcggtatgggatgggtcgcgtcctatcaggtagtcggcggggtaacggcccaccgagcctacgacgggtagccggcctgagaggcgaccggccacattgggactgagatacggcccagactcctacgggaggcagcagtggggaatattgcacaatggcgcaagcctgatgcagcgacgccgcgtgcgggatgacggccttcgggttgtaaaccgcttttgatcgggagcaagccttcgggtgagtgtacctttcgaataagcaccggctaactacgtgccagcagccgcggtaatacgtagggtgcaagcgttatccggaattattgggcgtaaagggctcgtaggcggttcgtcgcgtccggtgtgaaagtccatcgcttaacggtggatccgcgcgggtacgggcgggcttgagtgcggtaggggagactggaattcccggtgtaacggtggaatgtgtagatatcgggaagaacaccaatggcgaaggcaggtctctgggccgttactgacgctgaggagcgaaagcgtggggagcgaacaggattagataccctggtagtccacgccgtaaacggtggatgctggatgtgggcccgttccacgggttccgtgtcggagctaacgcgttaagcatcccgcctggggagtacggccgcaaggctaaaactcaaagaaatgacgggggcccgcacaagcggcggagcatgcggattaattcgatgcaacgcgaagaaccttacctgggcttgacatgttcccgaccgctccagagatggggcttcccttcgggcgggttcacaggtggtgcatggtcgtcgtcagctcgtgtcgtgagatgttgggttaagtcccgcaacgagcgcaaccctcgccctgtgttgccagcacatgatggtgggaactcacgggggaccgccggggtcaactcggaggaaggtgggatgacgtcagatcatcatgccccttacgtccagggcttcacgcatgctacaatggccggtacaacgggatgcgacacggcgacgtggagcggatccctgaaaaccggtctcagttcggattggagtctgcaacccgactccatgaaggcggagtcgctagtaatcgcggatcagcaacgccgcggtgaatgcgttcccgggccttgtacacaccgcccgtcaagtcatgaaagtgggtagcacccgaagccggtggcctaaccccttgtgggatggagccgtctaaggtgagactcgtgattgggactaagtcgtaacaaggtagccgtaccggaaggtgcggctggatcacctccttt

SEQ ID NO: 51 - DNA, 1526 bp, artificial sequence
  >GCF_000800455.1_01982 Bifidobacterium_catenulatum_group
tgtggagggttcgattctggctcaggatgaacgctggcggcgtgcttaacacatgcaagtcgaacgggatccatcaggctttgcttggtggtgagagtggcgaacgggtgagtaatgcgtgaccgacctgccccatacaccggaatagctcctggaaacgggtggtaatgccggatgctccagtccatcgcatggtggtctgggaaagcgttagcggtatgggatggggtcgcgtcctatcaggtagtcggcggggtaacggcccaccgagcctacgacgggtagccggcctgagagggcgaccggccacattgggactgagatacggcccagactcctacgggaggcagcagtggggaatattgcacaatgggcgcaagcctgatgcagcgacgccgcgtgcgggatgacggccttcgggttgtaaaccgcttttgatcgggagcaagccttcgggtgagtgtacctttcgaataagcaccggctaactacgtgccagcagccgcggtaatacgtagggtgcaagcgttatccggaattattgggcgtaaagggctcgtaggcggttcgtcgcgtccggtgtgaaagtccatcgcttaacggtggatccgcgccgggtacgggcgggcttgagtgcggtaggggagactggaattcccggtgtaacggtggaatgtgtagatatcgggaagaacaccaatggcgaaggcaggtctctgggccgttactgacgctgaggagcgaaagcgtggggagcgaacaggattagataccctggtagtccacgccgtaaacggtggatgctggatgtggggcccgttccacgggttccgtgtcggagctaacgcgttaagcatcccgcctggggagtacggccgcaaggctaaaactcaaagaaattgacgggggcccgcacaagcggcggagcatgcggattaattcgatgcaacgcgaagaaccttacctgggcttgacatgttcccgaccgctccagagatggggcttcccttcggggcgggttcacaggtggtgcatggtcgtcgtcagctcgtgtcgtgagatgttgggttaagtcccgcaacgagcgcaaccctcgccctgtgttgccagcacatgatggtgggaactcacgggggaccgccggggtcaactcggaggaaggtggggatgacgtcagatcatcatgccccttacgtccagggcttcacgcatgctacaatggccggtacaacgggatgcgacacggcgacgtggagcggatccctgaaaaccggtctcagttcggattggagtctgcaacccgactccatgaaggcggagtcgctagtaatcgcggatcagcaacgccgcggtgaatgcgttcccgggccttgtacacaccgcccgtcaagtcatgaaagtgggtagcacccgaagccggtggcctaaccccttgtgggatggagccgtctaaggtgagactcgtgattgggactaagtcgtaacaaggtagccgtaccggaaggtgcggctggatcacctccttt

SEQ ID NO: 52 - DNA, 1527 bp, artificial sequence
  >GCF_000800455.1_02036 Bifidobacterium_catenulatum_group
tgtggagggttcgattctggctcaggatgaacgctggcggcgtgcttaacacatgcaagtcgaacgggatccatcaggctttgcttggtggtgagagtggcgaacgggtgagtaatgcgtgaccgacctgccccatacaccggaatagctcctggaaacgggtggtaatgccggatgctccagccttccgcatggtgggctgggaaagattctatcggtatgggatggggtcgcgtcctatcaggtagtcggcggggtaacggcccaccgagcctacgacgggtagccggcctgagagggcgaccggccacattgggactgagatacggcccagactcctacgggaggcagcagtggggaatattgcacaatgggcgcaagcctgatgcagcgacgccgcgtgcgggatgacggccttcgggttgtaaaccgcttttgatcgggagcaagccttcgggtgagtgtacctttcgaataagcaccggctaactacgtgccagcagccgcggtaatacgtagggtgcaagcgttatccggaattattgggcgtaaagggctcgtaggcggttcgtcgcgtccggtgtgaaagtccatcgcttaacggtggatccgcgccgggtacgggcgggcttgagtgcggtaggggagactggaattcccggtgtaacggtggaatgtgtagatatcgggaagaacaccaatggcgaaggcaggtctctgggccgttactgacgctgaggagcgaaagcgtggggagcgaacaggattagataccctggtagtccacgccgtaaacggtggatgctggatgtggggcccgttccacgggttccgtgtcggagctaacgcgttaagcatcccgcctggggagtacggccgcaaggctaaaactcaaagaaattgacgggggcccgcacaagcggcggagcatgcggattaattcgatgcaacgcgaagaaccttacctgggcttgacatgttcccgaccgctccagagatggggcttcccttcggggcgggttcacaggtggtgcatggtcgtcgtcagctcgtgtcgtgagatgttgggttaagtcccgcaacgagcgcaaccctcgccctgtgttgccagcacatgatggtgggaactcacgggggaccgccggggtcaactcggaggaaggtggggatgacgtcagatcatcatgccccttacgtccagggcttcacgcatgctacaatggccggtacaacgggatgcgacacggcgacgtggagcggatccctgaaaaccggtctcagttcggattggagtctgcaacccgactccatgaaggcggagtcgctagtaatcgcggatcagcaacgccgcggtgaatgcgttcccgggccttgtacacaccgcccgtcaagtcatgaaagtgggtagcacccgaagccggtggcctaaccccttgtgggatggagccgtctaaggtgagactcgtgattgggactaagtcgtaacaaggtagccgtaccggaaggtgcggctggatcacctccttt

SEQ ID NO: 53 - DNA, 1529 bp, artificial sequence
  >GCF_001185345.1_03706 [Extibacter]_muris
cgagagtttgatcctggctcaggatgaacgctggcggcgtgcttaacacatgcaagtcgagcgaagcgctctgttcagatttcttcggaatgaagagcattgcgactgagcggcggacgggtgagtaacgcgtgggcaacctgcctcacacagggggataacagctagaaatggctgctaataccgcataaggctacagagccgcatggctcggtggcaaaagctccggcggtgtgagatgggcccgcgtctgattaggtagttggtggggcagaggcccaccaagccgacgatcagtagccgacctgagagggtgaccggccacattgggactgagacacggcccaaactcctacgggaggcagcagtggggaatattgcacaatgggggaaaccctgatgcagcgacgccgcgtgaaggatgaagtatttcggtatgtaaacttctatcagcagggaagaagatgacggtacctgactaagaagccccggctaactacgtgccagcagccgcggtaatacgtagggggcaagcgttatccggatttactgggtgtaaagggagcgtagacggcatggcaagtctggagtgaaagcccggggctcaaccccgggactgctttggaaactgccatgctagagtgtcggagaggcaagtggaattcctagtgtagcggtgaaatgcgtagatattaggaggaacaccagtggcgaaggcggcttgctggacgatgactgacgttgaggctcgaaagcgtggggagcaaacaggattagataccctggtagtccacgccgtaaacgatgattactaggtgtcgggaagcaaagcttctcggtgccgcagccaacgcaataagtaatccacctggggagtacgttcgcaagaatgaaactcaaaggaattgacggggacccgcacaagcggtggagcatgtggtttaattcgaagcaacgcgaagaaccttacctggtcttgacatcccaatggccggcacgtaacggtgcctttccttcgggacattggtgacaggtggtgcatggttgtcgtcagctcgtgtcgtgagatgttgggttaagtcccgcaacgagcgcaacccctatctttagtagccagcaggcaaggctgggcactctagagagactgccagggataacctggaggaaggtggggatgacgtcaaatcatcatgccccttatgaccagggctacacacgtgctacaatggcgtaaacaaagggaggcgaccccgcgagggcaagcgaatcccaaaaataacgtcccagttcggattgtagtctgcaacccgactacatgaagctggaatcgctagtaatcgcgaatcagaatgtcgcggtgaatacgttcccgggtcttgtacacaccgcccgtcacaccatgggagtcggtaacgcccgaagtcagtgacccaaccgcaaggagggagctgccgaaggtgggaccgataactggggtgaagtcgtaacaaggtagccgtatcggaaggtgcggctggatcacctccttt

SEQ ID NO: 54 - DNA, 1521 bp, artificial sequence
  >GCF_001405855.1_01268 Alistipes_onderdonkii
atggagagtttgatcctggctcaggatgaacgctagcggcaggcctaacacatgcaagtcgaggggcatcacgaggtagcaatactttggtggcgaccggcgcacgggtgcgtaacgcgtatgtaacctacctataacaggggcataacactgagaaattggtactaattccccataatattcggagaggcatctctccgggttgaaaactccggtggttatagatggacatgcgttgtattagctagttggtgaggtaacggctcaccaaggcaacgatacatagggggactgagaggttaaccccccacactggtactgagacacggaccagactcctacgggaggcagcagtgaggaatattggtcaatggacgcaagtctgaaccagccatgccgcgtgcaggaagacggctctatgagttgtaaactgcttttgtacgagggtaaactcacctacgtgtaggtgactgaaagtatcgtacgaataaggatcggctaactccgtgccagcagccgcggtaatacggaggattcaagcgttatccggatttattgggtttaaagggtgcgtaggcggtttgataagttagaggtgaaatcccggggcttaactccggaactgcctctaatactgttagactagagagtagttgcggtaggcggaatgtatggtgtagcggtgaaatgcttagagatcatacagaacaccgattgcgaaggcagcttaccaaactatatctgacgttgaggcacgaaagcgtggggagcaaacaggattagataccctggtagtccacgcagtaaacgatgataactcgttgtcggcgatacacagtcggtgactaagcgaaagcgataagttatccacctggggagtacgttcgcaagaatgaaactcaaaggaattgacgggggcccgcacaagcggaggaacatgtggtttaattcgatgatacgcgaggaaccttacccgggcttgaaagttactgacgattctggaaacaggatttccctttggggcaggaaactaggtgctgcatggttgtcgtcagctcgtgccgtgaggtgtcgggttaagtcccataacgagcgcaacccctaccgttagttgccatcaggtcaagctgggcactctggcgggactgccggtgtaagccgagaggaaggtggggatgacgtcaaatcagcacggcccttacgtccggggctacacacgtgttacaatggtaggtacagagggtcgctactccgtgaggagatgccaatctcgaaagcctatctcagttcggattggaggctgaaacccgcctccatgaagttggattcgctagtaatcgcgcatcagccatggcgcggtgaatacgttcccgggccttgtacacaccgcccgtcaagccatggaagctgggggtgcctgaagttcgtgaccgcaaggagcgacctagggcaaaaccggtaactggggctaagtcgtaacaaggtagccgtaccggaaggtgcggctggaacacctccttt

SEQ ID NO: 55 - DNA, 1547 bp, artificial sequence
  >GCF_001536305.1_01479 Leuconostoc_gelidum
attgagagtttgatcctggctcaggatgaacgctggcggcgtgcctaatacatgcaagtcgaacgcacagcgaaaggtgcttgcacctttcaagtgagtggcgaacgggtgagtaacacgtggataacctacctcaaggttggggataacatttggaaacagatgctaataccgaataaaacttagtatcgcatgataccaggttaaaaggcgctacggcgtcacctagagatggatccgcggtgcattagttagttggtggggtaaaggcttaccaagacaatgatgcatagccgagttgagagactgatcggccacattgggactgagacacggcccaaactcctacgggaggctgcagtagggaatcttccacaatgggcgaaagcctgatggagcaacgccgcgtgtgtgatgaaggctttcgggtcgtaaagcactgttgtatgggaagaacagctagagtagggaatgactttagtttgacggtaccataccagaaagggacggctaaatacgtgccagcagccgcggtaatacgtatgtcccgagcgttatccggatttattgggcgtaaagcgagcgcagacggttaattaagtctgatgtgaaagcccggagctcaactccggaaaggcattggaaactggttaacttgagtgcagtagaggtaagtggaactccatgtgtagcggtggaatgcgtagatatatggaagaacaccagcggcgaaggcggcttactggactgtaactgacgttgaggctcgaaagtgtgggtagcaaacaggattagataccctggtagtccacaccgtaaacgatgaacactaggtgttaggaggtttccgcctcttagtgccgaagctaacgcattaagtgttccgcctggggagtacgaccgcaaggttgaaactcaaaggaattgacggggacccgcacaagcggtggagcatgtggtttaattcgaagcaacgcgaagaaccttaccaggtcttgacatcctttgaagcttttagagatagaagtgttctcttcggagacaaagtgacaggtggtgcatggtcgtcgtcagctcgtgtcgtgagatgttgggttaagtcccgcaacgagcgcaacccttattgttagttgccagcattcagatgggcactctagcgagactgccggtgacaaaccggaggaaggcggggacgacgtcagatcatcatgccccttatgacctgggctacacacgtgctacaatggcgtatacaacgagttgccaacctgtgaaggtgagctaatctcttaaagtacgtctcagttcggactgcagtctgcaactcgactgcacgaagtcggaatcgctagtaatcgcggatcagcacgccgcggtgaatacgttcccgggtcttgtacacaccgcccgtcacaccatgggagtttgtaatgcccaaagccggtggcctaaccgtaaggagggaaccgtctaaggcaggacagatgactggggtgaagtcgtaacaaggtagccgtaggagaacctgcggctggatcacctccttt

SEQ ID NO: 56 - DNA, 1503 bp, artificial sequence
  >GCF_001643775.1_00392 Denitrobacterium_detoxificans
acggagagtttgatcctggctcaggatgaacgctggcggcgtgcctaacacatgcaagtcgaacgaataacccgccttcgggcggtcatagagtggcgaacgggtgagtaacacgtgaccaaccttccccccgcatggggataaccgggcgaaagcccggctaatacccaatactccgggccctccgcatggaggggccgggaaagcccaggcggcgggggatggggtcgcggcccattaggtagacggcggggtaacggcccaccgtgcccgcgatgggtagccggactgagaggtcgatcggccacattgggactgagatacggcccagactcctacgggaggcagcagtggggaattttgcgcaatgggggaaaccctgacgcagcaacgccgcgtgcgggatgaaggccctagggttgtaaaccgctttcagcagggaagaaacatgacggtacctgcagaagaagctccggctaactacgtgccagcagccgcggtaatacgtagggagcgagcgttatccggattcattgggcgtaaagcgcgcgtaggcggctggccaagcgggatctcaaatccgggggctcaacctccggccggatcccgaactggccggctcgagttcggtagaggaagacggaattcccagtgtagcggtgaaatgcgcagatattgggaagaacaccgatggcgaaggcagtcttctgggccgcgactgacgctgaggtgcgaaagccgggggagcgaacaggattagataccctggtagtcccggccgtaaacgatgggcactaggtgtgggggagcctttcctccgcgccgcagctaacgcattaagtgccccgcctggggagtacggccgcaaggctaaaactcaaaggaattgacgggggcccgcacaagcagcggagcatgtggcttaattcgaagcaacgcgaagaaccttaccagggcttgacatgcgggtgaagccggggaaacccggtggccgagaggagcccgcgcaggtggtgcatggctgtcgtcagctcgtgtcgtgagatgttgggttaagtcccgcaacgagcgcaacccctgccccatgttgccagcattaggttggggactcatgggggactgccggcgtcaagccggaggaaggtggggacgacgtcaagtcatcatgccccttatgccctgggccgcacacgtgctacaatggccggtacagagggctgccagaccgcgaggtcgagcgaatcccccaaagccggccccagttcggacaggaggctgcaacccgcctcctcgaagccggagttgctagtaatcgcggatcagcacgccgcggtgaatacgttcccgggccttgtacacaccgcccgtcacaccacccgagtcgtctgcacccgaagtccccggcccaacctcgtgagggaggggccgaaggtgtggagggtgaggggggtgaagtcgtaacaaggtagccgtaccggaaggtgcggctggatcacctccttt

SEQ ID NO: 57 - DNA, 1527 bp, artificial sequence
  >GCF_001686045.1_02038 Bifidobacterium_catenulatum_group
tgtggagggttcgattctggctcaggatgaacgctggcggcgtgcttaacacatgcaagtcgaacgggatccatcaggctttgcttggtggtgagagtggcgaacgggtgagtaatgcgtgaccgacctgccccatacaccggaatagctcctggaaacgggtggtaatgccggatgctccgactcctcgcatggggtgtcgggaaagatttcatcggtatgggatggggtcgcgtcctatcaggtagtcggcggggtaacggcccaccgagcctacgacgggtagccggcctgagagggcgaccggccacattgggactgagatacggcccagactcctacgggaggcagcagtggggaatattgcacaatgggcgcaagcctgatgcagcgacgccgcgtgcgggatgacggccttcgggttgtaaaccgcttttgatcgggagcaagccttcgggtgagtgtacctttcgaataagcaccggctaactacgtgccagcagccgcggtaatacgtagggtgcaagcgttatccggaattattgggcgtaaagggctcgtaggcggttcgtcgcgtccggtgtgaaagtccatcgcttaacggtggatctgcgccgggtacgggcgggctggagtgcggtaggggagactggaattcccggtgtaacggtggaatgtgtagatatcgggaagaacaccaatggcgaaggcaggtctctgggccgttactgacgctgaggagcgaaagcgtggggagcgaacaggattagataccctggtagtccacgccgtaaacggtggatgctggatgtggggcccgttccacgggttccgtgtcggagctaacgcgttaagcatcccgcctggggagtacggccgcaaggctaaaactcaaagaaattgacgggggcccgcacaagcggcggagcatgcggattaattcgatgcaacgcgaagaaccttacctgggcttgacatgttcccgacagccgtagagatatggcctcccttcggggcgggttcacaggtggtgcatggtcgtcgtcagctcgtgtcgtgagatgttgggttaagtcccgcaacgagcgcaaccctcgccctgtgttgccagcacgtcatggtgggaactcacgggggaccgccggggtcaactcggaggaaggtggggatgacgtcagatcatcatgccccttacgtccagggcttcacgcatgctacaatggccggtacaacgggatgcgacacggcgacgtggagcggatccctgaaaaccggtctcagttcggattggagtctgcaacccgactccatgaaggcggagtcgctagtaatcgcggatcagcaacgccgcggtgaatgcgttcccgggccttgtacacaccgcccgtcaagtcatgaaagtgggtagcacccgaagccggtggcctaacccttcttgggatggagccgtctaaggtgagactcgtgattgggactaagtcgtaacaaggtagccgtaccggaaggtgcggctggatcacctccttt

SEQ ID NO: 58 - DNA, 1527 bp, artificial sequence
  >GCF_001686065.1_01613 Bifidobacterium_catenulatum_group
tgtggagggttcgattctggctcaggatgaacgctggcggcgtgcttaacacatgcaagtcgaacgggatccatcaggctttgcttggtggtgagagtggcgaacgggtgagtaatgcgtgaccgacctgccccatacaccggaatagctcctggaaacgggtggtaatgccggatgctccgactcctcgcatggggtgtcgggaaagattatatcggtatgggatggggtcgcgtcctatcaggtagtcggcggggtaacggcccaccgagcctacgacgggtagccggcctgagagggcgaccggccacattgggactgagatacggcccagactcctacgggaggcagcagtggggaatattgcacaatgggcgcaagcctgatgcagcgacgccgcgtgcgggatgacggccttcgggttgtaaaccgcttttgatcgggagcaagccttcgggtgagtgtacctttcgaataagcaccggctaactacgtgccagcagccgcggtaatacgtagggtgcaagcgttatccggaattattgggcgtaaagggctcgtaggcggttcgtcgcgtccggtgtgaaagtccatcgcttaacggtggatctgcgccgggtacgggcgggctggagtgcggtaggggagactggaattcccggtgtaacggtggaatgtgtagatatcgggaagaacaccaatggcgaaggcaggtctctgggccgttactgacgctgaggagcgaaagcgtggggagcgaacaggattagataccctggtagtccacgccgtaaacggtggatgctggatgtggggcccgttccacgggttccgtgtcggagctaacgcgttaagcatcccgcctggggagtacggccgcaaggctaaaactcaaagaaattgacgggggcccgcacaagcggcggagcatgcggattaattcgatgcaacgcgaagaaccttacctgggcttgacatgttcccgacagccgtagagatatggcctcccttcggggcgggttcacaggtggtgcatggtcgtcgtcagctcgtgtcgtgagatgttgggttaagtcccgcaacgagcgcaaccctcgccctgtgttgccagcacgtcgtggtgggaactcacgggggaccgccggggtcaactcggaggaaggtggggatgacgtcagatcatcatgccccttacgtccagggcttcacgcatgctacaatggccggtacaacgggatgcgacacggcgacgtggagcggatccctgaaaaccggtctcagttcggattggagtctgcaacccgactccatgaaggcggagtcgctagtaatcgcggatcagcaacgccgcggtgaatgcgttcccgggccttgtacacaccgcccgtcaagtcatgaaagtgggtagcacccgaagccggtggcctaacccttcttgggatggagccgtctaaggtgagactcgtgattgggactaagtcgtaacaaggtagccgtaccggaaggtgcggctggatcacctccttt

SEQ ID NO: 59 - DNA, 1526 bp, artificial sequence
  >GCF_002075855.1_00202 Bifidobacterium_catenulatum_group
tgtggagggttcgattctggctcaggatgaacgctggcggcgtgcttaacacatgcaagtcgaacgggatccaggcagcttgctgcctggtgagagtggcgaacgggtgagtaatgcgtgaccgacctgccccatacaccggaatagctcctggaaacgggtggtaatgccggatgctccgactcctcgcatggggtgtcgggaaagattatatcggtatgggatggggtcgcgtcctatcaggtagtcggcggggtaacggcccaccgagcctacgacgggtagccggcctgagagggcgaccggccacattgggactgagatacggcccagactcctacgggaggcagcagtggggaatattgcacaatgggcgcaagcctgatgcagcgacgccgcgtgcgggatgacggccttcgggttgtaaaccgcttttgatcgggagcaagccttcgggtgagtgtacctttcgaataagcaccggctaactacgtgccagcagccgcggtaatacgtagggtgcaagcgttatccggaattattgggcgtaaagggctcgtaggcggttcgtcgcgtccggtgtgaaagtccatcgcttaacggtggatctgcgccgggtacgggcgggctggagtgcggtaggggagactggaattcccggtgtaacggtggaatgtgtagatatcgggaagaacaccaatggcgaaggcaggtctctgggccgttactgacgctgaggagcgaaagcgtggggagcgaacaggattagataccctggtagtccacgccgtaaacggtggatgctggatgtggggcccgttccacgggttccgtgtcggagctaacgcgttaagcatcccgcctggggagtacggccgcaaggctaaaactcaaagaaattgacgggggcccgcacaagcggcggagcatgcggattaattcgatgcaacgcgaagaaccttacctgggcttgacatgttcccgacagccgtagagatgcggcctcccttcggggcgggttcacaggtggtgcatggtcgtcgtcagctcgtgtcgtgagatgttgggttaagtcccgcaacgagcgcaaccctcgccctgtgttgccagcacgtcatggtgggaactcacgggggaccgccggggtcaactcggaggaaggtggggatgacgtcagatcatcatgccccttacgtccagggcttcacgcatgctacaatggccggtacaacgggatgcgacatggcgacatggagcggatccctgaaaaccggtctcagttcggattggagtctgcaacccgactccatgaaggcggagtcgctagtaatcgcggatcagcaacgccgcggtgaatgcgttcccgggccttgtacacaccgcccgtcaagtcatgaaagtgggtagcacccgaagccggtggcctaaccccttgtgggatggagccgtctaaggtgagactcgtgattgggactaagtcgtaacaaggtagccgtaccggaaggtgcggctggatcacctccttt

SEQ ID NO: 60 - DNA, 1525 bp, artificial sequence
  >GCF_002159215.1_01138 Alistipes_onderdonkii
atggagagtttgatcctggctcaggatgaacgctagcggcaggcctaacacatgcaagtcgaggggcatcgggattgaagcttgcttcaattgccggcgaccggcgcacgggtgcgtaacgcgtatgtaacctacctataacaggggcataacactgagaaattggtactaattccccataatattcggagaggcatctctccgggttgaaaactccggtggttatagatggacatgcgttgtattagctagttggtgaggtaacggctcaccaaggcaacgatacatagggggactgagaggttaaccccccacactggtactgagacacggaccagactcctacgggaggcagcagtgaggaatattggtcaatggacgcaagtctgaaccagccatgccgcgtgcaggaagacggctctatgagttgtaaactgcttttgtacgagggtaaactcacctacgtgtaggtgactgaaagtatcgtacgaataaggatcggctaactccgtgccagcagccgcggtaatacggaggattcaagcgttatccggatttattgggtttaaagggtgcgtaggcggtttgataagttagaggtgaaatcccggggcttaactccggaactgcctctaatactgttagactagagagtagttgcggtaggcggaatgtatggtgtagcggtgaaatgcttagagatcatacagaacaccgattgcgaaggcagcttaccaaactatatctgacgttgaggcacgaaagcgtggggagcaaacaggattagataccctggtagtccacgcagtaaacgatgataactcgttgtcggcgatacacagtcggtgactaagcgaaagcgataagttatccacctggggagtacgttcgcaagaatgaaactcaaaggaattgacgggggcccgcacaagcggaggaacatgtggtttaattcgatgatacgcgaggaaccttacccgggcttgaaagttactgacgattctggaaacaggatttcccttcggggcaggaaactaggtgctgcatggttgtcgtcagctcgtgccgtgaggtgtcgggttaagtcccataacgagcgcaacccctaccgttagttgccatcaggtcaagctgggcactctggcgggactgccggtgtaagccgagaggaaggtggggatgacgtcaaatcagcacggcccttacgtccggggctacacacgtgttacaatggtaggtacagagggtcgctaccccgcgaggggatgccaatctcgaaagcctatctcagttcggattggaggctgaaacccgcctccatgaagttggattcgctagtaatcgcgcatcagccatggcgcggtgaatacgttcccgggccttgtacacaccgcccgtcaagccatggaagctgggggtgcctgaagttcgtgaccgcaaggagcgacctagggcaaaaccggtaactggggctaagtcgtaacaaggtagccgtaccggaaggtgcggctggaacacctccttt

SEQ ID NO: 61 - DNA, 1513 bp, artificial sequence
  >GCF_002159845.1_03075 Anaeromassilibacillus_sp3
tttagagagtttgatcctggctcaggacgaacgctggcggcgtgcctaacacatgcaagtcgaacggacgagagggagcttgctccctcaagttagtggcggacgggtgagtaacgcgtgagtaacctgcctttcagaggggaataacattctgaaaagaatgctaataccgcataatgtcacagtatcgcatggtacagtgaccaaaggagcaatccgctgaaagatggactcgcgtccgattagctagttggcgggataaaggcccaccaaggcgacgatcggtagccggactgagaggttgatcggccacattgggactgagacacggcccagactcctacgggaggcagcagtgggggatattgcacaatgggggaaaccctgatgcagcaacgccgcgtgaaggaagaaggtcttcggattgtaaacttctgtcctcagggaagataatgacggtacctgaggaggaagctccggctaactacgtgccagcagccgcggtaatacgtagggagcgagcgttgtccggatttactgggtgtaaagggtgcgtaggcggatctgcaagtcagtagtgaaatcccagggcttaaccctggaactgctattgaaactgtgggtcttgagtgaggtagaggcaggcggaattcccggtgtagcggtgaaatgcgtagagatcgggaggaacaccagtggcgaaggcggcctgctgggccttaactgacgctgaggcacgaaagcatgggtagcaaacaggattagataccctggtagtccatgccgtaaacgatgattactaggtgtgggtggtctgaccccatccgtgccggagttaacacaataagtaatccacctggggagtacggccgcaaggttgaaactcaaaggaattgacgggggcccgcacaagcagtggagtatgtggtttaattcgaagcaacgcgaagaaccttaccaggtcttgacatcctgctaacgaggtagagatacgttaggtgcccttcggggaaagcagagacaggtggtgcatggttgtcgtcagctcgtgtcgtgagatgttgggttaagtcccgcaacgagcgcaacccctgctattagttgctacgcaagagcactctaataggactgccgttgacaaaacggaggaaggtggggacgacgtcaaatcatcatgccccttatgacctgggctacacacgtactacaatggccgtcaacagagagaagcaaaactgcgaagtggagcaaaactctaaaagcggtcccagttcggatcgtaggctgcaacccgcctacgtgaagttggaattgctagtaatcgcggatcatcatgccgcggtgaatacgttcccgggccttgtacacaccgcccgtcacaccatgggagccggtaatacccgaagtcagtagtctaaccgcaagggggacgctgccgaaggtaggattggcgactggggtgaagtcgtaacaaggtagccgtatcggaaggtgcggctggatcacctccttt

SEQ ID NO: 62 - DNA, 1388 bp, artificial sequence
  >GCF_002160765.1_02888 Marvinbryantia_sp8
ctgcctcatacagggggataacagttagaaatgactgctaataccgcataagcgcacggaatcgcatgattcagtgtgaaaagccgagacggtatgagatggacccgcgtctgattaggtagttggtgaggtaacggcccaccaagccgacgatcagtagccgacctgagagggtgaccggccacattgggactgagacacggcccaaactcctacgggaggcagcagtggggaatattgcacaatgggggaaaccctgatgcagcgacgccgcgtgaaggaagaagtatttcggtatgtaaacttctatcagcagggaagaaaatgacggtacctgactaagaagccccggctaactacgtgccagcagccgcggtaatacgtagggggcaagcgttatccggatttactgggtgtaaagggagcgtaggcggtctgacaagtcagaagtgaaagcccggggctcaacctcgggactgcttttgaaactgccggactagattgcaggagaggtaagtggaattcctagtgtagcggtgaaatgcgtagatattaggaggaacaccagtggcgaaggcggcttactggactgtaaatgacgctgaggctcgaaagcgtggggagcaaacaggattagataccctggtagtccacgccgtaaacgatgaatactaggtgtcagggagcaaagctctttggtgccgcagcaaacgcaataagtattccacctggggagtacgttcgcaagaatgaaactcaaaggaattgacggggacccgcacaagcggtggagcatgtggtttaattcgaagcaacgcgaagaaccttaccaagtcttgacatccctttgaccgcagagtaatgtctgcttcccttcggggcaaaggtgacaggtggtgcatggttgtcgtcagctcgtgtcgtgagatgttgggttaagtcccgcaacgagcgcaacccttaccttcagtagccagcggttcggccgggcactctggagggactgccagggataacctggaggaaggtggggatgacgtcaaatcatcatgccccttatgatttgggctacacacgtgctacaatggcgtaaacaaagggaagcgagagcgtgagcttaagcaaatctcaaaaataacgtctcagttcggattgtagtctgcaactcgactacatgaagctggaatcgctagtaatcgcgaatcagcatgtcgcggtgaatacgttcccgggtcttgtacacaccgcccgtcacaccatgggagttggaaacgcccgaagtcagtgacccaaccgcaaggagggagctgccgaaggcgggtctgataactggggtgaagtcgtaacaaggtagccgtatcggaaggtgcggctggatcacctccttt

SEQ ID NO: 63 - DNA, 1519 bp, artificial sequence
  >GCF_002161055.1_02107 Anaerotignum_sp2
tttaagagtttgatcctggctcaggatgaacgctggcggcgtgcttaacacatgcaagtcgagcggagttaattgaaagcttgcttttgattaacttagcggcggacgggtgagtaacgtgtgggcaacctgccctgtactgtggaataatcacttgaaaaggtgactaataccgcatgtggtccctggaaggcatctttcggggaagaaaggatttattcggtacaggatgggcccgcatctgattagctagttggtgagataacagcccaccaaggcgacgatcagtagccgacctgagagggtgatcggccacattgggactgagacacggcccaaactcctacgggaggcagcagtggggaatattgcacaatgggggaaaccctgatgcagcaacgccgcgtgaaggaagacggttttcggattgtaaacttctatcgatggggaagaaataaatgacggtacccaaataagaagccccggctaactacgtgccagcagccgcggtaatacgtagggggcaagcgttatccggaattactgggtgtaaagggagcgtaggcggcatggtaagtaagatgtgaaagccttgggcttaacctgaggattgcattttaaactatcaagctagagtacaggagaggaaagcggaattcctagtgtagcggtgaaatgcgtagatattaggaagaacaccggtggcgaaggcggctttctggactgaaactgacgctgaggctcgaaagcgtggggagcgaacaggattagataccctggtagtccacgccgtaaacgatgagtgctaggtgttggggaggaatcctcggtgccgcagttaacacaataagcactccacctggggagtacgaccgcaaggttgaaactcaaaggaattgacgggggcccgcacaagcggtggagcatgtggtttaattcgaagcaacgcgaagaaccttaccaaggcttgacatcccgatgaccgtctcagagatgagatttttcttcggaacatcggtgacaggtggtgcatggttgtcgtcagctcgtgtcgtgagatgttgggttaagtcccgcaacgagcgcaacccctatctttagtagccatcattcagttgggcactctagagagactgccgtggataacacggaggaaggtggggatgacgtcaaatcatcatgccccttatgtcttgggctacacacgtgctacaatggctggtaacagagtgaagcgagacggtgacgttaagcaaaacacaaaaacccagtcccagttcggattgtagtctgcaactcgactacatgaagctggaatcgctagtaatcgcgaatcagaatgtcgcggtgaatacgttcccgggccttgtacacaccgcccgtcacaccatgggagttggaagcacccgaagtcgatgacctaaccgcaaggagggagtcgccgaaggtgaagccagtgactggggtgaagtcgtaacaaggtagccgtatcggaaggtgcggctggatcacctccttt

SEQ ID NO: 64 - DNA, 1524 bp, artificial sequence
  >GCF_002271255.1_01235 Bifidobacterium_catenulatum_group
gtggagggttcgattctggctcaggatgaacgctggcggcgtgcttaacacatgcaagtcgaacgggatccatcaagcttgcttggtggtgagagtggcgaacgggtgagtaatgcgtgaccgacctgccccatacaccggaatagctcctggaaacgggtggtaatgccggatgctccgactcctcgcatggggtgtcgggaaagattatatcggtatgggatggggtcgcgtcctatcaggtagtcggcggggtaacggcccaccgagcctacgacgggtagccggcctgagagggcgaccggccacattgggactgagatacggcccagactcctacgggaggcagcagtggggaatattgcacaatgggcgcaagcctgatgcagcgacgccgcgtgagggatggaggccttcgggttgtaaacctcttttatcagggagcaaggcttcggttgagtgtacctgttgaataagcaccggctaactacgtgccagcagccgcggtaatacgtagggtgcaagcgttatccggaattattgggcgtaaagggctcgtaggcggttcgtcgcgtccggtgtgaaagtccatcgcttaacggtggatctgcgccgggtacgggcgggctggagtgcggtaggggagactggaattcccggtgtaacggtggaatgtgtagatatcgggaagaacaccaatggcgaaggcaggtctctgggccgttactgacgctgaggagcgaaagcgtggggagcgaacaggattagataccctggtagtccacgccgtaaacggtggatgctggatgtggggcccgttccacgggttccgtgtcggagctaacgcgttaagcatcccgcctggggagtacggccgcaaggctaaaactcaaagaaattgacgggggcccgcacaagcggcggagcatgcggattaattcgatgcaacgcgaagaaccttacctgggcttgacatgttcccgaccgcggcagagatgtcgtttcccttcggggcgggttcacaggtggtgcatggtcgtcgtcagctcgtgtcgtgagatgttgggttaagtcccgcaacgagcgcaaccctcgccctgtgttgccagcacgtcatggtgggaactcacgggggaccgccggggtcaactcggaggaaggtggggatgacgtcagatcatcatgccccttacgtccagggcttcacgcatgctacaatggccggtacaacgggatgcgacacggcgacgtggagcggatccctgaaaaccggtctcagttcggattggagtctgcaacccgactccatgaaggcggagtcgctagtaatcgcggatcagcaacgccgcggtgaatgcgttcccgggccttgtacacaccgcccgtcaagtcatgaaagtgggtagcacccgaagccggtggcctaaccctttgtggatggagccgtctaaggtgagactcgtgattgggactaagtcgtaacaaggtagccgtaccggaaggtgcggctggatcacctccttt

SEQ ID NO: 65 - DNA, 1526 bp, artificial sequence
  >GCF_002742425.1_01223 Bifidobacterium_catenulatum_group
tgtggagggttcgattctggctcaggatgaacgctggcggcgtgcttaacacatgcaagtcgaacgggatccatcaagcttgcttggtggtgagagtggcgaacgggtgagtaatgcgtgaccgacctgccccatacaccggaatagctcctggaaacgggtggtaatgccggatgctccgactcctcgcatggggtgtcgggaaagatttcatcggtatgggatggggtcgcgtcctatcaggtagtcggcggggtaacggcccaccgagcctacgacgggtagccggcctgagagggcgaccggccacattgggactgagatacggcccagactcctacgggaggcagcagtggggaatattgcacaatgggcgcaagcctgatgcagcgacgccgcgtgcgggatgacggccttcgggttgtaaaccgcttttgatcgggagcaagccttcgggtgagtgtacctttcgaataagcaccggctaactacgtgccagcagccgcggtaatacgtagggtgcaagcgttatccggaattattgggcgtaaagggctcgtaggcggttcgtcgcgtccggtgtgaaagtccatcgcttaacggtggatctgcgccgggtacgggcgggctggagtgcggtaggggagactggaattcccggtgtaacggtggaatgtgtagatatcgggaagaacaccaatggcgaaggcaggtctctgggccgttactgacgctgaggagcgaaagcgtggggagcgaacaggattagataccctggtagtccacgccgtaaacggtggatgctggatgtggggcccgttccacgggttccgtgtcggagctaacgcgttaagcatcccgcctggggagtacggccgcaaggctaaaactcaaagaaattgacgggggcccgcacaagcggcggagcatgcggattaattcgatgcaacgcgaagaaccttacctgggcttgacatgttcccgaccgctccagagatggggcttcccttcggggcgggttcacaggtggtgcatggtcgtcgtcagctcgtgtcgtgagatgttgggttaagtcccgcaacgagcgcaaccctcgccctgtgttgccagcgcgtcatggcgggaactcacgggggaccgccggggtcaactcggaggaaggtggggatgacgtcagatcatcatgccccttacgtccagggcttcacgcatgctacaatggccggtacaacgggatgcgacatggcgacatggagcggatccctgaaaaccggtctcagttcggattggagtctgcaacccgactccatgaaggcggagtcgctagtaatcgcggatcagcaacgccgcggtgaatgcgttcccgggccttgtacacaccgcccgtcaagtcatgaaagtgggtagcacccgaagccggtggcctaaccccttgtgggatggagccgtctaaggtgagactcgtgattgggactaagtcgtaacaaggtagccgtaccggaaggtgcggctggatcacctccttt

SEQ ID NO: 66 - DNA, 1526 bp, artificial sequence
  >GCF_002742445.1_00508 Bifidobacterium_catenulatum_group
tgtggagggttcgattctggctcaggatgaacgctggcggcgtgcttaacacatgcaagtcgaacgggatccaggcagcttgctgcctggtgagagtggcgaacgggtgagtaatgcgtgaccgacctgccccatacaccggaatagctcctggaaacgggtggtaatgccggatgctccgactcctcgcatggggtgtcgggaaagattatatcggtatgggatggggtcgcgtcctatcaggtagtcggcggggtaacggcccaccgagcctacgacgggtagccggcctgagagggcgaccggccacattgggactgagatacggcccagactcctacgggaggcagcagtggggaatattgcacaatgggcgcaagcctgatgcagcgacgccgcgtgcgggatgacggccttcgggttgtaaaccgcttttgatcgggagcaagccttcgggtgagtgtacctttcgaataagcaccggctaactacgtgccagcagccgcggtaatacgtagggtgcaagcgttatccggaattattgggcgtaaagggctcgtaggcggttcgtcgcgtccggtgtgaaagtccatcgcttaacggtggatctgcgccgggtacgggcgggctggagtgcggtaggggagactggaattcccggtgtaacggtggaatgtgtagatatcgggaagaacaccaatggcgaaggcaggtctctgggccgttactgacgctgaggagcgaaagcgtggggagcgaacaggattagataccctggtagtccacgccgtaaacggtggatgctggatgtggggcccgttccacgggttccgtgtcggagctaacgcgttaagcatcccgcctggggagtacggccgcaaggctaaaactcaaagaaattgacgggggcccgcacaagcggcggagcatgcggattaattcgatgcaacgcgaagaaccttacctgggcttgacatgttcccgaccgctccagagatggggcttcccttcggggcgggttcacaggtggtgcatggtcgtcgtcagctcgtgtcgtgagatgttgggttaagtcccgcaacgagcgcaaccctcgccctgtgttgccagcgcgtcatggcgggaactcacgggggaccgccggggtcaactcggaggaaggtggggatgacgtcagatcatcatgccccttacgtccagggcttcacgcatgctacaatggccggtacaacgggatgcgacatggcgacatggagcggatccctgaaaaccggtctcagttcggattggagtctgcaacccgactccatgaaggcggagtcgctagtaatcgcggatcagcaacgccgcggtgaatgcgttcccgggccttgtacacaccgcccgtcaagtcatgaaagtgggtagcacccgaagccggtggcctaaccccttgcgggatggagccgtctaaggtgagactcgtgattgggactaagtcgtaacaaggtagccgtaccggaaggtgcggctggatcacctccttt

SEQ ID NO: 67 - DNA, 1531 bp, artificial sequence
  >GCF_003315195.1_02461 Sutterella_wadsworthensis
taaagagtttgatcctggctcagattgaacgctggcggcatgctttacacatgcaagtcgaacggcagcgcggggagcttgctccctggcggcgagtggcgcacgggtgagtaatacatcggaacgtgtcttctagtgggggataactgcccgaaagggcagctaataccgcatgagacctgagggtgaaagcgggggatcgcaagacctcgcgctggaagagcggccgatgtccgattagctagttggtgaggtaaaggctcaccaaggcgacgatcggtagctggtctgagaggacgaccagccacactgggactgagacacggcccagactcctacgggaggcagcagtggggaattttggacaatgggggcaaccctgatccagccatgccgcgtgcaggatgaaggtcttcggattgtaaactgcttttgtcagggacgaaaagggatgcgataacaccgcattccgctgacggtacctgaagaataagcaccggctaactacgtgccagcagccgcggtaatacgtagggtgcaagcgttaatcggaattactgggcgtaaagcgtgcgcaggcggttctgtaagatagatgtgaaatccccgggctcaacctgggaattgcatatatgactgcaggacttgagtttgtcagaggagggtggaattccacgtgtagcagtgaaatgcgtagatatgtggaagaacaccgatggcgaaggcagccctctgggacatgactgacgctcatgcacgaaagcgtggggagcaaacaggattagataccctggtagtccacgccctaaacgatgtctactagttgttggggacgatagtccttggtaacgcagctaacgcgtgaagtagaccgcctggggagtacggtcgcaagattaaaactcaaaggaattgacggggacccgcacaagcggtggatgatgtggattaattcgatgcaacgcgaaaaaccttacctagccttgacatgccaggaaggcctgagagatcaggccgtgcccgcaagggaatctggacacaggtgctgcatggctgtcgtcagctcgtgtcgtgagatgttgggttaagtcccgcaacgagcgcaacccttgtcattagttgctacgaaagggcactctaatgagactgccggtgacaaaccggaggaaggtggggatgacgtcaagtcctcatggcccttatggctagggcctcacacgtcatacaatggtcggaacagagggaagcgaagccgcgaggtgaagccaatcccagaaaaccgatcgtagtccggattgcagtctgcaactcgactgcatgaagtcggaatcgctagtaatcgcggatcagcatgccgcggtgaatacgttcccgggtcttgtacacaccgcccgtcacaccatgggagtggggttcaccagaagacgtttgcccaaccgaaaggaaggcggcgtccacggtgggcttcatgactggggtgaagtcgtaacaaggtagccgtaccggaaggtgcggctggatcacctccttt

SEQ ID NO: 68 - DNA, 1504 bp, artificial sequence
  >GCF_003340305.1_01468 [Adlercreutzia]_equolifaciens_group
cggagagtttgatcctggctcaggatgaacgctggcggcgtgcttaacacatgcaagtcgaacgattaagacggcttcggccgtgtatagagtggcgaacgggtgagtaacacgtgaccaacctgccccgcgctccgggacaaccgctggaaacggcggctaataccggatgctccggggaggccccatggcctccccgggaaagccttaacggcgcgggatggggtcgcggcccattaggtagacggcggggtaacggcccaccgtgcccgcgatgggtagccggactgagaggtcgaccggccacattgggactgagatacggcccagactcctacgggaggcagcagtggggaattttgcgcaatggggggaaccctgacgcagcaacgccgcgtgcgggacgaaggccttcgggttgtaaaccgctttcagcagggaagacatagacggtacctgcagaagaagctccggctaactacgtgccagcagccgcggtaatacgtagggggcgagcgttatccggattcattgggcgtaaagcgcgcgtaggcggccgcctaagcggaacctctaatcccggggctcaacctcgggccgggttccggactgggcggctcgagtgcggtagaggcaggcggaattcccggtgtagcggtggaatgcgcagatatcgggaagaacaccgatggcgaaggcagcctgctgggccgccactgacgctgaggcgcgaaagctgggggagcgaacaggattagataccctggtagtcccagccgtaaacgatggacgctaggtgtggggggaccatccccccgtgccgcagccaacgcattaagcgtcccgcctggggagtacggccgcaaggctaaaactcaaaggaattgacgggggcccgcacaagcagcggagcatgtggcttaattcgaagcaacgcgaagaaccttaccagggcttgacatgcgagtgaagccgcggagacgcggtggccgagaggagctcgcgcaggtggtgcatggctgtcgtcagctcgtgtcgtgagatgttgggttaagtcccgcaacgagcgcaacccccgtcccgtgttgccagcattgagttggggactcgcgggagactgccggcgtcaagccggaggaaggtggggacgacgtcaagtcatcatgccccttatgccctgggctgcacacgtgctacaatggccggtacagagggttgccaccccgcgagggggagcggatcccggaaagccggtcccagttcggatcgcaggctgcaacccgcctgcgtgaagtcggagttgctagtaatcgcggatcagcatgccgcggtgaatacgttcccgggccttgtacacaccgcccgtcacaccacccgagtcgtctgcacccgaagccgccggccgaacccttctggggcggaggcgtcgaaggtgtggagggtaaggggggtgaagtcgtaacaaggtagccgtaccggaaggtgcggctggatcacctccttt

SEQ ID NO: 69 - DNA, 991 bp, artificial sequence
  >GCF_003425665.1_01725 Ruminococcaceae_NG15_sp3
tattgagagtttgatcctggctcaggatgaacgctggcggcgtgcttaacacatgcaagtcgaacggaggacccttgacggagttttcggacaacggataggaatccttagtggcggacgggtgagtaacgcgtgaggaacctgccttggagaggggaataacacagagaaatttgtgctaataccgcatgatgcagttgggtcgcatggctctgactgccaaagatttatcgctctgagatggcctcgcgtctgattagctagttggcagggtaacggcctaccaaggcgacgatcagtagccggactgagaggttgaccggccacattgggactgagacacggcccagactcctacgggaggcagcagtggggaatattgggcaatgggcgcaagcctgacccagcaacgccgcgtgaaggaagaaggctttcgggttgtaaacttcttttatgagggacgaaggaagtgacggtacctcatgaataagctccggctaactacgtgccagcagccgcggtaatacgtagggagcgagcgttatccggatttactgggtgtaaagggcgtgtaggcggggaagcaagtcagatgtgaaaaccagtggctcaaccactggcctgcatttgaaactgtttttcttgagtgatggagaggcaggcggaattccgtgtgtagcggtgaaatgcgtagatatacggaggaacaccagtggcgaaggcggcctgctggacattaactgacgctgaggcgcgaaagcgtggggagcaaacaggattagataccctggtagtccacgctgtaaacgatggatactaggtgtggggggactgaccccttccgtgccgcagttaacacaataagtatcccacctggggagtacgatcgcaaggttgaaactcaaaggaattgacgggggcccgcacaagcggtggagtatgtggtttaattcgaagcaacgcgaagaaccttaccagggcttgacatccc

SEQ ID NO: 70 - DNA, 1504 bp, artificial sequence
  >GCF_003428485.1_02231 [Adlercreutzia]_equolifaciens_group
cggagagtttgatcctggctcaggatgaacgctggcggcgtgcttaacacatgcaagtcgaacgattaagacggcttcggccgtgtatagagtggcgaacgggtgagtaacacgtgaccaacctgccccgcgctccgggacaaccgctggaaacggcggctaataccggatgctccggggaggccccatggcctccccgggaaagccccgacggcgcgggatggggtcgcggcccattaggtagacggcggggtaacggcccaccgtgcccgcgatgggtagccggactgagaggtcgaccggccacattgggactgagatacggcccagactcctacgggaggcagcagtggggaattttgcgcaatggggggaaccctgacgcagcaacgccgcgtgcgggacgaaggccttcgggttgtaaaccgctttcagcagggaagacatagacggtacctgcagaagaagctccggctaactacgtgccagcagccgcggtaatacgtagggggcgagcgttatccggattcattgggcgtaaagcgcgcgtaggcggccgcctaagcggaacctctaatcccggggctcaacctcgggccgggttccggactgggcggctcgagtgcggtagaggcaggcggaattcccggtgtagcggtggaatgcgcagatatcgggaagaacaccgatggcgaaggcagcctgctgggccgccactgacgctgaggcgcgaaagctgggggagcgaacaggattagataccctggtagtcccagccgtaaacgatggacgctaggtgtggggggaccatccccccgtgccgcagccaacgcattaagcgtcccgcctggggagtacggccgcaaggctaaaactcaaaggaattgacgggggcccgcacaagcagcggagcatgtggcttaattcgaagcaacgcgaagaaccttaccagggcttgacatgcgagtgaagccgcggagacgcggtggccgagaggagctcgcgcaggtggtgcatggctgtcgtcagctcgtgtcgtgagatgttgggttaagtcccgcaacgagcgcaacccccgtcccgtgttgccagcattcagttggggactcgcgggagactgccggcgtcaagccggaggaaggtggggacgacgtcaagtcatcatgccccttatgccctgggctgcacacgtgctacaatggccggtacagagggttgccaccccgcgagggggagcggatcccggaaagccggtcccagttcggatcgcaggctgcaacccgcctgcgtgaagtcggagttgctagtaatcgcggatcagcatgccgcggtgaatacgttcccgggccttgtacacaccgcccgtcacaccacccgagtcgtctgcacccgaagccgccggccgaacccttctggggcggaggcgtcgaaggtgtggagggtaaggggggtgaagtcgtaacaaggtagccgtaccggaaggtgcggctggatcacctccttt

SEQ ID NO: 71 - DNA, 1511 bp, artificial sequence
  >GCF_003433795.1_02330 Harryflintia_acetispora
ctaaagagtttgatcctggctcaggacgaacgctggcggcgcgcctaacacatgcaagtcgaacggagaaatgctgagcttgctttgcattttttagtggcggacgggtgagtaacacgtgagcaacctgcctttgtgaggggaataacgtctggaaacggacgctaataccgcataacgtcaaggaaccgcatggttttttgaccaaagattttatcgcacaaagatgggctcgcggctgattagctagttggcggggtaacggcccaccaaggcgacgatcagtagccggactgagaggttgatcggccacattgggactgagacacggcccagactcctacgggaggcagcagtgggggatattgcacaatgggggaaaccctgatgcagcgacgccgcgtgagggaagacggttttcggattgtaaacctctgtcttcagggacgaaatcaatgacggtacctgaggaggaagccacggctaactacgtgccagcagccgcggtaatacgtaggtggcaagcgttgtccggaattactgggtgtaaagggagcgtaggcgggaatgcaagttgaatgtttaaactatcggctcaactgataatcgcgttcaaaactgcatttcttgagtggagtagaggcaggcggaattcctagtgtagcggtgaaatgcgtagatattaggaggaacaccagtggcgaaggcggcctgctgggctctaactgacgctgaggctcgaaagcgtgggtagcaaacaggattagataccctggtagtccacgccgtaaacgatgattactaggtgtggggggactgaccccttccgtgccggagttaacacaataagtaatccacctggggagtacggtcgcaagactgaaactcaaaggaattgacgggggcccgcacaagcagtggagtatgtggtttaattcgaagcaacgcgaagaaccttaccaggtcttgacatcgtgcgcataccgtagagatacgggaagtccttcgggacgcatagacaggtggtgcatggttgtcgtcagctcgtgtcgtgagatgttgggttaagtcccgcaacgagcgcaacccttattattagttgctacgcaagagcactctaatgagactgccgttgacaaaacggaggaaggtggggatgacgtcaaatcatcatgccccttatgacctgggctacacacgtactacaatggcacttaacagagggaagcaagaccgcgaggtggagcaaacccccaaaaagtgtctcagttcggattgcaggctgcaacccgcctgtatgaagtcggaattgctagtaatcgcggatcagcatgccgcggtgaatacgttcccgggccttgtacacaccgcccgtcacaccatgagagccggtaacacccgaagtcagtagcctaaccgcaaggagggcgctgccgaaggtgggattggtgattagggtgaagtcgtaacaaggtagccgtatcggaaggtgcggctggatcacctccttt

SEQ ID NO: 72 - DNA, 1517 bp, artificial sequence
  >GCF_003435385.1_02088 Anaerofustis_stercorihominis
ttttgagagtttgatcctggctcaggacgaacgctggcggcgtgcttaacacatgcaagtcgaacgagaagcttataaatgatccttcgggtgaagctataagcggacagtggcgaacgggtgagtaacgcgtaggtaaccaacctcatgcagggggatagcccagggaaacttggattaaacccgcataagaccacagcaccgcatggtgcaggggtaaaaactccggtggcatgagacggacctgcgtcttattaggtagttggtgaggtaacggctcaccaagccaacgatgagtagccgacctgagagggtgatcggccacattgggactgagacacggcccagactcctacgggaggcagcagtggggaatattgcgcaatgggggaaaccctgacgcagcaacgccgcgtgagcgatgaaggttttcggatcgtaaagctctgtctttggggaagataatgacggtacccaaggaggaagctccggctaactacgtgccagcagccgcggtaatacgtagggagcaagcgttgtccggattcactgggcgtaaagagcacgtaggcggttaattaagtcaggtgtgaaagttttcggctcaaccggaaaagtgcacttgaaactggataacttgagtatcggagaggtaagcggaattcctagtgtagcggtgaaatgcgtagagattaggaagaacaccggtggcgaaggcggcttactggacgataactgacgctgaggtgcgaaagcgtggggagcgaacaggattagataccctggtagtccacgccgtaaacgatgaatactaggtgttggggtaactcagtgccgcagttaacacattaagtattccgcctggggagtacgctcgcaagagtgaaactcaaaggaattgacgggggcccgcacaagcagcggagcatgtggtttaattcgaagcaacgcgaagaaccttaccaggtcttgacatcccttgaccgcctaagagattaggctttccttcgggacaaggagacaggtggtgcatggttgtcgtcagctcgtgtcgtgagatgttgggttaagtcccgcaacgagcgcaacccttatgtttagttactaacattcagttgaggactctagacagactgcccttgaaagagggaggaaggtggggacgacgtcaaatcatcatgccccttacgacctgggctacacacgtgctacaatggtctgtacagagggttgcgaagcagtgatgctaagctaatctcaaaaagcagatctcagttcggattgcaggctgcaactcgcctgcatgaagtcggagttgctagtaatcgcgaatcagaatgtcgcggtgaatgcgttcccgggccttgtacacaccgcccgtcacaccacgagagttggtaacacccgaagccagtgagctaaccattaggaggcagctgtcgaaggtgggatcagtaattggggtgaagtcgtaacaaggtagccgtatcggaaggtgcggctggatcacctccttt

SEQ ID NO: 73 - DNA, 1528 bp, artificial sequence
  >GCF_003436215.1_00798 Blautia_wexlerae
tcagagagtttgatcctggctcaggatgaacgctggcggcgtgcttaacacatgcaagtcgaacgggaaatacttcattgagacttcggtggatttgatttatttctagtggcggacgggtgagtaacgcgtgggtaacctgccttatacagggggataacagtcagaaatgactgctaataccgcataagcgcacaggaccgcatggtccggtgtgaaaaactccggtggtataagatggacccgcgttggattagcttgttggtggggtaacggcccaccaaggcgacgatccatagccggcctgagagggtgaacggccacattgggactgagacacggcccagactcctacgggaggcagcagtggggaatattgcacaatgggggaaaccctgatgcagcgacgccgcgtgaaggaagaagtatctcggtatgtaaacttctatcagcagggaagatagtgacggtacctgactaagaagccccggctaactacgtgccagcagccgcggtaatacgtagggggcaagcgttatccggatttactgggtgtaaagggagcgtagacggtgtggcaagtctgatgtgaaaggcatgggctcaacctgtggactgcattggaaactgtcatacttgagtgccggaggggtaagcggaattcctagtgtagcggtgaaatgcgtagatattaggaggaacaccagtggcgaaggcggcttactggacggtaactgacgttgaggctcgaaagcgtggggagcaaacaggattagataccctggtagtccacgccgtaaacgatgaatactaggtgtcgggtggcatggccattcggtgccgtcgcaaacgcagtaagtattccacctggggagtacgttcgcaagaatgaaactcaaaggaattgacggggacccgcacaagcggtggagcatgtggtttaattcgaagcaacgcgaagaaccttaccaagtcttgacatccctctgaccgactcttaaccgagtctttccttcgggacagaggagacaggtggtgcatggttgtcgtcagctcgtgtcgtgagatgttgggttaagtcccgcaacgagcgcaacccctatcctcagtagccagcaagttaagttgggcactctgtggagactgccagggataacctggaggaaggcggggatgacgtcaaatcatcatgccccttatgatttgggctacacacgtgctacaatggcgtaaacaaagggaagcgagattgtgagatggagcaaatcccaaaaataacgtcccagttcggactgtagtctgcaacccgactacacgaagctggaatcgctagtaatcgcggatcagaatgccgcggtgaatacgttcccgggtcttgtacacaccgcccgtcacaccatgggagtcagtaacgcccgaagtcagtgacctaactgcaaagaaggagctgccgaaggcgggaccgatgactggggtgaagtcgtaacaaggtagccgtatcggaaggtgcggctggatcacctccttt

SEQ ID NO: 74 - DNA, 1524 bp, artificial sequence
  >GCF_003436545.1_01375 Bifidobacterium_catenulatum_group
tgtggagggttcgattctggctcaggatgaacgctggcggcgtgcttaacacatgcaagtcgaacgggatccatcaagcttgcttggtggtgagagtggcgaacgggtgagtaatgcgtgaccgacctgccccatacaccggaatagctcctggaaacgggtggtaatgccggatgctccgactcctcgcatggggtgtcgggaaagatttcatcggtatgggatggggtcgcgtcctatcaggtagtcggcggggtaacggcccaccgagcctacgacgggtagccggcctgagagggcgaccggccacattgggactgagatacggcccagactcctacgggaggcagcagtggggaatattgcacaatgggcgcaagcctgatgcagcgacgccgcgtgcgggatgacggccttcgggttgtaaaccgcttttgatcgggagcaagccttcgggtgagtgtacctttcgaataagcaccggctaactacgtgccagcagccgcggtaatacgtagggtgcaagcgttatccggaattattgggcgtaaagggctcgtaggcggttcgtcgcgtccggtgtgaaagtccatcgcttaacggtggatctgcgccgggtacgggcgggctggagtgcggtaggggagactggaattcccggtgtaacggtggaatgtgtagatatcgggaagaacaccaatggcgaaggcaggtctctgggccgttactgacgctgaggagcgaaagcgtggggagcgaacaggattagataccctggtagtccacgccgtaaacggtggatgctggatgtggggcccgttccacgggttccgtgtcggagctaacgcgttaagcatcccgcctggggagtacggccgcaaggctaaaactcaaagaaattgacgggggcccgcacaagcggcggagcatgcggattaattcgatgcaacgcgaagaaccttacctgggcttgacatgttcccgacagccgtagagatatggcctcccttcggggcgggttcacaggtggtgcatggtcgtcgtcagctcgtgtcgtgagatgttgggttaagtcccgcaacgagcgcaaccctcgccctgtgttgccagcacgtcatggtgggaactcacgggggaccgccggggtcaactcggaggaaggtggggatgacgtcagatcatcatgccccttacgtccagggcttcacgcatgctacaatggccggtacaacgggatgcgacacggcgacgtggagcggatccctgaaaaccggtctcagttcggattggagtctgcaacccgactccatgaaggcggagtcgctagtaatcgcggatcagcaacgccgcggtgaatgcgttcccgggccttgtacacaccgcccgtcaagtcatgaaagtgggtagcacccgaagccggtggcctaacctttttggatggagccgtctaaggtgagactcgtgattgggactaagtcgtaacaaggtagccgtaccggaaggtgcggctggatcacctccttt

SEQ ID NO: 75 - DNA, 1526 bp, artificial sequence
  >GCF_003460425.1_00727 Bifidobacterium_catenulatum_group
tgtggagggttcgattctggctcaggatgaacgctggcggcgtgcttaacacatgcaagtcgaacgggatccatcaggctttgcttggtggtgagagtggcgaacgggtgagtaatgcgtgaccgacctgccccatacaccggaatagctcctggaaacgggtggtaatgccggatgctccgactcctcgcatggggtgtcgggaaagatttcatcggtatgggatggggtcgcgtcctatcaggtagtcggcggggtaacggcccaccgagcctacgacgggtagccggcctgagagggcgaccggccacattgggactgagatacggcccagactcctacgggaggcagcagtggggaatattgcacaatgggcgcaagcctgatgcagcgacgccgcgtgcgggatgacggccttcgggttgtaaaccgcttttgatcgggagcaagccttcgggtgagtgtacctttcgaataagcaccggctaactacgtgccagcagccgcggtaatacgtagggtgcaagcgttatccggaattattgggcgtaaagggctcgtaggcggttcgtcgcgtccggtgtgaaagtccatcgcttaacggtggatctgcgccgggtacgggcgggctggagtgcggtaggggagactggaattcccggtgtaacggtggaatgtgtagatatcgggaagaacaccaatggcgaaggcaggtctctgggccgttactgacgctgaggagcgaaagcgtggggagcgaacaggattagataccctggtagtccacgccgtaaacggtggatgctggatgtggggcccgttccacgggttccgtgtcggagctaacgcgttaagcatcccgcctggggagtacggccgcaaggctaaaactcaaagaaattgacgggggcccgcacaagcggcggagcatgcggattaattcgatgcaacgcgaagaaccttacctgggcttgacatgttcccgacagccgtagagatatggcctcccttcggggcgggttcacaggtggtgcatggtcgtcgtcagctcgtgtcgtgagatgttgggttaagtcccgcaacgagcgcaaccctcgccctgtgttgccagcacgtcatggtgggaactcacgggggaccgccggggtcaactcggaggaaggtggggatgacgtcagatcatcatgccccttacgtccagggcttcacgcatgctacaatggccggtacaacgggatgcgacacggcgacgtggagcggatccctgaaaaccggtctcagttcggattggagtctgcaacccgactccatgaaggcggagtcgctagtaatcgcggatcagcaacgccgcggtgaatgcgttcccgggccttgtacacaccgcccgtcaagtcatgaaagtgggtagcacccgaagccggtggcctaaccctttgtggatggagccgtctaaggtgagactcgtgattgggactaagtcgtaacaaggtagccgtaccggaaggtgcggctggatcacctccttt

SEQ ID NO: 76 - DNA, 1521 bp, artificial sequence
  >GCF_003461645.1_02517 Alistipes_shahii
atggagagtttgatcctggctcaggatgaacgctagcggcaggcctaacacatgcaagtcgaggggcagcacggtgtagcaatacactggtggcgaccggcgcacgggtgcgtaacgcgtatgcaacctacccataacagggggataacactgagaaattggtactaataccccataacatcaggaccggcatcggttctggttgaaaactccggtggttatggatgggcatgcgttgtattagctggttggtgaggtaacggctcaccaaggcaacgatacatagggggactgagaggttaaccccccacattggtactgagacacggaccaaactcctacgggaggcagcagtgaggaatattggtcaatggacgcaagtctgaaccagccatgccgcgtgcaggaagacggctctatgagttgtaaactgcttttgtacgagagtaaacgctcttacgtgtaagagcctgaaagtatcgtacgaataaggatcggctaactccgtgccagcagccgcggtaatacggaggatccaagcgttatccggatttattgggtttaaagggtgcgtaggcggtttgataagttagaggtgaaataccggtgcttaacaccggaactgcctctaatactgttgaactagagagtagttgcggtaggcggaatgtatggtgtagcggtgaaatgcttagagatcatacagaacaccgattgcgaaggcagcttaccaaactatatctgacgttgaggcacgaaagcgtggggagcaaacaggattagataccctggtagtccacgcagtaaacgatgataactcgctgtcggcgatacacagtcggcggctaagcgaaagcgataagttatccacctggggagtacgttcgcaagaatgaaactcaaaggaattgacgggggcccgcacaagcggaggaacatgtggtttaattcgatgatacgcgaggaaccttacccgggcttgaaagttactgacgattctggaaacaggatttcccttcggggcaggaaactaggtgctgcatggttgtcgtcagctcgtgccgtgaggtgtcgggttaagtcccataacgagcgcaacccctaccgttagttgccatcaggtcaagctgggcactctggcgggactgccggtgtaagccgagaggaaggtggggatgacgtcaaatcagcacggcccttacgtccggggctacacacgtgttacaatggtaggtacagagggcagctacccagtgatgggatgcgaatctcgaaagcctatctcagttcggatcggaggctgaaacccgcctccgtgaagttggattcgctagtaatcgcgcatcagccatggcgcggtgaatacgttcccgggccttgtacacaccgcccgtcaagccatggaagctgggggtgcctgaagttcgtgaccgcaaggagcgacctagggcaaaaccggtgactggggctaagtcgtaacaaggtagccgtaccggaaggtgcggctggaacacctccttt

SEQ ID NO: 77 - DNA, 1528 bp, artificial sequence
  >GCF_003464355.1_03408 [Extibacter]_muris
cgagagtttgatcctggctcaggatgaacgctggcggcgtgcttaacacatgcaagtcgagcgaagcgccttatacagattccttcgggatgaaggatttggcgactgagcggcggacgggtgagtaacgcgtgggcaacctgcctcacacagggggataacagctagaaatggctgctaataccgcataaggccgcggcaccgcatggtgcggcggcagaagctccggcggtgtgagatgggcccgcgtctgattaggtagttggtgcggtaacggcgcaccaagccgacgatcagtagccgacctgagagggtgaccggccacattgggactgagacacggcccaaactcctacgggaggcagcagtggggaatattgcacaatgggggaaaccctgatgcagcgacgccgcgtgaaggatgaagtatttcggtatgtaaacttctatcagcagggaagaagatgacggtacctgactaagaagccccggctaactacgtgccagcagccgcggtaatacgtagggggcaagcgttatccggatttactgggtgtaaagggagcgtagacggcagggcaagtctggagtgaaagcccggggctcaaccccgggactgctttggaaactgccatgctagagtgtcggagaggcaagtggaattcctagtgtagcggtgaaatgcgtagatattaggaggaacaccagtggcgaaggcggcttgctggacgatgactgacgttgaggctcgaaagcgtggggagcaaacaggattagataccctggtagtccacgccgtaaacgatgattactaggtgtcgggaagcaaagcttctcggtgccgcagccaacgcaataagtaatccacctggggagtacgttcgcaagaatgaaactcaaaggaattgacggggacccgcacaagcggtggagcatgtggtttaattcgaagcaacgcgaagaaccttacctggtcttgacatccccctggccggacagtaacgtgtcctttcctacgggacaggggagacaggtggtgcatggttgtcgtcagctcgtgtcgtgagatgttgggttaagtcccgcaacgagcgcaacccctatctttagtagccagcattccggatgggcactctagagagactgccagggacaacctggaggaaggtggggatgacgtcaaatcatcatgccccttatgatcagggctacacacgtgctacaatggcgtaaacaaagggaagcgaccctgcgaaggcaagcgaatcccaaaaataacgtcccagttcggattgtagtctgcaactcgactacatgaagctggaatcgctagtaatcgcgaatcagaatgtcgcggtgaatacgttcccgggtcttgtacacaccgcccgtcacaccatgggagtcggtaacgcccgaagtcagtgacccaaccgcaaggagggagctgccgaaggtgggaccgataactggggtgaagtcgtaacaaggtagccgtatcggaaggtgcggctggatcacctccttt

SEQ ID NO: 78 - DNA, 1527 bp, artificial sequence
  >GCF_003466605.1_02478 Parabacteroides_merdae
cgaagagtttgatcctggctcaggatgaacgctagcgacaggcttaacacatgcaagtcgaggggcagcatgatttgtagcaatacagattgatggcgaccggcgcacgggtgagtaacgcgtatgcaacttacctatcagagggggatagcccggcgaaagtcggattaataccccataaaacaggggtcccgcatgggaatatttgttaaagattcatcgctgatagataggcatgcgttccattaggcagttggcggggtaacggcccaccaaaccgacgatggataggggttctgagaggaaggtcccccacattggtactgagacacggaccaaactcctacgggaggcagcagtgaggaatattggtcaatggccgagaggctgaaccagccaagtcgcgtgaaggaagaaggatctatggtttgtaaacttcttttataggggaataaagtggaggacgtgtccttttttgtatgtaccctatgaataagcatcggctaactccgtgccagcagccgcggtaatacggaggatgcgagcgttatccggatttattgggtttaaagggtgcgtaggtggtgatttaagtcagcggtgaaagtttgtggctcaaccataaaattgccgttgaaactgggttacttgagtgtgtttgaggtaggcggaatgcgtggtgtagcggtgaaatgcatagatatcacgcagaactccgattgcgaaggcagcttactaaaccataactgacactgaagcacgaaagcgtggggatcaaacaggattagataccctggtagtccacgcagtaaacgatgattactaggagtttgcgatacaatgtaagctctacagcgaaagcgttaagtaatccacctggggagtacgccggcaacggtgaaactcaaaggaattgacgggggcccgcacaagcggaggaacatgtggtttaattcgatgatacgcgaggaaccttacccgggtttgaacgtagtctgaccggagtggaaacactctttctagcaatagcagattacgaggtgctgcatggttgtcgtcagctcgtgccgtgaggtgtcggcttaagtgccataacgagcgcaacccttatcactagttactaacaggtgaagctgaggactctggtgagactgccagcgtaagctgtgaggaaggtggggatgacgtcaaatcagcacggcccttacatccggggcgacacacgtgttacaatggcatggacaaagggcagctacctggtgacaggatgctaatctccaaaccatgtctcagttcggatcggagtctgcaactcgactccgtgaagctggattcgctagtaatcgcgcatcagccatggcgcggtgaatacgttcccgggccttgtacacaccgcccgtcaagccatgggagccgggggtacctgaagtccgtaaccgcaaggatcggcctagggtaaaactggtgactggggctaagtcgtaacaaggtagccgtaccggaaggtgcggctggaacacctccttt

SEQ ID NO: 79 - DNA, 1501 bp, artificial sequence
  >GCF_003468845.1_00467 Collinsella_intestinalis
cggagagttcgatcctggctcaggatgaacgctggcggcgcgcctaacacatgcaagtcgaacggcacccaccctcgggtggaagcgagtggcgaacggctgagtaacacgtggagaacccgccccctcctccgggatagcctcgggaaaccgtgggtaataccggatgaccccgcagggccgcatggccccgcgggcaaagcccagacgggaggggatggctccgcggcccatcaggtagacggcggggtgacggcccaccgtgccgacgacgggtagccgggttgagagaccgaccggccagattgggactgagacacggcccagactcctacgggaggcagcagtggggaatcttgcgcaatggggggaaccctgacgcagcgacgccgcgtgcgggacgaaggccctcgggtcgtaaaccgctttcagcagggatgagacaagacggtacctgcagaagaagccccggctaactacgtgccagcagccgcggtaatacgtagggggcgagcgttatccggattcattgggcgtaaagcgcgcgtaggcggcccggcaggcagggggtcaaatggcggggctcaaccccgtcccgccccctgaaccgccgggctcgggtccggtaggggagggtggaacacccggtgtagcggtggaatgcgcagatatcgggtggaacaccggtggcgaaggcggccctctgggccgagaccgacgctgaggcgcgaaagctgggggagcgaacaggattagataccctggtagtcccagccgtaaacgatggacgctaggtgtggggggacgatccctccgtgccgcagccaacgcattaagcgtcccgcctggggagtacggccgcaaggctaaaactcaaaggaattgacgggggcccgcacaagcagcggagcatgtggcttaattcgaagcaacgcgaagaaccttaccagggcttgacatgaccgtgaagccggggagacccggtggccgagaggagcggtcacaggtggtgcatggctgtcgtcagctcgtgtcgtgagatgtttggttaagtccagcaacgagcgcaacccccgccgcatgttgccagcacctcgggtgggcacccatgcgggaccgccggagtcaatccggaggagggcggggacgacgtcaagtcatcatgccccttatgccctgggctgcacacgtgctacaatggccggtacagcgggatgcgatggcgcgagccggagcggatccctgaaagccggccccagttcggattgggggctgcaacccgcccccatgaagtcggagttgctagtaatcgcggatcagcatgccgcggtgaatgcgttcccgggccttgtacacaccgcccgtcacaccacccgagtcgtctgcacccgaagtcgccggcccaaccgcaaggggggaggcgccgaaggtgtggagggtgaggggggtgaagtcgtaacaaggtagccgtacgggaacgtgcggctggatcacctccttt

SEQ ID NO: 80 - DNA, 1528 bp, artificial sequence
  >GCF_003468945.1_00476 Blautia_wexlerae
tcagagagtttgatcctggctcaggatgaacgctggcggcgtgcttaacacatgcaagtcgaacgggaaatacttcattgagacttcggtggatttgatttatttctagtggcggacgggtgagtaacgcgtgggtaacctgccttatacagggggataacagtcagaaatgactgctaataccgcataagcgcacaggaccgcatggtccggtgtgaaaaactccggtggtataagatggacccgcgttggattagctggttggtggggtaacggcccaccaaggcgacgatccatagccggcctgagagggtgaacggccacattgggactgagacacggcccagactcctacgggaggcagcagtggggaatattgcacaatgggggaaaccctgatgcagcgacgccgcgtgaaggaagaagtatctcggtatgtaaacttctatcagcagggaagatagtgacggtacctgactaagaagccccggctaactacgtgccagcagccgcggtaatacgtagggggcaagcgttatccggatttactgggtgtaaagggagcgtagacggtgtggcaagtctgatgtgaaaggcatgggctcaacctgtggactgcattggaaactgtcatacttgagtgccggaggggtaagcggaattcctagtgtagcggtgaaatgcgtagatattaggaggaacaccagtggcgaaggcggcttactggacggtaactgacgttgaggctcgaaagcgtggggagcaaacaggattagataccctggtagtccacgccgtaaacgatgaatactaggtgtcggggagcatggctcttcggtgccgtcgcaaacgcagtaagtattccacctggggagtacgttcgcaagaatgaaactcaaaggaattgacggggacccgcacaagcggtggagcatgtggtttaattcgaagcaacgcgaagaaccttaccaagtcttgacatccctctgaccgactcttaaccgagtctttccttcgggacagaggagacaggtggtgcatggttgtcgtcagctcgtgtcgtgagatgttgggttaagtcccgcaacgagcgcaacccctatcctcagtagccagcaagttaagttgggcactctgtggagactgccagggataacctggaggaaggcggggatgacgtcaaatcatcatgccccttatgatttgggctacacacgtgctacaatggcgtaaacaaagggaagcgagattgtgagatggagcaaatcccaaaaataacgtcccagttcggactgtagtctgcaacccgactacacgaagctggaatcgctagtaatcgcggatcagaatgccgcggtgaatacgttcccgggtcttgtacacaccgcccgtcacaccatgggagtcagtaacgcccgaagtcagtgacctaactgcaaagaaggagctgccgaaggcgggaccgatgactggggtgaagtcgtaacaaggtagccgtatcggaaggtgcggctggatcacctccttt

SEQ ID NO: 81 - DNA, 1501 bp, artificial sequence
  >GCF_003469765.1_01499 Collinsella_intestinalis
cggagagttcgatcctggctcaggatgaacgctggcggcgcgcctaacacatgcaagtcgaacggcacccaccctcgggtggaagcgagtggcgaacggctgagtaacacgtggagaacccgccccctcctccgggatagcctcgggaaaccgtgggtaataccggatgaccccgcagggccgcatggccccgcgggcaaagcccagacgggaggggatggctccgcggcccatcaggtagacggcggggtgacggcccaccgtgccgacgacgggtagccgggttgagagaccgaccggccagattgggactgagacacggcccagactcctacgggaggcagcagtggggaatcttgcgcaatggggggaaccctgacgcagcgacgccgcgtgcgggacgaaggccctcgggtcgtaaaccgctttcagcagggatgagacaagacggtacctgcagaagaagccccggctaactacgtgccagcagccgcggtaatacgtagggggcgagcgttatccggattcattgggcgtaaagcgcgcgtaggcggcccggcaggcagggggtcaaatggcggggctcaaccccgtcccgccccctgaaccgccgggctcgggtccggtaggggagggtggaacacccggtgtagcggtggaatgcgcagatatcgggtggaacaccggtggcgaaggcggccctctgggccgagaccgacgctgaggcgcgaaagctgggggagcgaacaggattagataccctggtagtcccagccgtaaacgatggacgctaggtgtggggggacgatccctccgtgccgcagccaacgcattaagcgtcccgcctggggagtacggccgcaaggctaaaactcaaaggaattgacgggggcccgcacaagcagcggagcatgtggcttaattcgaagcaacgcgaagaaccttaccagggcttgacatgaccgtgaagccggggagacccggtggccgagaggagcggtcacaggtggtgcatggctgtcgtcagctcgtgtcgtgagatgtttggttaagtccagcaacgagcgcaacccccgccgcatgttgccagcaccccgggtgggcacccatgcgggaccgccggagtcaatccggaggagggcggggacgacgtcaagtcatcatgccccttatgccctgggctgcacacgtgctacaatggccggtacagcgggatgcgatggcgcgagccggagcggatccctgaaagccggccccagttcggattgggggctgcaacccgcccccatgaagtcggagttgctagtaatcgcggatcagcatgccgcggtgaatgcgttcccgggccttgtacacaccgcccgtcacaccacccgagtcgtctgcacccgaagtcgccggcccaaccgagaggggggaggcgccgaaggtgtggagggtgaggggggtgaagtcgtaacaaggtagccgtacgggaacgtgcggctggatcacctccttt

SEQ ID NO: 82 - DNA, 1527 bp, artificial sequence
  >GCF_003471165.1_01096 Blautia_wexlerae
tcagagagtttgatcctggctcaggatgaacgctggcggcgtgcttaacacatgcaagtcgaacgggaatcacttcattgagacttcggtggatttgatttgattctagtggcggacgggtgagtaacgcgtgggtaacctgccttatacagggggataacagtcagaaatgactgctaataccgcataagcgcacaggaccgcatggtccggtgtgaaaaactccggtggtataagatggacccgcgttggattagcttgttggtggggtaacggcccaccaaggcgacgatccatagccggcctgagagggtgaacggccacattgggactgagacacggcccagactcctacgggaggcagcagtggggaatattgcacaatgggggaaaccctgatgcagcgacgccgcgtgaaggaagaagtatctcggtatgtaaacttctatcagcagggaagatagtgacggtacctgactaagaagccccggctaactacgtgccagcagccgcggtaatacgtagggggcaagcgttatccggatttactgggtgtaaagggagcgtagacggtgtggcaagtctgatgtgaaaggcatgggctcaacctgtggactgcattggaaactgtcatacttgagtgccggaggggtaagcggaattcctagtgtagcggtgaaatgcgtagatattaggaggaacaccagtggcgaaggcggcttactggacggtaactgacgttgaggctcgaaagcgtggggagcaaacaggattagataccctggtagtccacgccgtaaacgatgaatactaggtgtcggggagcatggctcttcggtgccgtcgcaaacgcagtaagtattccacctggggagtacgttcgcaagaatgaaactcaaaggaattgacggggacccgcacaagcggtggagcatgtggtttaattcgaagcaacgcgaagaaccttaccaagtcttgacatccctctgaccgactcttaaccgagtctttccttcgggacagaggagacaggtggtgcatggttgtcgtcagctcgtgtcgtgagatgttgggttaagtcccgcaacgagcgcaacccctatcctcagtagccagcatttaaggtgggcactctggggagactgccagggataacctggaggaaggcggggatgacgtcaaatcatcatgccccttatgatttgggctacacacgtgctacaatggcgtaaacaaagggaagcgagattgtgagatggagcaaatcccaaaaataacgtcccagttcggactgtagtctgcaacccgactacacgaagctggaatcgctagtaatcgcggatcagaatgccgcggtgaatacgttcccgggtcttgtacacaccgcccgtcacaccatgggagtcagtaacgcccgaagtcagtgacctaactgcaaagaaggagctgccgaaggcgggaccgatgactggggtgaagtcgtaacaaggtagccgtatcggaaggtgcggctggatcacctccttt

SEQ ID NO: 83 - DNA, 1527 bp, artificial sequence
  >GCF_003473325.1_02611 Blautia_wexlerae
tcagagagtttgatcctggctcaggatgaacgctggcggcgtgcttaacacatgcaagtcgaacgggaaatacttcattgagacttcggtggatttgatttatttctagtggcggacgggtgagtaacgcgtgggtaacctgccttatacagggggataacagtcagaaatgactgctaataccgcataagcgcacaggaccgcatggtccggtgtgaaaaactccggtggtataagatggacccgcgttggattagctggttggtggggtaacggcccaccaaggcgacgatccatagccggcctgagagggtgaacggccacattgggactgagacacggcccagactcctacgggaggcagcagtggggaatattgcacaatgggggaaaccctgatgcagcgacgccgcgtgaaggaagaagtatctcggtatgtaaacttctatcagcagggaagatagtgacggtacctgactaagaagccccggctaactacgtgccagcagccgcggtaatacgtagggggcaagcgttatccggatttactgggtgtaaagggagcgtagacggtgtggcaagtctgatgtgaaaggcatgggctcaacctgtggactgcattggaaactgtcatacttgagtgccggaggggtaagcggaattcctagtgtagcggtgaaatgcgtagatattaggaggaacaccagtggcgaaggcggcttactggacggtaactgacgttgaggctcgaaagcgtggggagcaaacaggattagataccctggtagtccacgccgtaaacgatgaatactaggtgtcggggagcatggctcttcggtgccgtcgcaaacgcagtaagtattccacctggggagtacgttcgcaagaatgaaactcaaaggaattgacggggacccgcacaagcggtggagcatgtggtttaattcgaagcaacgcgaagaaccttaccaagtcttgacatccctctgacctactcttaaccgagtctttccttcgggacagaggagacaggtggtgcatggttgtcgtcagctcgtgtcgtgagatgttgggttaagtcccgcaacgagcgcaacccctatcctcagtagccagcatttaaggtgggcactctggggagactgccagggataacctggaggaaggcggggatgacgtcaaatcatcatgccccttatgatttgggctacacacgtgctacaatggcgtaaacaaagggaagcgagattgtgagatggagcaaatcccaaaaataacgtcccagttcggactgtagtctgcaacccgactacacgaagctggaatcgctagtaatcgcggatcagaatgccgcggtgaatacgttcccgggtcttgtacacaccgcccgtcacaccatgggagtcagtaacgcccgaagtcagtgacctaaccgcaagggaggagctgccgaaggcgggaccgatgactggggggaagtcgtaacaaggtagccgtatcggaaggtgcggctggattacctccttt

SEQ ID NO: 84 - DNA, 1246 bp, artificial sequence
  >GCF_003473495.1_02487 Blautia_wexlerae
tcagagagtttgatcctggctcaggatgaacgctggcggcgtgcttaacacatgcaagtcgaacgggaattactttattgaaacttcggtcgatttaatttaattctagtggcggacgggtgagtaacgcgtgggtaacctgccttatacagggggataacagtcagaaatggctgctaataccgcataagcgcacagagctgcatggctcagtgtgaaaaactccggtggtataagatggacccgcgttggattagctagttggtggggtaacggcccaccaaggcgacgatccatagccggcctgagagggtgaacggccacattgggactgagacacggcccagactcctacgggaggcagcagtggggaatattgcacaatgggggaaaccctgatgcagcgacgccgcgtgaaggaagaagtatctcggtatgtaaacttctatcagcagggaagatagtgacggtacctgactaagaagccccggctaactacgtgccagcagccgcggtaatacgtagggggcaagcgttatccggatttactgggtgtaaagggagcgtagacggtgtggcaagtctgatgtgaaaggcatgggctcaacctgtggactgcattggaaactgtcatacttgagtgccggaggggtaagcggaattcctagtgtagcggtgaaatgcgtagatattaggaggaacaccagtggcgaaggcggcttactggacggtaactgacgttgaggctcgaaagcgtggggagcaaacaggattagataccctggtagtccacgccgtaaacgatgaatactaggtgtcggggagcaaagctcttcggtgccgtcccaaacgcagtaagtatccctcctgggcagtacggtcgcaagaatgaacctaaaggcaattgacggggaccctcacaagcggtggagcatgtggtttaattcgaagcaactcgaagacccttaccaagtcttgacatccgcctgcccgatccttaaccggatctttccttcgggacaggcgagacaggtggtgcatggttgtcgtcagctcgtgtcgtgagatgttgggttaagtcccgcaacgagcgcaacccctatcctcagtagccagcatttaaggtgggcactctggggagactgccagggataacctggaggaaggcggggatgacgtcaaatcatcatgccccttatgatttgggctacacacgtgctacaatggcgtaaacaaagggaagcga

SEQ ID NO: 85 - DNA, 1550 bp, artificial sequence
  >GCF_003473545.1_00768 Hungatella_sp1
  misc_feature (39)..(48): n is a, c, g, or t
atgagagtttgatcctggctcaggatgaacgctggcggnnnnnnnnnnggatgaacgctggcggcgtgcttaacacatgcaagtcgagcgaagcgatttaaatgagacttcggtggattttaaattgactgagcggcggacgggtgagtaacgcgtggataacctgcctcacacagggggataacagttagaaatgactgctaataccgcataagcgcacggtaccgcatggtacagtgtgaaaaactccggtggtgtgagatggatccgcgtctgattaggtagttggtgaggtaacggcccaccaagccgacgatcagtagccgacctgagagggtgaccggccacattgggactgagacacggcccaaactcctacgggaggcagcagtggggaatattgcacaatgggcgaaagcctgatgcagcaacgccgcgtgagtgaagaagtatctcggtatgtaaagctctatcagcagggaagaaaatgacggtacctgactaagaagccccggctaactacgtgccagcagccgcggtaatacgtagggggcaagcgttatccggatttactgggtgtaaagggagcgcagacggcactgcaagtctgaagtgaaagcccggggctcaaccccgggactgctttggaaactgtagagctagagtgctggagaggcaagcggaattcctagtgtagcggtgaaatgcgtagatattaggaagaacaccagtggcgaaggcggcttgctggacagtaactgacgttcaggctcgaaagcgtggggagcaaacaggattagataccctggtagtccacgccgtaaacgatgaatactaggtgttggtgggcaaagcccatcggtgccgccgcaaacgcaataagtattccacctggggagtacgttcgcaagaatgaaactcaaaggaattgacggggacccgcacaagcggtggagcatgtggtttaattcgaagcaacgcgaagaaccttaccaagtcttgacatcgtgatgaccggaacttaaccgttccttcccttcggggcatcatagacaggtggtgcatggttgtcgtcagctcgtgtcgtgagatgttgggttaagtcccgcaacgagcgcaacccttatcctcagtagccagcagtaagatgggcactctggggagactgccagggataacctggaggaaggtggggatgacgtcaaatcatcatgccccttatgatttgggctacacacgtgctacaatggcgtaaacaaagggaagcgatagggtgacctggagcaaatcccaaaaataacgtcccagttcggactgtagtctgcaacccgactacacgaagctggaatcgctagtaatcgcagatcagaatgctgcggtgaatacgttcccgggtcttgtacacaccgcccgtcacaccatgggagtcagcaacgcccgaagtcagtgactcaaccgcaaggagagagctgccgaaggcggggcaggtaactggggtgaagtcgtaacaaggtagccgtatcggaaggtgcggctggatcacctccttt

SEQ ID NO: 86 - DNA, 985 bp, artificial sequence
  >GCF_003473745.1_02291 Blautia_wexlerae
  misc_feature (984)..(985): n is a, c, g, or t
cagagagtttgatcctggctcaggatgaacgctggcggcgtgcttaacccatgcaagtcgaacgggaaatatttcattgagacttcggtggatttgatctatttctagtggcggacgggcgagtaacgcgtgggtaacctgccttatacagggggatagcagtcagaaatggctgctaataccgcataagcggacagagctgcatggctcagtgtgaaaaactccgggggtataagatggacccgcgttggattagctagttggtggggtaacggcccaccaaggcgacgatccatagccggcctgagagggtgaacggccacattgggactgagacacggcccagactcctacgggaggcagcagtggggaatattgcacaatgggggaaaccctgatgcagcgacgccgcgtgaaggaagaagtatctcggtatgtaaacttctatcagcagggaagatagtgacggtacctgactaagaagccccggctaactacgtgccagcagccgcggtaatacgtagggggcaagcgttatccggatttactgggtgtaaagggagcgtagacggtgtggcaagtctgatgtgaaaggcatgggctcaacctgtggactgcattggaaactgtcatacttgagtgccggaggggtaagcggaattcctagtgtagcggtgaaatgcgtagatattaggaggaacaccagtggcgaaggcggcttactggacggtaactgacgttgaggctcgtaagcgtggggagcaaacaggattagataccctggtagtccactccgtaaacgatgaatactaggtgtcggggagcaaagctcttcggtgccgtcgcaaacgcagtaagtattccacctggggagtacgttcgcaagaatgaaactcaaaggaattgacggggacccgcacaagcggtggagcatgtggtttaattcgaagcaacgcgaagaaccttaccaagtcttgacatccnn

SEQ ID NO: 87 - DNA, 1267 bp, artificial sequence
  >GCF_003473905.1_03513 Blautia_wexlerae
gttggtggggtaacggcccaccaaggcgacgatccatagccggcctgagagggtgaacggccacattgggactgagacacggcccagactcctacgggaggcagcagtggggaatattgcacaatgggggaaaccctgatgcagcgacgccgcgtgaaggaagaagtatctcggtatgtaaacttctatcagcagggaagatagtgacggtacctgactaagaagccccggctaactacgtgccagcagccgcggtaatacgtagggggcaagcgttatccggatttactgggtgtaaagggagcgtagacggtgtggcaagtctgatgtgaaaggcatgggctcaacctgtggactgcattggaaactgtcatacttgagtgccggaggggtaagcggaattcctagtgtagcggtgaaatgcgtagatattaggaggaacaccagtggcgaaggcggcttactggacggtaactgacgttgaggctcgaaagcgtggggagcaaacaggattagataccctggtagtccacgccgtaaacgatgaatactaggtgtcggggagcatggctcttcggtgccgtcgcaaacgcagtaagtattccacctggggagtacgttcgcaagaatgaaactcaaaggaattgacggggacccgcacaagcggtggagcatgtggtttaattcgaagcaacgcgaagaaccttaccaagtcttgacatccgcctgaccgatccttaaccggatctttccttcgggacaggcgagacaggtggtgcatggttgtcgtcagctcgtgtcgtgagatgttgggttaagccccgcaacgagcgcaccccctatcctcagtagccagcatttaaggtgggcactctggggagactgcgagggataacctggaggaaggcggggatgacgtcaaatcatcatgccccttatgatttgggctacacacgtgctacaatggcgtaaacaaagggaagcgagattgtgagatggagcaaatcccaaaaataacgtcccagttcggactgtagtctgcaacccgactacacgaagctggaatcgctagtaatcgcggatcagaatgccgcggtgaatacgttcccgggtcttgtacacaccgcccgtcacaccatgggagtcagtaacgcccgaagtcagtgacctaactgcaaagaaggagctgccgaaggcgggaccgatgactggggtgaagtcgtaacaaggtagccgtatcggaaggtgcggctggatcacctccttt

SEQ ID NO: 88 - DNA, 1525 bp, artificial sequence
  >GCF_003474015.1_00611 Bifidobacterium_catenulatum_group
tgtggagggttcgattctggctcaggatgaacgctggcggcgtgcttaacacatgcaagtcgaacgggatccatcaggctttgcttggtggtgagagtggcgaacgggtgagtaatgcgtgaccgacctgccccatacaccggaatagctcctggaaacgggtggtaatgccggatgctccgactcctcgcatggggggtcgggaaagatttcatcggtatgggatggggtcgcgtcctatcaggtagtcggcggggtaacggcccaccgagcctacgacgggtagccggcctgagaggcgaccggccacattgggactgagatacggcccagactcctacgggaggcagcagtggggaatattgcacaatgggcgcaagcctgatgcagcgacgccgcgtgcgggatgacggccttcgggttgtaaaccgcttttgatcgggagcaagccttcgggtgagtgtacctttcgaataagcaccggctaactacgtgccagcagccgcggtaatacgtagggtgcaagcgttatccggaattattgggcgtaaagggctcgtaggcggttcgtcgcgtccggtgtgaaagtccatcgcttaacggtggatctgcgccgggtacgggcgggctggagtgcggtaggggagactggaattcccggtgtaacggtggaatgtgtagatatcgggaagaacaccaatggcgaaggcaggtctctgggccgttactgacgctgaggagcgaaagcgtggggagcgaacaggattagataccctggtagtccacgccgtaaacggtggatgctggatgtggggcccgttccacgggttccgtgtcggagctaacgcgttaagcatcccgcctggggagtacggccgcaaggctaaaactcaaagaaattgacgggggcccgcacaagcggcggagcatgcggattaattcgatgcaacgcgaagaaccttacctgggcttgacatgttcccgacagccgtagagatatggcctcccttcggggcgggttcacaggtggtgcatggtcgtcgtcagctcgtgtcgtgagatgttgggttaagtcccgcaacgagcgcaaccctcgccctgtgttgccagcacgtcatggtgggaactcacgggggaccgccggggtcaactcggaggaaggtggggatgacgtcagatcatcatgccccttacgtccagggcttcacgcatgctacaatggccggtacaacgggatgcgacacggcgacgtggagcggatccctgaaaaccggtctcagttcggattggagtctgcaacccgactccatgaaggcggagtcgctagtaatcgcggatcagcaacgccgcggtgaatgcgttcccgggccttgtacacaccgcccgtcaagtcatgaaagtgggtagcacccgaagccggtggcctaaccctttgtggatggagccgtctaaggtgagactcgtgattgggactaagtcgtaacaaggtagccgtaccggaaggtgcggctggatcacctccttt

SEQ ID NO: 89 - DNA, 848 bp, artificial sequence
  >GCF_003474665.1_01073 Blautia_wexlerae
  misc_feature (1)..(1): n is a, c, g, or t
naacctgccttatacagggggataacagtcagaaatgactgctaataccgcataagcgcacaggaccgcatggtccggtgtgaaaaactccggtggtataagatggacccgcgttggattagcttgttggtggggtaacggcccaccaaggcgacgatccatagccggcctgagagggtgaacggccacattgggactgagacacggcccagactcctacgggaggcagcagtggggaatattgcacaatgggggaaaccctgatgcagcgacgccgcgtgaaggaagaagtatctcggtatgtaaacttctatcagcagggaagatagtgacggtacctgactaagaagccccggctaactacgtgccagcagccgcggtaatacgtagggggcaagcgttatccggatttactgggtgtaaagggagcgtagacggtgtggcaagtctgatgtgaaaggcatgggctcaacctgtggactgcattggaaactgtcatacttgagtgccggaggggtaagcggaattcctagtgtagcggtgaaatgcgtagatattaggaggaacaccagtggcgaaggcggcttactggacggtaactgacgttgaggctcgaaagcgtggggagcaaacaggattagataccctggtagtccacgccgtaaacgatgaatactaggtgtcgggtggcatggccattcggtgccgtcgcaaacgcagtaagtattccacctggggagtacgttcgcaagaatgaaactcaaaggaattgacggggacccgcacaagcggtggagcatgtggtttaattcgaagcaacgcgaagaaccttaccaagtcttgacatc

SEQ ID NO: 90 - DNA, 982 bp, artificial sequence
  >GCF_003474835.1_01050 Bifidobacterium_catenulatum_group
gtggagggttcgattctggctcaggatgaacgctggcggcgtgcttaacacatgcaagtcgaacgggatccatcaggctttgcttggtggtgagagtggcgaacgggtgagtaatgcgtgaccgacctgccccatacaccggaatagctcctggaaacgggtggtaatgccggatgctccgactcctcgcatggggtgtcgggaaagatttcatcggtatgggatggggtcgcgtcctatcaggtagtcggcggggtaacggcccaccgagcctacgacgggtagccggcctgagagggcgaccggccacattgggactgagatacggcccagactcctacgggaggcagcagtggggaatattgcacaatgggcgcaagcctgatgcagcgacgccgcgtgcgggatgacggccttcgggttgtaaaccgcttttgatcgggagcaagccttcgggtgagtgtacctttcgaataagcaccggctaactacgtgccagcagccgcggtaatacgtagggtgcaagcgttatccggaattattgggcgtaaagggctcgtaggcggttcgtcgcgtccggtgtgaaagtccatcgcttaacggtggatctgcgccgggtacgggcgggctggagtgcggtaggggagactggaattcccggtgtaacggtggaatgtgtagatatcgggaagaacaccaatggcgaaggcaggtctctgggccgttactgacgctgaggagcgaaagcgtggggagcgaacaggattagataccctggtagtccacgccgtaaacggtggatgctggatgtggggcccgttccacgggttccgtgtcggagctaacgcgttaagcatcccgcctggggagtacggccgcaaggctaaaactcaaagaaattgacgggggcccgcacaagcggcggagcatgcggattaattcgatgcaacgcgaagaaccttacctgggcttgacatgttcc

SEQ ID NO: 91 - DNA, 1141 bp, artificial sequence
  >GCF_003477525.1_00491 Blautia_wexlerae
ggggaaaccctgatgcagcgacgccgcgtgaaggaagaagtatctcggtatgtaaacttctatcagcagggaagatagtgacggtacctgactaagaagccccggctaactacgtgccagcagccgcggtaatacgtagggggcaagcgttatccggatttactgggtgtaaagggagcgtagacggtgtggcaagtctgatgtgaaaggcatgggctcaacctgtggactgcattggaaactgtcatacttgagtgccggaggggtaagcggaattcctagtgtagcggtgaaatgcgtagatattaggaggaacaccagtggcgaaggcggcttactggacggtaactgacgttgaggctcgaaagcgtggggagcaaacaggattagataccctggtagtccacgccgtaaacgatgaatactaggtgtcgggtggcatggccattcggtgccgtcgcaaacgcagtaagtattccacctggggagtacgttcgcaagaatgaaactcaaaggaattgacggggacccgcacaagcggtggagcatgtggtttaattcgaagcaacgcgaagaaccttaccaagtcttgacatccctctgaccggaacttaaccgttcctttccttcgggacaggggagacaggtggtgcatggttgtcgtcagctcgtgtcgtgagatgttgggttaagtcccgcaacgagcgcaacccctatcctcagtagccagcatgtaagatgggcactctggggagactgccagggataacctggaggaaggcggggatgacgtcaaatcatcatgccccttatgatttgggctacacacgtgctacaatggcgtaaacaaagggaagcgagattgtgagatggagcaaatcccaaaaataacgtcccagttcggactgtagtctgcaacccgactacacgaagctggaatcgctagtaatcgcggatcagaatgccgcggtgaatacgttcccgggtcttgtacacaccgcccgtcacaccatgggagtcagtaacgcccgaagtcagtgacctaaccgcgagggaggagctgccgaaggcgggaccgatgactggggtgaagtcgtaacaaggtagccgtatcggaaggtgcggctggatcacctccttt

SEQ ID NO: 92 - DNA, 1247 bp, artificial sequence
  >GCF_003477585.1_03286 Blautia_wexlerae
tcagagagtttgatcctggctcaggatgaacgctggcggcgtgcttaacacatgcaagtcgaacgggaaatacttcattgagacttcggtggatttgatttatttctagtggcggacgggtgagtaacgcgtgggtaacctgccttatacagggggataacagtcagaaatgactgctaataccgcataagcgcacaggaccgcatggtccggtgtgaaaaactccggtggtataagatggacccgcgttggattagcttgttggtggggtaacggcccaccaaggcgacgatccatagccggcctgagagggtgaacggccacattgggactgagacacggcccagactcctacgggaggcagcagtggggaatattgcacaatgggggaaaccctgatgcagcgacgccgcgtgaaggaagaagtatctcggtatgtaaacttctatcagcagggaagatagtgacggtacctgactaagaagccccggctaactacgtgccagcagccgcggtaatacgtagggggcaagcgttatccggatttactgggtgtaaagggagcgtagacggtgtggcaagtctgatgtgaaaggcatgggctcaacctgtggactgcattggaaactgtcatacttgagtgccggaggggtaagcggaattcctagtgtagcggtgaaatgcgtagatattaggaggaacaccagtggcgaaggcggcttactggacggtaactgacgttgaggctcgaaagcgtggggagcaaacaggattagataccctggtagtccacgccgtaaacgatgaatactaggtgtcggggagcatggctcttcggtgccgtcgcaaacgcagtaagtattccacctggggagtacgttcgcaagaatgaaactcaaaggaattgacggggacccgcacaagcggtggagcatgtggtttaattcgaagcaacgcgaagaaccttaccaagtcttgacatccctctgaccgactcttaaccgagtctttccttcgggacagaggagacaggtggtgcatggttgtcgtcagctcgtgtcgtgagatgttgggttaagtcccgcaacgagcgcaacccctatcctcagtagccagcaagttgagttgggcactctgtggagactgccagggataacctggaggaaggcggggatgacgtcaaatcatcatgccccttatgatttgggctacacacgtgctacaatggcgtaaacaaagggaagcga

SEQ ID NO: 93 - DNA, 1432 bp, artificial sequence
  >GCF_003477985.1_02417 Blautia_wexlerae
tcagagagtttgatcctggctcaggatgaacgctggcggcgtgcttaacacatgcaagtcgaacgggaaatacttcattgagacttcggtggatttgatttatttctagtggcggacgggtgagtaacgcgtgggtaacctgccttatacagggggataacagtcagaaatgactgctaataccgcataagcgcacaggaccgcatggtccggtgtgaaaaactccggtggtataagatggacccgcgttggattagcttgttggtggggtaacggcccaccaaggcgacgatccatagccggcctgagagggtgaacggccacattgggactgagacacggcccagactcctacgggaggcagcagtggggaatattgcacaatgggggaaaccctgatgcagcgacgccgcgtgaaggaagaagtatctcggtatgtaaacttctatcagcagggaagatagtgacggtacctgactaagaagccccggctaactacgtgccagcagccgcggtaatacgtagggggcaagcgttatccggatttactgggtgtaaagggagcgtagacggtgtggcaagtctgatgtgaaaggcatgggctcaacctgtggactgcattggaaactgtcatacttgagtgccggaggggtaagcggaattcctagtgtagcggtgaaatgcgtagatattaggaggaacaccagtggcgaaggcggcttactggacggtaactgacgttgaggctcgaaagcgtggggagcaaacaggattagataccctggtagtccacgccgtaaacgatgaatactaggtgtcgggtggcatggccattcggtgccgtcgcaaacgcagtaagtattccacctggggagtacgttcgcaagaatgaaactcaaaggaattgacggggacccgcacaagcggtggagcatgtggtttaattcgaagcaacgcgaagaaccttaccaagtcttgacatccctctgaccgactcttaaccgagtctttccttcgggacagaggagacaggtggtgcatggttgtcgtcagctcgtgtcgtgagatgttgggttaagtcccgcaacgagcgcaacccctatcctcagtagccagcatttaaggtgggcactctggggagactgccagggataacctggaggaaggcggggatgacgtcaaatcatcatgccccttatgatttgggctacacacgtgctacaatggcgtaaacaaagggaagcgagattgtgagatggagcaaatcccaaaaataacgtcccagttcggactgtagtctgcaacccgactacacgaagctggaatcgctagtaatcgcggatcagaatgccgcggtgaatacgttcccgggtcttgtacacaccgcccgtcacaccatgggagtcagtaacgcccgaagtcagtgacctaa

SEQ ID NO: 94 - DNA, 1146 bp, artificial sequence
  >GCF_003478265.1_00512 Blautia_wexlerae
cgacgatccatagccggcctgagagggtgaacggccacattgggactgagacacggcccagactcctacgggaggcagcagtggggaatattgcacaatgggggaaaccctgatgcagcgacgccgcgtgaaggaagaagtatctcggtatgtaaacttctatcagcagggaagatagtgacggtacctgactaagaagccccggctaactacgtgccagcagccgcggtaatacgtagggggcaagcgttatccggatttactgggtgtaaagggagcgtagacggtgtggcaagtctgatgtgaaaggcatgggctcaacctgtggactgcattggaaactgtcatacttgagtgccggaggggtaagcggaattcctagtgtagcggtgaaatgcgtagatattaggaggaacaccagtggcgaaggcggcttactggacggtaactgacgttgaggctcgaaagcgtggggagcaaacaggattagataccctggtagtccacgccgtaaacgatgaatactaggtgtcggggagcatggctcttcggtgccgtcgcaaacgcagtaagtattccacctggggagtacgttcgcaagaatgaaactcaaaggaattgacggggacccgcacaagcggtggagcatgtggtttaattcgaagcaacgcgaagaaccttaccaagtcttgacatccgcctgaccgatccttaaccggatctttccttcgggacaggcgagacaggtggtgcatggttgtcgtcagctcgtgtcgtgagatgttgggttaagtcccgcaacgagcgcaacccctatcctcagtagccagcatttaaggtgggcactctggggagactgccagggataacctggaggaaggcggggatgacgtcaaatcatcatgccccttatgatttgggctacacacgtgctacaatggcgtaaacaaagggaagcgagattgtgagatggagcaaatcccaaaaataacgtcccagttcggactgtagtctgcaacccgactacacgaagctggaatcgctagtaatcgcggatcagaatgccgcggtgaatacgttcccgggtcttgtacacaccgcccgtcacaccatgggagtcagtaacgcccgaagtcagtgacctaa

SEQ ID NO: 95 - DNA, 891 bp, artificial sequence
  >GCF_003478285.1_03860 Hungatella_sp1
gctagagtgctggagaggcaagcggaattcctagtgtagcggtgaaatgcgtagatattaggaagaacaccagtggcgaaggcggcttgctggacagtaactgacgttcaggctcgaaagcgtggggagcaaacaggattagataccctggtagtccacgccgtaaacgatgaatactaggtgttggtgggcaaagcccatcggtgccgccgcaaacgcaataagtattccacctggggagtacgttcgcaagaatgaaactcaaaggaattgacggggacccgcacaagcggtggagcatgtggtttaattcgaagcaacgcgaagaaccttaccaagtcttgacatcgtgatgaccggaacttaaccgttccttcccttcggggcatcatagacaggtggtgcatggttgtcgtcagctcgtgtcgtgagatgttgggttaagtcccgcaacgagcgcaacccttatcctcagtagccagcagtaagatgggcactctggggagactgccagggataacctggaggaaggtggggatgacgtcaaatcatcatgccccttatgatttgggctacacacgtgctacaatggcgtaaacaaagggaagcgatagggtgacctggagcaaatcccaaaaataacgtcccagttcggactgtagtctgcaacccgactacacgaagctggaatcgctagtaatcgcagatcagaatgctgcggtgaatacgttcccgggtcttgtacacaccgcccgtcacaccatgggagtcagcaacgcccgaagtcagtgacctaaccgaaagggaggagctgccgaaggcggggcaggtaactggggtgaagtcgtaacaaggtagccgtatcggaaggtgcggctggatcacctcctt

SEQ ID NO: 96 - DNA, 1430 bp, artificial sequence
  >GCF_003478325.1_00298 Blautia_wexlerae
cagagagtttgatcctggctcaggatgaacgctggcggcgtgcttaacacatgcaagtcgaacgggaaatatttcattgagacttcggtggatttgatctatttctagtggcggacgggtgagtaacgcgtgggtaacctgccttatacagggggataacagtcagaaatggctgctaataccgcataagcgcacagagctgcatggctcagtgtgaaaaactccggtggtataagatggacccgcgttggattagctggttggtggggtaacggcccaccaagcgacgatccatagccggcctgagagggtgaacggccacattgggactgagacacggcccagactcctacgggaggcagcagtggggaatattgcacaatgggggaaaccctgatgcagcgacgccgcgtgaaggaagaagtatctcggtatgtaaacttctatcagcagggaagatagtgacggtacctgactaagaagccccggctaactacgtgccagcagccgcggtaatacgtagggggcaagcgttatccggatttactgggtgtaaagggagcgtagacggtgtggcaagtctgatgtgaaaggcatgggctcaacctgtggactgcattggaaactgtcatacttgagtgccggaggggtaagcggaattcctagtgtagcggtgaaatgcgtagatattaggaggaacaccagtggcgaaggcggcttactggacggtaactgacgttgaggctcgaaagcgtggggagcaaacaggattagataccctggtagtccacgccgtaaacgatgaatactaggtgtcggggagcatggctcttcggtgccgtcgcaaacgcagtaagtattccacctggggagtacgttcgcaagaatgaaactcaaaggaattgacggggacccgcacaagcggtggagcatgtggtttaattcgaagcaacgcgaagaaccttaccaagtcttgacatccgcctgaccgatccttaaccggatctttccttcgggacaggcgagacaggtggtgcatggttgtcgtcagctcgtgtcgtgagatgttgggttaagtcccgcaacgagcgcaacccctatcctcagtagccagcatttaaggtgggcactctggggagactgccagggataacctggaggaaggcggggatgacgtcaaatcatcatgccccttatgatttgggctacacacgtgctacaatggcgtaaacaaagggaagcgagattgtgagatggagcaaatcccaaaaataacgtcccagttcggactgtagtctgcaacccgactacacgaagctggaatcgctagtaatcgcggatcagaatgccgcggtgaatacgttcccgggtcttgtacacaccgcccgtcacaccatgggagtcagtaacgcccgaagtcagtgacctaa

SEQ ID NO: 97 - DNA, 996 bp, artificial sequence
  >GCF_003478605.1_01564 Blautia_wexlerae
gagtaacgcgtgggtaacctgccttatacagggggataacagtcagaaatgactgctaataccgcataagcgcacaggaccgcatggtccggtgtgaaaaactccggtggtataagatggacccgcgttggattagctggttggtggggtaacggcccaccaaggcgacgatccatagccggcctgagagggtgaacggccacattgggactgagacacggcccagactcctacgggaggcagcagtggggaatattgcacaatgggggaaaccctgatgcagcgacgccgcgtgaaggaagaagtatctcggtatgtaaacttctatcagcagggaagatagtgacggtacctgactaagaagccccggctaactacgtgccagcagccgcggtaatacgtagggggcaagcgttatccggatttactgggtgtaaagggagcgtagacggtgtggcaagtctgatgtgaaaggcatgggctcaacctgtggactgcattggaaactgtcatacttgagtgccggaggggtaagcggaattcctagtgtagcggtgaaatgcgtagatattaggaggaacaccagtggcgaaggcggcttactggacggtaactgacgttgaggctcgaaagcgtggggagcaaacaggattagataccctggtagtccacgccgtaaacgatgaatactaggtgtcgggtggcatggccattcggtgccgtcgcaaacgcagtaagtattccacctggggagtacgttcgcaagaatgaaactcaaaggaattgacggggacccgcacaagcggtggagcatgtggtttaattcgaagcaacgcgaagaaccttaccaagtcttgacatccctctgaccgactcttaaccgagtctttccttcgggacagaggagacaggtggtgcatggttgtcgtcagctcgtgtcgtgagatgttgggttaagtcccgcaacgagcgcaacccctatcctcagtagccagc

SEQ ID NO: 98 - DNA, 1137 bp, artificial sequence
  >GCF_003478765.1_02375 Blautia_wexlerae
  misc_feature (1137)..(1137): n is a, c, g, or t
cagagagtttgatcctggctcaggatgaacgctggcggcgtgcttaacacatgcaagtcgaacgggaattatcttattgaaacttcggtcgatttaatttaattctagtggcggacgggggagtaacgcgtgggtaacctgccttatacagggggctaaaaggcagaaatgactgctaataccgcataagcgcacagagctgcttggctcagtgtgaaaaactccggtggtataagatggacacgcgttggattagcttgttggcagggtaacggcctaccaaggcgacgatccatagccggcctgagagggtgaacggccacattgggactgagacacggcccagactcctacgggaggcagcagtggggaatattgcacaatgggggaaaccctgatgcagcgacgccgcgtgaaggaagaagtatctcggtatgtaaacttctatcagcagggaagatagtgacggtacctgactaagaagccccggctaactacgtgccagcagccgcggtaatacgtagggggcaagcgttatccggatttactgggtgtaaagggagcgtagacggtgtggcaagtctgatgtgaaaggcatgggctcaacctgtggactgcattggaaactgtcatacttgagtgccggaggggtaagcggaattcctagtgtagcggtgaaatgcgtagatattaggaggaacaccagtggcgaaggcggcttactggacggtaactgacgttgaggctcgaaagcgtggggagcaaacaggattagataccctggtagtccacgccgtaaacgatgaatactaggtgtcggggagcaaagctcttcggtgccgtcgcaaacgcagtaagtattccacctggggagtacgttcgcaagaatgaaactcaaaggaattgacggggacccgcacaagcggtggagcatgtggtttaattcgaagcaacgcgaagaaccttaccaaatcttgacatccctctgaccggtctttaatcggacctttccttcgggacaggggagacaggtggtgcatggttgtcgtcagctcgtgtcgtgagatgttgggttaagtcccgcaacgagcgcaacccctatcctcagtagccagcatttaaggtgggcactctggn

SEQ ID NO: 99 - DNA, 1247 bp, artificial sequence
  >GCF_003478775.1_01016 Blautia_wexlerae
tcagagagtttgatcctggctcaggatgaacgctggcggcgtgcttaacacatgcaagtcgaacgggaattattttattgaaacttcggtcgatttaatttaattctagtggcggacgggtgagtaacgcgtgggtaacctgccttatacagggggataacagtcagaaatgactgctaataccgcataagcgcacaggaccgcatggtccggtgtgaaaaactccggtggtataagatggacccgcgttggattagcttgttggtggggtaacggcccaccaaggcgacgatccatagccggcctgagagggtgaacggccacattgggactgagacacggcccagactcctacgggaggcagcagtggggaatattgcacaatgggggaaaccctgatgcagcgacgccgcgtgaaggaagaagtatctcggtatgtaaacttctatcagcagggaagatagtgacggtacctgactaagaagccccggctaactacgtgccagcagccgcggtaatacgtagggggcaagcgttatccggatttactgggtgtaaagggagcgtagacggtgtggcaagtctgatgtgaaaggcatgggctcaacctgtggactgcattggaaactgtcatacttgagtgccggaggggtaagcggaattcctagtgtagcggtgaaatgcgtagatattaggaggaacaccagtggcgaaggcggcttactggacggtaactgacgttgaggctcgaaagcgtggggagcaaacaggattagataccctggtagtccacgccgtaaacgatgaatactaggtgtcggggagcaaagctcttcggtgccgtcgcaaacgcagtaagtattccacctggggagtacgttcgcaagaatgaaactcaaaggaattgacggggacccgcacaagcggtggagcatgtggtttaattcgaagcaacgcgaagaaccttaccaagtcttgacatccctctgaccgactcttaaccgagtctttccttcgggacagaggagacaggtggtgcatggttgtcgtcagctcgtgtcgtgagatgttgggttaagtcccgcaacgagcgcaacccctatcctcagtagccagcaagttaagttgggcactctgtggagactgccagggataacctggaggaaggcggggatgacgtcaaatcatcatgccccttatgatttgggctacacacgtgctacaatggcgtaaacaaagggaagcga

SEQ ID NO: 100 - DNA, 968 bp, artificial sequence
  >GCF_003478845.1_03190 Blautia_wexlerae
  misc_feature (1)..(1): n is a, c, g, or t
ntggctcaggatgaacgctggcggcgtgcttaacacatgcaagtcgaacgggaattactttattgaaacttcggtcgatttaatttaattctagtggcggacgggtgagtaacgcgtgggtaacctgccttatacagggggataacagtcagaaatggctgctaataccgcataagcgcacagagctgcatggctcagtgtgaaaaactccggtggtataagatggacccgcgttggattagcttgttggtggggtaacggcccaccaaggcgacgatccatagccggcctgagagggtgaacggccacattgggactgagacacggcccagactcctacgggaggcagcagtggggaatattgcacaatgggggaaaccctgatgcagcgacgccgcgtgaaggaagaagtatctcggtatgtaaacttctatcagcagggaagatagtgacggtacctgactaagaagccccggctaactacgtgccagcagccgcggtaatacgtagggggcaagcgttatccggatttactgggtgtaaagggagcgtagacggtgtggcaagtctgatgtgaaaggcatgggctcaacctgtggactgcattggaaactgtcatacttgagtgccggaggggtaagcggaattcctagtgtagcggtgaaatgcgtagatattaggaggaacaccagtggcgaaggcggcttactggacggtaactgacgttgaggctcgaaagcgtggggagcaaacaggattagataccctggtagtccacgccgtaaacgatgaatactaggtgtcggggagcatggctcttcggtgccgtcgcaaacgcagtaagtattccacctggggagtacgttcgcaagaatgaaactcaaaggaattgacggggacccgcacaagcggtggagcatgtggtttaattcgaagcaacgcgaagaaccttaccaagtcttgacatc

SEQ ID NO: 101 - DNA, 1527 bp, artificial sequence
  >GCF_003479625.1_01820 Blautia_wexlerae
tcagagagtttgatcctggctcaggatgaacgctggcggcgtgcttaacacatgcaagtcgaacgggaaatatttcattgagacttcggtggatttgatttatttctagtggcggacgggtgagtaacgcgtgggtaacctgccttatacagggggataacagtcagaaatggctgctaataccgcataagcgcacagagctgcatggctcagtgtgaaaaactccggtggtataagatggacccgcgttggattagcttgttggtggggtaacggcccaccaaggcgacgatccatagccggcctgagagggtgaacggccacattgggactgagacacggcccagactcctacgggaggcagcagtggggaatattgcacaatgggggaaaccctgatgcagcgacgccgcgtgaaggaagaagtatctcggtatgtaaacttctatcagcagggaagatagtgacggtacctgactaagaagccccggctaactacgtgccagcagccgcggtaatacgtagggggcaagcgttatccggatttactgggtgtaaagggagcgtagacggtgtggcaagtctgatgtgaaaggcatgggctcaacctgtggactgcattggaaactgtcatacttgagtgccggaggggtaagcggaattcctagtgtagcggtgaaatgcgtagatattaggaggaacaccagtggcgaaggcggcttactggacggtaactgacgttgaggctcgaaagcgtggggagcaaacaggattagataccctggtagtccacgccgtaaacgatgaatactaggtgtcggggagcaaagctcttcggtgccgtcgcaaacgcagtaagtattccacctggggagtacgttcgcaagaatgaaactcaaaggaattgacggggacccgcacaagcggtggagcatgtggtttaattcgaagcaacgcgaagaaccttaccaagtcttgacatccgcctgaccgatccttaaccggatctttccttcgggacaggcgagacaggtggtgcatggttgtcgtcagctcgtgtcgtgagatgttgggttaagtcccgcaacgagcgcaacccctatcctcagtagccagcatttaaggtgggcactctggggagactgccagggataacctggaggaaggcggggatgacgtcaaatcatcatgccccttatgatttgggctacacacgtgctacaatggcgtaaacaaagggaagcgagattgtgagatggagcaaatcccaaaaataacgtcccagttcggactgtagtctgcaacccgactacacgaagctggaatcgctagtaatcgcggatcagaatgccgcggtgaatacgttcccgggtcttgtacacaccgcccgtcacaccatgggagtcagtaacgcccgaagtcagtgacctaactgcaaagaaggagctgccgaaggcgggaccgatgactggggtgaagtcgtaacaaggtagccgtatcggaaggtgcggctggatcacctccttt

SEQ ID NO: 102 - DNA, 1525 bp, artificial sequence
  >GCF_003479765.1_03013 Ruminococcaceae_NG18_sp1
tattgagagtttgatcctggctcaggacgaacgctggcggcgtgcttaacacatgcaagtcgaacgagaatctactgaaagagttttcggacaatggatgtagaggaaagtggcggacgggtgagtaacgcgtgaggaacctgccttgaagagggggacaacagttggaaacgactgctaataccgcatgaagcataggggtcgcatgattcttatgccaaagatttatcgcttcaagatggcctcgcgtctgattagctggttggcggggtaacggcccaccaaggcgacgatcagtagccggactgagaggttgaacggccacattgggactgagatacggcccagactcctacgggaggcagcagtggggaatattgggcaatgggcgcaagcctgacccagcaacgccgcgtgaaggaagaaggctttcgggttgtaaacttcttttaagagggaagagcagaagacggtacctctagaataagccacggctaactacgtgccagcagccgcggtaatacgtaggtggcaagcgttgtccggatttactgggtgtaaagggcgtgcagccgggtctgcaagtcagatgtgaaatccatgggctcaacccatgaactgcatttgaaactgtagatcttgagtgtcggaggggcaatcggaattcctagtgtagcggtgaaatgcgtagatattaggaggaacaccagtggcgaaggcggattgctggacgataactgacggtgaggcgcgaaagtgtggggagcaaacaggattagataccctggtagtccacactgtaaacgatgaatactaggtgtgcggggactgaccccctgcgtgccgcagtaaacacaataagtattccacctggggagtacgatcgcaaggttgaaactcaaaggaattgacgggggcccgcacaagcggtggattatgtggtttaattcgaagcaacgcgaagaaccttaccagggtttgacatcctgctaacgaagtagagatacattaggtgctcggggaaagcagagacaggtggtgcatggttgtcgtcagctcgtgtcgtgagatgttgggttaagtcccgcaacgagcgcaacccctattgttagttgctacgcaagagcactctagcgagactgccgttgacaaaacggaggaaggtggggacgacgtcaaatcatcatgccccttatatcctgggctacacacgtaatacaatggcggtcaacagagggaagcaaagccgcgaggcagagcaaacccccaaaagcgtcccagttcggattgtaggctgcaactcgcctgcatgaagtcggaatcgctagtaatcgcggatcagcatgccgcggtgaatacgttcccgggccttgtacacaccgcccgtcacaccatgagagtcgggaacacccgaagtccgtagcctaacctgaaaaggagggcgcggccgaaggtgggttcgataattggggtgaagtcgtaacaaggtagccgttcgagaacgagcggctggatcacctccttt

SEQ ID NO: 103 - DNA, 1501 bp, artificial sequence
  >GCF_003479805.1_01817 Collinsella_stercoris
cggagagttcgatcctggctcaggatgaacgctggcggcgcgcctaacacatgcaagtcgaacggcaccccccttcggggggaagcgagtggcgaacggctgagtaacacgtggagaacccgccccctcctccgggatagcctcgggaaaccgtgggtaataccggatgaccccggcaggccgcatggccggccgggcaaagcccagacgggaggggatggctccgcggcccatcaggtagacggcggggtgacggcccaccgtgccgacgacgggtagccgggttgagagaccgaccggccagattgggactgagacacggcccagactcctacgggaggcagcagtggggaatcttgcgcaatggggggaaccctgacgcagcgacgccgcgtgcgggacgaaggccctcgggtcgtaaaccgctttcagcagggatgagacaagacggtacctgcagaagaagccccggctaactacgtgccagcagccgcggtaatacgtagggggcgagcgttatccggattcattgggcgtaaagcgcgcgtaggcggcccggcaggcagggggtcaaatggcggggctcaaccccgtcccgccccctgaaccgccgggctcgggtccggtaggggagggtggaacacccggtgtagcggtggaatgcgcagatatcgggtggaacaccggtggcgaaggcggccctctgggccgagaccgacgctgaggcgcgaaagctgggggagcgaacaggattagataccctggtagtcccagccgtaaacgatggacgctaggtgtggggggacgatccctccgtgccgcagccaacgcattaagcgtcccgcctggggagtacggccgcaaggctaaaactcaaaggaattgacgggggcccgcacaagcagcggagcatgtggcttaattcgaagcaacgcgaagaaccttaccagggcttgacatatgggtgaagcgggggagaccccgtggccgagaggagcccatacaggtggtgcatggctgtcgtcagctcgtgtcgtgagatgtttggttaagtccagcaacgagcgcaacccccgccgcatgttgccagcacctcgggtgggcacccatgcgggaccgccggagtcaatccggaggagggcggggacgacgtcaagtcatcatgccccttatgccctgggctgcacacgtgctacaatggccggtacagcgggatgcgatggcgcgagccggagcggatccctgaaagccggccccagttcggattgggggctgcaacccgcccccatgaagtcggagttgctagtaatcgcggatcagcatgccgcggtgaatgcgttcccgggccttgtacacaccgcccgtcacaccacccgagtcgtctgcacccgaagtcgccggcccaaccgtttggggggaggcgccgaaggtgtggagggtgaggggggtgaagtcgtaacaaggtagccgtacgggaacgtgcggctggatcacctccttt

SEQ ID NO: 104 - DNA, 1240 bp, artificial sequence
  >GCF_003479895.1_00564 Blautia_wexlerae
cgacgatccatagccggcctgagagggtgaacggccacattgggactgagacacggcccagactcctacgggaggcagcagtggggaatattgcacaatgggggaaaccctgatgcagcgacgccgcgtgaaggaagaagtatctcggtatgtaaacttctatcagcagggaagatagtgacggtacctgactaagaagccccggctaactacgtgccagcagccgcggtaatacgtagggggcaagcgttatccggatttactgggtgtaaagggagcgtagacggtgtggcaagtctgatgtgaaaggcatgggctcaacctgtggactgcattggaaactgtcatacttgagtgccggaggggtaagcggaattcctagtgtagcggtgaaatgcgtagatattaggaggaacaccagtggcgaaggcggcttactggacggtaactgacgttgaggctcgaaagcgtggggagcaaacaggattagataccctggtagtccacgccgtaaacgatgaatactaggtgtcggggagcaaagctcttcggtgccgtcgcaaacgcagtaagtattccacctggggagtacgttcgcaagaatgaaactcaaaggaattgacggggacccgcacaagcggtggagcatgtggtttaattcgaagcaacgcgaagaaccttaccaagtcttgacatccgcctgaccgatccttaaccggatctttccttcgggacaggcgagacaggtggtgcatggttgtcgtcagctcgtgtcgtgagatgttgggttaagtcccgcaacgagcgcaacccctatcctcagtagccagcatttaaggtgggcactctggggagactgccagggataacctggaggaaggcggggatgacgtcaaatcatcatgccccttatgatttgggctacacacgtgctacaatggcgtaaacaaagggaagcgagattgtgagatggagcaaatcccaaaaataacgtcccagttcggactgtagtctgcaacccgactacacgaagctggaatcgctagtaatcgcggatcagaatgccgcggtgaatacgttcccgggtcttgtacacaccgcccgtcacaccatgggagtcagtaacgcccgaagtcagtgacctaactgcaaagaaggagctgccgaaggcgggaccgatgactggggtgaagtcgtaacaaggtagccgtatcggaaggtgcggctggatcacctcctt

SEQ ID NO: 105 - DNA, 1406 bp, artificial sequence
  >GCF_003480205.1_03802 Blautia_wexlerae
gagtaacgcgtgggtaacctgccttatacagggggataacagtcagaaatggctgctaataccgcataagcgcacagagctgcatggctcagtgtgaaaaactccggtggtataagatggacccgcgttggattagcttgttggtggggtaacggcccaccaaggcgacgatccatagccggcctgagagggtgaacggccacattgggactgagacacggcccagactcctacgggaggcagcagtggggaatattgcacaatgggggaaaccctgatgcagcgacgccgcgtgaaggaagaagtatctcggtatgtaaacttctatcagcagggaagatagtgacggtacctgactaagaagccccggctaactacgtgccagcagccgcggtaatacgtagggggcaagcgttatccggatttactgggtgtaaagggagcgtagacggtgtggcaagtctgatgtgaaaggcatgggctcaacctgtggactgcattggaaactgtcatacttgagtgccggaggggtaagcggaattcctagtgtagcggtgaaatgcgtagatattaggaggaacaccagtggcgaaggcggcttactggacggtaactgacgttgaggctcgaaagcggggggagcaaacaggattagataccctggtagtccacgccgtaaacgatgaatactaggtgtcggggagcatggctcttcggtgccgtcgcaaacgcagtaagtattccacctggggagtacgttcgcaagaatgaaactcaaaggaattgacggggacccgcacaagcggtggagcatgtggtttaattcgaagcaacgcgaagaaccttaccaaatcttgacatccctctgaccggtctttaatcggaccttctcttcggagcagaggtgacaggtggtgcatggttgtcgtcagctcgtgtcgtgagatgttgggttaagtcccgcaacgagcgcaacccctatcctcagtagccagcatttaaggtgggcactctggggagactgccagggataacctggaggaaggcggggatgacgtcaaatcatcatgccccttatgatttgggctacacacgtgctacaatggcgtaaacaaagggaagcgagattgtgagatggagcaaatcccaaaaataacgtcccagttcggactgtagtctgcaacccgactacacgaagctggaatcgctagtaatcgcggatcagaatgccgcggtgaatacgttcccgggtcttgtacacaccgcccgtcacaccatgggagtcagtaacgcccgaagtcagtgacctaactgcaaagaaggagctgccgaaggcgggaccgatgactggggtgaagtcgtaacaaggtagccgtatcggaaggtgcggctggatcacctccttt

SEQ ID NO: 106 - DNA, 1512 bp, artificial sequence
  >GCF_003480285.1_02026 Blautia_wexlerae
  misc_feature (1)..(1): n is a, c, g, or t
ntggctcaggatgaacgctggcggcgtgcttaacacatgcaagtcgaacgggaaatatttcattgagacttcggtggatttgatctatttctagtggcggacgggtgagtaacgcgtgggtaacctgccttatacagggggataacagtcagaaatggctgctaataccgcataagcgcacagagctgcatggctcagtgtgaaaaactccggtggtataagatggacccgcgttggattagctggttggtggggtaacggcccaccaaggcgacgatccatagccggcctgagagggtgaacggccacattgggactgagacacggcccagactcctacgggaggcagcagtggggaatattgcacaatgggggaaaccctgatgcagcgacgccgcgtgaaggaagaagtatctcggtatgtaaacttctatcagcagggaagatagtgacggtacctgactaagaagccccggctaactacgtgccagcagccgcggtaatacgtagggggcaagcgttatccggatttactgggtgtaaagggagcgtagacggtgtggcaagtctgatgtgaaaggcatgggctcaacctgtggactgcattggaaactgtcatacttgagtgccggaggggtaagcggaattcctagtgtagcggtgaaatgcgtagatattaggaggaacaccagtggcgaaggcggcttactggacggtaactgacgttgaggctcgaaagcgtggggagcaaacaggattagataccctggtagtccacgccgtaaacgatgaatactaggtgtcggggagcatggctcttcggtgccgtcgcaaacgcagtaagtattccacctggggagtacgttcgcaagaatgaaactcaaaggaattgacggggacccgcacaagcggtggagcatgtggtttaattcgaagcaacgcgaagaaccttaccaagtcttgacatccgcctgaccgatccttaaccggatctttccttcgggacaggcgagacaggtggtgcatggttgtcgtcagctcgtgtcgtgagatgttgggttaagtcccgcaacgagcgcaacccctatcctcagtagccagcatttaaggtgggcactctggggagactgccagggataacctggaggaaggcggggatgacgtcaaatcatcatgccccttatgatttgggctacacacgtgctacaatggcgtaaacaaagggaagcgagattgtgagatggagcaaatcccaaaaataacgtcccagttcggactgtagtctgcaacccgactacacgaagctggaatcgctagtaatcgcggatcagaatgccgcggtgaatacgttcccgggtcttgtacacaccgcccgtcacaccatgggagtcagtaacgcccgaagtcagtgacctaactgcaaagaaggagctgccgaaggcgggaccgatgactggggtgaagtcgtaacaaggtagccgtatcggaaggtgcggctggatcacctccttt

SEQ ID NO: 107 - DNA, 985 bp, artificial sequence
  >GCF_003480305.1_03610 Blautia_wexlerae
  misc_feature (981)..(985): n is a, c, g, or t
tcagagagtttgatcctggctcaggatgaacgctggcggcgtgcttaacacatgcaagtcgaacgggaattactttattgaaacttcggtcgatttaatttaattctagtggcggacgggtgagtaacgcgtgggtaacctgccttatacagggggataacagtcagaaatggctgctaataccgcataagcgcacagagctgcatggctcagtgtgaaaaactccggtggtataagatggacccgcgttggattagcttgttggtggggtaacggcccaccaaggcgacgatccatagccggcctgagagggtgaacggccacattgggactgagacacggcccagactcctacgggaggcagcagtggggaatattgcacaatgggggaaaccctgatgcagcgacgccgcgtgaaggaagaagtatctcggtatgtaaacttctatcagcagggaagatagtgacggtacctgactaagaagccccggctaactacgtgccagcagccgcggtaatacgtagggggcaagcgttatccggatttactgggtgtaaagggagcgtagacggtgtggcaagtctgatgtgaaaggcatgggctcaacctgtggactgcattggaaactgtcatacttgagtgccggaggggtaagcggaattcctagtgtagcggtgaaatgcgtagatattaggaggaacaccagtggcgaaggcggcttactggacggtaactgacgttgaggctcgaaagcgtggggagcaaacaggattagataccctggtagtccacgccgtaaacgatgaatactaggtgtcggggagcaaagctcttcggtgccgtcgcaaacgcagtaagtattccacctggggagtacgttcgcaagaatgaaactcaaaggaattgacggggacccgcacaagcggtggagcatgtggtttaattcgaagcaacgcgaagaaccttaccaagtcttgacnnnnn

SEQ ID NO: 108 - DNA, 1524 bp, artificial sequence
  >GCF_003480345.1_02183 Hungatella_sp1
atgagagtttgatcctggctcaggatgaacgctggcggcgtgcttaacacatgcaagtcgagcgaagcgatttaaatgagacttcggtggattttaaattgactgagcggcggacgggtgagtaacgcgtggataacctgcctcacacagggggataacagttagaaatgactgctaataccgcataagcgcacggtaccgcatggtacagtgtgaaaaactccggtggtgtgagatggatccgcgtctgattaggtagttggtgaggtaacggcccaccaagccgacgatcagtagccgacctgagagggtgaccggccacattgggactgagacacggcccaaactcctacgggaggcagcagtggggaatattgcacaatgggcgaaagcctgatgcagcaacgccgcgtgagtgaagaagtatctcggtatgtaaagctctatcagcagggaagaaaatgacggtacctgactaagaagccccggctaactacgtgccagcagccgcggtaatacgtagggggcaagcgttatccggatttactgggtgtaaagggagcgcagacggcactgcaagtctgaagtgaaagcccggggctcaaccccgggactgctttggaaactgtagagctagagtgctggagaggcaagcggaattcctagtgtagcggtgaaatgcgtagatattaggaagaacaccagtggcgaaggcggcttgctggacagtaactgacgttcaggctcgaaagcgtggggagcaaacaggattagataccctggtagtccacgccgtaaacgatgaatactaggtgttggtgggcaaagcccatcggtgccgccgcaaacgcaataagtattccacctggggagtacgttcgcaagaatgaaactcaaaggaattgacggggacccgcacaagcggtggagcatgtggtttaattcgaagcaacgcgaagaaccttaccaagtcttgacatcgtgatgaccggaacttaaccgttccttcccttcggggcatcatagacaggtggtgcatggttgtcgtcagctcgtgtcgtgagatgttgggttaagtcccgcaacgagcgcaacccttatcctcagtagccagcagtaagatgggcactctggggagactgccagggataacctggaggaaggtggggatgacgtcaaatcatcatgccccttatgatttgggctacacacgtgctacaatggcgtaaacaaagggaagcaagagggtgacctggagcaaatcccaaaaataacgtcccagttcggactgtagtctgcaacccgactacacgaagctggaatcgctagtaatcgcagatcagaatgctgcggtgaatacgttcccgggtcttgtacacaccgcccgtcacaccatgggagtcagcaacgcccgaagtcagtgactcaaccgcaaggagagagctgccgaaggcggggcaggtaactggggtgaagtcgtaacaaggtagccgtatcggaaggtgcggctggatcacctccttt

SEQ ID NO: 109 - DNA, 1433 bp, artificial sequence
  >GCF_003480495.1_03793 Blautia_wexlerae
tcagagagtttgatcctggctcaggatgaacgctggcggcgtgcttaacacatgcaagtcgaacgggaatcacttcattgagacttcggtggatttgatttgattctagtggcggacgggtgagtaacgcgtgggtaacctgccttatacagggggataacagtcagaaatgactgctaataccgcataagcgcacaggaccgcatggtccggtgtgaaaaactccggtggtataagatggacccgcgttggattagcttgttggtggggtaacggcccaccaaggcgacgatccatagccggcctgagagggtgaacggccacattgggactgagacacggcccagactcctacgggaggcagcagtggggaatattgcacaatgggggaaaccctgatgcagcgacgccgcgtgaaggaagaagtatctcggtatgtaaacttctatcagcagggaagatagtgacggtacctgactaagaagccccggctaactacgtgccagcagccgcggtaatacgtagggggcaagcgttatccggatttactgggtgtaaagggagcgtagacggtgtggcaagtctgatgtgaaaggcatgggctcaacctgtggactgcattggaaactgtcatacttgagtgccggaggggtaagcggaattcctagtgtagcggtgaaatgcgtagatattaggaggaacaccagtggcgaaggcggcttactggacggtaactgacgttgaggctcgaaagcgtggggagcaaacaggattagataccctggtagtccacgccgtaaacgatgaatactaggtgtcggggagcatggctcttcggtgccgtcgcaaacgcagtaagtattccacctggggagtacgttcgcaagaatgaaactcaaaggaattgacggggacccgcacaagcggtggagcatgtggtttaattcgaagcaacgcgaagaaccttaccaagtcttgacatccctctgaccgactcttaaccgagtctttccttcgggacagaggagacaggtggtgcatggttgtcgtcagctcgtgtcgtgagatgttgggttaagtcccgcaacgagcgcaacccctatcctcagtagccagcaagttaagttgggcactctgtggagactgccagggataacctggaggaaggcggggatgacgtcaaatcatcatgccccttatgatttgggctacacacgtgctacaatggcgtaaacaaagggaagcgagagggtgacctggagcaaatcccaaaaataacgtcccagttcggactgtagtctgcaacccgactacacgaagctggaatcgctagtaatcgcggatcagaatgccgcggtgaatacgttcccgggtcttgtacacaccgcccgtcacaccatgggagtcagtaacgcccgaagtcagtgacctaa

SEQ ID NO: 110 - DNA, 1518 bp, artificial sequence
  >GCF_003480505.1_01215 Blautia_wexlerae
tcagagagtttgatcctggctcaggatgaacgctggcggcgtgcttaacgcatgcaagtcgaacgggaattactttattgaaacttcggtcgatttaatttaattctagtggcggacgggggagcaacgcgtggggaacctgccttatacagggggataacagtccgaaatggctgctaataccgcataagcgcacagagctgcatggctcagagtgaaaaactccggtggtataagatggacccgcgttggattagctagttggtggggtaacggcccaccaaggcgacgatccatagccggcctgagagggtgaacggccacattgggactgagacacggcccagactcctacgggaggcagcagtggggaatattgcacaatgggggaaaccctgatgcagcgacgccgcgtgaaggaagaagtatctcggtatgtaaacttctatcagcagggaagatagtgacggtacctgactaagaagccccggctaactacgtgccagcagccgcggtaatacgtagggggcaagcgttatccggatttactgggtgtaaagggagcgtagacggtgtggcaagtctgatgtgaaaggcatgggctcaacctgtggactgcattggaaactgtcatacttgagtgccggaggggtaagcggaattcctagtgtagcggtgaaatgcgtagatattaggaggaacaccagtggcgaaggcggcttactggacggtaactgacgttgaggctcgaaagcgtggggagcaaacaggattagatcccctggtagtccacgccgtaaacgatgaatactaggtgtcggggagcatggctcttcggtgccgtcgcaaacgcagtaagtattccacctggggagtacgttcgcaagaatgaaactcaaaggaattgacggggacccgcacaagcggtggagcatgtggtttaattcgaagcaacgcgaagaaccttaccaagtcttgacatccgcctgaccgatccttaaccggatctttccttcaggacaggcgagacaggtggtgcatggttgtcgtcagctcgtgtcgtgagatgttgggttaagtcccgcaacgagcgcaacccctatcctcagtagccagcatttaaggtgggcactctggggagactgccagggataacctggaggaaggcggggatgacgtcaaatcatcatgccccttatgatttgggctacacacgtgctacaatggcgtaaacaaagggaagcgagattgtgagatggagcaaatcccaaaaataacgtcccagttcggactgtagtctgcaacccgactacacgaagctggaatcgctagtaatcgcggatcagaatgccgcggtgaatacgttcccgggtcttgtacacaccgcccgtcacaccatgggagtcagtaacgcccgaagtcagtgacctaactgcaaagaaggagctgccgaaggcgggaccgatgactggggtgaagtcgtaacaaggtagccgtatcggaaggtgcggctggatc

SEQ ID NO: 111 - DNA, 1506 bp, artificial sequence
  >GCF_003480765.1_01088 Blautia_wexlerae
tcagagagcttgatcctggctcaggatgaacgctggcggcgtgcttaacacatgcaaggcgaacgggaaatatttcattgagacttcggtggatttgatctatttctagtggcggacgggtgaggaacgcgtgggtaacctgccttatacagggggataatagtcagaaatggctgctaataccgcataagcgcacagagctgcatggctcagtatgaaaaacttcggtggtataagatggacccgcgttggattagcttgttggtggggtaacggcccaccaaggcgacgatccatagccggcctgagagggtgaacggccacattgggactgagacacggcccagactcctacgggaggcagcagtggggaatattgcacaatgggggaaaccctgatgcagcgacgccgcgtgaaggaagaagtatctcggtatgtaaacttctatcagcagggaagatagtgacggtacctgactaagaagccccggctaactacgtgccagcagccgcggtaatacgtagggggcaagcgttatccggatttactgggtgtaaagggagcgtagacggtgtggcaagtctgatgtgaaaggcatgggctcaacctgtggactgcattggaaactgtcatacttgagtgccggaggggtaagcggaattcctagtgtagcggtgaaatgcgtagatattaggaggaacaccagtggcgaaggcggcttactggacggtaactgacgttgaggctcgaaagcgtggggagcaaacaggattagataccctggtagtccacgccgtaaacgatgaatactaggtgtcggggagcaaagctcttcggtgccgtcgcaaacgcagtaagtattccacctggggagtacgttcgcaagaatgaaactcaaaggaattgacggggacccgcacaagcggtggagcatgtggtttaattcgaagcaacgcgaagaaccttaccaaatcttgacatccctctgaccggtctttaatcggaccttctcttcggagcagaggtgacaggtggtgcatggttgtcgtcagctcgtgtcgtgagatgttgggttaagtcccgcaacgagtgcaacccctatcctcagtagccagcaagttaagttgggcactctggggagactgccagggataacctggaggaaggcggggatgacgtcaaatcatcatgccccttatgatttgggctacacacgtgctacaatggcgtaaacaaagggaagcgagattgtgagatggagcaaatcccaaaaataacgtcccagttcggactgtagtctgcaacccgactacacgaagctggaatcgctagtaatcgcggatcagaatgccgcggtgaatacgttcccgggtcttgtacacaccgcccgtcacaccatgggagtcagtaacgcccgaagtcagtgacctaactgcaaagaaggagctgccgaaggcgggaccgatgactggggtgaagtcgtaacaaggtagccgtatcggaag

SEQ ID NO: 112 - DNA, 935 bp, artificial sequence
  >GCF_003480885.1_00435 Blautia_wexlerae
gagtaacgcgtgggtaacctgccttatacagggggataacagtcagaaatggctgctaataccgcataagcgcacagagctgcatggctcagtgtgaaaaactccggtggtataagatggacccgcgttggattagctagttggtggggtaacggcccaccaaggcgacgatccatagccggcctgagagggtgaacggccacattgggactgagacacggcccagactcctacgggaggcagcagtggggaatattgcacaatgggggaaaccctgatgcagcgacgccgcgtgaaggaagaagtatctcggtatgtaaacttctatcagcagggaagatagtgacggtacctgactaagaagccccggctaactacgtgccagcagccgcggtaatacgtagggggcaagcgttatccggatttactgggtgtaaagggagcgtagacggtgtggcaagtctgatgtgaaaggcatgggctcaacctgtggactgcattggaaactgtcatacttgagtgccggaggggtaagcggaattcctagtgtagcggtgaaatgcgtagatattaggaggaacaccagtggcgaaggcggcttactggacggtaactgacgttgaggctcgaaagcgtggggagcaaacaggattagataccctggtagtccacgccgtaaacgatgaatactaggtgtcgggtggcaaagccattcggtgccgtcgcaaacgcagtaagtattccacctggggagtacgttcgcaagaatgaaactcaaaggaattgacggggacccgcacaagcggtggagcatgtggtttaattcgaagcaacgcgaagaaccttaccaaatcttgacatccctctgaccggtctttaatcggaccttctcttcggagcagaggtgacaggtggtgcatggttgtcgtcagctc

SEQ ID NO: 113 - DNA, 1516 bp, artificial sequence
  >GCF_003481145.1_00807 Ruminococcaceae_NG18_sp1
  misc_feature (1)..(1): n is a, c, g, or t
ntcctggctcaggacgaacgctggcggcgtgcttaacacatgcaagtcgaacgagaatctactgaaagagttttcggacaatggaagtagaggaaagtggcggacgggtgagtaacgcgtgaggaacctgccttgaagagggggacaacagttggaaacgactgctaataccgcatgaagcataggggtcgcatgattcttatgccaaagatttatcgcttcaagatggcctcgcgtctgattagctggttggcggggtaacggcccaccaaggcgacgatcagtagccggactgagaggttgaacggccacattgggactgagatacggcccagactcctacgggaggcagcagtggggaatattgggcaatgggcgcaagcctgacccagcaacgccgcgtgaaggaagaaggctttcgggttgtaaacttcttttaagagggaagagcagaagacggtacctctagaataagccacggctaactacgtgccagcagccgcggtaatacgtaggtggcaagcgttgtccggatttactgggtgtaaagggcgtgcagccgggtctgcaagtcagatgtgaaatccatgggctcaacccatgaactgcatttgaaactgtagatcttgagtgtcggaggggcaatcggaattcctagtgtagcggtgaaatgcgtagatattaggaggaacaccagtggcgaaggcggattgctggacgataactgacggtgaggcgcgaaagtgtggggagcaaacaggattagataccctggtagtccacactgtaaacgatgaatactaggtgtgcggggactgaccccctgcgtgccgcagtaaacacaataagtattccacctggggagtacgatcgcaaggttgaaactcaaaggaattgacgggggcccgcacaagcggtggattatgtggtttaattcgaagcaacgcgaagaaccttaccagggtttgacatcctgctaacgaagtagagatacattaggtgcccttcggggaaagcagagacaggtggtgcatggttgtcgtcagctcgtgtcgtgagatgttgggttaagtcccgcaacgagcgcaacccctattgttagttgctacgcaagagcactctagcgagactgccgttgacaaaacggaggaaggtggggacgacgtcaaatcatcatgccccttatatcctgggctacacacgtaatacaatggcggtcaacagagggaagcaaagccgcgaggcagagcaaacccccaaaagccgtcccagttcggattgtaggctgcaactcgcctgcatgaagtcggaatcgctagtaatcgcggatcagcatgccgcggtgaatacgttcccgggccttgtacacaccgcccgtcacaccatgagagtcgggaacacccgaagtccgtagcctaacctgaaaaggagggcgcggccgaaggtgggttcgataattggggtgaagtcgtaacaaggtagccgttcgagaacgagcggctggatcacctccttt

SEQ ID NO: 114 - DNA, 1562 bp, artificial sequence
  >GCF_003481625.1_02713 Blautia_wexlerae
  misc_feature (129)..(138): n is a, c, g, or t
cagagagtttgatcctggctcaggatgaacgctggcggcgtgcttaacacatgcaagtcgaacgggaattactttattgaaacttcggtcgatttaatttaattctagtggcggacgggtgagtaacgnnnnnnnnnnttctagtggcggacgggtgagtaacgcgtgggtaacctgccttatacagggggataacagtcagaaatggctgctaataccgcataagcgcacagagctgcatggctcagtgtgaaaaactccggtggtataagatggacccgcgttggattagctggttggtggggtaacggcccaccaaggcgacgatccatagccggcctgagagggtgaacggccacattgggactgagacacggcccagactcctacgggaggcagcagtggggaatattgcacaatgggggaaaccctgatgcagcgacgccgcgtgaaggaagaagtatctcggtatgtaaacttctatcagcagggaagatagtgacggtacctgactaagaagccccggctaactacgtgccagcagccgcggtaatacgtagggggcaagcgttatccggatttactgggtgtaaagggagcgtagacggtgtggcaagtctgatgtgaaaggcatgggctcaacctgtggactgcattggaaactgtcatacttgagtgccggaggggtaagcggaattcctagtgtagcggtgaaatgcgtagatattaggaggaacaccagtggcgaaggcggcttactggacggtaactgacgttgaggctcgaaagcgtggggagcaaacaggattagataccctggtagtccacgccgtaaacgatgaatactaggtgtcggggagcatggctcttcggtgccgtcgcaaacgcagtaagtattccacctggggagtacgttcgcaagaatgaaactcaaaggaattgacggggacccgcacaagcggtggagcatgtggtttaattcgaagcaacgcgaagaaccttaccaaatcttgacatccctctgaccggtctttaatcggaccttctcttcggagcagaggtgacaggtggtgcatggttgtcgtcagctcgtgtcgtgagatgttgggttaagtcccgcaacgagcgcaacccctatcctcagtagccagcatttaaggtgggcactctggggagactgccagggataacctggaggaaggcggggatgacgtcaaatcatcatgccccttatgatttgggctacacacgtgctacaatggcgtaaacaaagggaagcgagattgtgagatggagcaaatcccaaaaataacgtcccagttcggactgtagtctgcaacccgactacacgaagctggaatcgctagtaatcgcggatcagaatgccgcggtgaatacgttcccgggtcttgtacacaccgcccgtcacaccatgggagtcagtaacgcccgaagtcagtgacctaactgcaaagaaggagctgccgaaggcgggaccgatgactggggtgaagtcgtaacaaggtagccgtatcggaaggtgcggctggatcacctccttt

SEQ ID NO: 115 - DNA, 1424 bp, artificial sequence
  >GCF_003481765.1_04039 Hungatella_sp1
atgagagtttgatcctggctcaggatgaacgctggcggcgtgcttaacacatgcaagtcgagcgaagcaatttaagtgaagttttcggatggatcttaaattgactgagcggcggacgggtgagtaacgcgtggataacctgcctcacacagggggataacagttagaaatgactgctaataccgcataagcgcacggtaccgcatggtacagtgtgaaaaactccggtggtgtgagatggatccgcgtctgattaggtagttggtgaggtaacggcccaccaagccgacgatcagtagccgacctgagagggtgaccggccacattgggactgagacacggcccaaactcctacgggaggcagcagtggggaatattgcacaatgggcgaaagcctgatgcagcaacgccgcgtgagtgaagaagtatctcggtatgtaaagctctatcagcagggaagaaaatgacggtacctgactaagaagccccggctaactacgtgccagcagccgcggtaatacgtagggggcaagcgttatccggatttactgggtgtaaagggagcgcagacggcactgcaagtctgaagtgaaagcccggggctcaaccccgggactgctttggaaactgtagagctagagtgctggagaggcaagcggaattcctagtgtagcggtgaaatgcgtagatattaggaagaacaccagtggcgaaggcggcttgctggacagtaactgacgttcaggctcgaaagcgtggggagcaaacaggattagataccctggtagtccacgccgtaaacgatgaatactaggtgttggtgggcaaagcccatcggtgccgccgcaaacgcaataagtattccacctggggagtacgttcgcaagaatgaaactcaaaggaattgacggggacccgcacaagcggtggagcatgtggtttaattcgaagcaacgcgaagaaccttaccaagtcttgacatcgtgatgaccggaacttaaccgttccttcccttcggggcatcatagacaggtggtgcatggttgtcgtcagctcgtgtcgtgagatgttgggttaagtcccgcaacgagcgcaacccttatcctcagtagccagcagtaagatgggcactctggggagactgccagggataacctggaggaaggtggggatgacgtcaaatcatcatgccccttatgatttgggctacacacgtgctacaatggcgtaaacaaagggaagcgatagggtgacctggagcaaatcccaaaaataacgtcccagttcggactgtagtctgcaacccgactacacgaagctggaatcgctagtaatcgcagatcagaatgctgcggtgaatacgttcccgggtcttgtacacaccgcccgtcacaccatgggagtcagcaacgcccgaagtcagt

SEQ ID NO: 116 - DNA, 1527 bp, artificial sequence
  >GCF_003603885.1_00284 Blautia_wexlerae
tcagagagtttgatcctggctcaggatgaacgctggcggcgtgcttaacacatgcaagtcgaacgggaaatatttcattgagacttcggtggatttgatctatttctagtggcggacgggtgagtaacgcgtgggtaacctgccttatacagggggataacagtcagaaatggctgctaataccgcataagcgcacagagctgcatggctcagtgtgaaaaactccggtggtataagatggacccgcgttggattagctagttggtggggtaacggcccaccaaggcgacgatccatagccggcctgagagggtgaacggccacattgggactgagacacggcccagactcctacgggaggcagcagtggggaatattgcacaatgggggaaaccctgatgcagcgacgccgcgtgaaggaagaagtatctcggtatgtaaacttctatcagcagggaagatagtgacggtacctgactaagaagccccggctaactacgtgccagcagccgcggtaatacgtagggggcaagcgttatccggatttactgggtgtaaagggagcgtagacggtgtggcaagtctgatgtgaaaggcatgggctcaacctgtggactgcattggaaactgtcatacttgagtgccggaggggtaagcggaattcctagtgtagcggtgaaatgcgtagatattaggaggaacaccagtggcgaaggcggcttactggacggtaactgacgttgaggctcgaaagcgtggggagcaaacaggattagataccctggtagtccacgccgtaaacgatgaatactaggtgtcgggtggcagagccattcggtgccgtcgcaaacgcagtaagtattccacctggggagtacgttcgcaagaatgaaactcaaaggaattgacggggacccgcacaagcggtggagcatgtggtttaattcgaagcaacgcgaagaaccttaccaaatcttgacatccctctgaccggtctttaatcggaccttctcttcggagcagaggtgacaggtggtgcatggttgtcgtcagctcgtgtcgtgagatgttgggttaagtcccgcaacgagcgcaacccctatcctcagtagccagcatttaaggtgggcactctggggagactgccagggataacctggaggaaggcggggatgacgtcaaatcatcatgccccttatgatttgggctacacacgtgctacaatggcgtaaacaaagggaagcgagattgtgagatggagcaaatcccaaaaataacgtcccagttcggactgtagtctgcaacccgactacacgaagctggaatcgctagtaatcgcggatcagaatgccgcggtgaatacgttcccgggtcttgtacacaccgcccgtcacaccatgggagtcagtaacgcccgaagtcagtgacctaactgcaaagaaggagctgccgaaggcgggaccgatgactggggtgaagtcgtaacaaggtagccgtatcggaaggtgcggctggatcacctccttt

SEQ ID NO: 117 - DNA, 1523 bp, artificial sequence
  >GCF_004166975.1_01471 Parabacteroides_merdae
cgaagagtttgatcctggctcaggatgaacgctagcgacaggcttaacacatgcaagtcgaggggcagcacagggtagcaatacttgggtggcgaccggcgcacgggtgagtaacgcgtatgcaacttacctatcagagggggatagcccggcgaaagtcggattaataccccatgaaacaggggtcccgcatgggaatatttgttaaagattcatcgctgatagataggcatgcgttccattaggcagttggcggggtaacggcccaccaaaccgacgatggataggggttctgagaggaaggtcccccacattggtactgagacacggaccaaactcctacgggaggcagcagtgaggaatattggtcaatggccgagaggctgaaccagccaagtcgcgtgaaggaagaaggatctatggtttgtaaacttcttttataggggaataaagtggaggacgtgtccttttttgtatgtaccctatgaataagcatcggctaactccgtgccagcagccgcggtaatacggaggatgcgagcgttatccggatttattgggtttaaagggtgcgtaggtggtgatttaagtcagcggtgaaagtttgtggctcaaccataaaattgccgttgaaactgggttacttgagtgtgtttgaggtaggcggaatgcgtggtgtagcggtgaaatgcatagatatcacgcagaactccgattgcgaaggcagcttactaaaccataactgacactgaagcacgaaagcgtggggatcaaacaggattagataccctggtagtccacgcagtaaacgatgattactaggagtttgcgatacaatgtaagctctacagcgaaagcgttaagtaatccacctggggagtacgccggcaacggtgaaactcaaaggaattgacgggggcccgcacaagcggaggaacatgtggtttaattcgatgatacgcgaggaaccttacccgggtttgaacgtagtctgaccggagtggaaacactttttctagcaatagcagattacgaggtgctgcatggttgtcgtcagctcgtgccgtgaggtgtcggcttaagtgccataacgagcgcaacccttatcactagttactaacaggtgaagctgaggactctggtgagactgccagcgtaagctgtgaggaaggtggggatgacgtcaaatcagcacggcccttacatccggggcgacacacgtgttacaatggcatggacaaagggcagctacctggcgacaggatgctaatctccaaaccatgtctcagttcggatcggagtctgcaactcgactccgtgaagctggattcgctagtaatcgcgcatcagccatggcgcggtgaatacgttcccgggccttgtacacaccgcccgtcaagccatgggagccgggggtacctgaagtccgtaaccgcaaggatcggcctagggtaaaactggtgactggggctaagtcgtaacaaggtagccgtaccggaaggtgcggctggaacacctccttt

SEQ ID NO: 118 - DNA, 1511 bp, artificial sequence
  >GCF_004340125.1_02712 Harryflintia_acetispora
ctaaagagtttgatcctggctcaggacgaacgctggcggcgcgcctaacacatgcaagtcgaacggagaaatgctaagcttgctttgcatttcttagtggcggacgggtgagtaacacgtgagcaacctgcctttgtgaggggaataacgtctggaaacggacgctaataccgcataacgtcaaggaaccgcatggttttttgaccaaagattttatcgcacaaagatgggctcgcggctgattagctagttggcggggtaacggcccaccaaggcgacgatcagtagccggactgagaggttgatcggccacattgggactgagacacggcccagactcctacgggaggcagcagtgggggatattgcacaatgggggaaaccctgatgcagcgacgccgcgtgagggaagacggttttcggattgtaaacctctgtcttcagggacgaaatcaatgacggtacctgaggaggaagccacggctaactacgtgccagcagccgcggtaatacgtaggtggcaagcgttgtccggaattactgggtgtaaagggagcgtaggcgggaatgcaagttgaatgtttaaactatcggctcaactgataatcgcgttcaaaactgcatttcttgagtggagtagaggcaggcggaattcctagtgtagcggtgaaatgcgtagatattaggaggaacaccagtggcgaaggcggcctgctgggctctaactgacgctgaggctcgaaagcgtgggtagcaaacaggattagataccctggtagtccacgccgtaaacgatgattactaggtgtggggggactgaccccttccgtgccggagttaacacaataagtaatccacctggggagtacggtcgcaagactgaaactcaaaggaattgacgggggcccgcacaagcagtggagtatgtggtttaattcgaagcaacgcgaagaaccttaccaggtcttgacatcgtgcgcataccgtagagatacgggaagtccttcgggacgcatagacaggtggtgcatggttgtcgtcagctcgtgtcgtgagatgttgggttaagtcccgcaacgagcgcaacccttattattagttgctacgcaagagcactctaatgagactgccgttgacaaaacggaggaaggtggggatgacgtcaaatcatcatgccccttatgacctgggctacacacgtactacaatggcacttaacagagggaagcaagaccgcgaggtggagcaaacccccaaaaagtgtctcagttcggattgcaggctgcaacccgcctgtatgaagtcggaattgctagtaatcgcggatcagcatgccgcggtgaatacgttcccgggccttgtacacaccgcccgtcacaccatgagagccggtaacacccgaagtcagtagcctaaccgcaaggagggcgctgccgaaggtgggattggtgattagggtgaagtcgtaacaaggtagccgtatcggaaggtgcggctggatcacctccttt

SEQ ID NO: 119 - DNA, 1239 bp, artificial sequence
  >GCF_004345005.1_02384 [Extibacter]_muris
cgagagtttgatcctggctcaggatgaacgctggcggcgtgcttaacacatgcaagtcgagcgaagcgccttatttagattccttcgggatgaaggatatggcgactgagcggcggacgggtgagtaacgcgtgggcaacctgccttacacagggggataacagctagaaatggctgctaataccgcataaggccacggtaccgcatggtagggtggcaaaagctccggcggtgtaagatgggcccgcgtctgattaggtagttggtgcggtaacggcgcaccaagcctgcgatcagtagccgacctgagagggtgaccggccacattgggactgagacacggcccaaactcctacgggaggcagcagtggggaatattgcacaatgggggaaaccctgatgcagcgacgccgcgtgaaggatgaagtatttcggtatgtaaacttctatcagcagggaagaagatgacggtacctgactaagaagccccggctaactacgtgccagcagccgcggtaatacgtagggggcaagcgttatccggatttactgggtgtaaagggagcgtagacggcagggcaagtctggagtgaaagcccggggctcaaccccgggactgctttggaaactgccatgctagagtgtcggagaggcaagtggaattcctagtgtagcggtgaaatgcgtagatattaggaggaacaccagtggcgaaggcggcttgctggacgatgactgacgttgaggctcgaaagcgtggggagcaaacaggattagataccctggtagtccacgccgtaaacgatgattactaggtgtcgggaagcaaagcttcccggtgccgcagccaacgcaataagtaatccacctggggagtacgttcgcaagaatgaaactcaaaggaattgacggggacccgcacaagcggtggagcatgtggtttaattcgaagcaacgcgaagaaccttacctggtcttgacatcccggtgacagcatatgtaacgtatgttcccttcggggcagcggagacaggtggtgcatggttgtcgtcagctcgtgtcgtgagatgttgggttaagtcccgcaacgagcgcaacccctatctttagtagccagcaggtgaggctgggcactctagagagactgccagggacaacctggaggaaggtggggatgacgtcaaatcatcatgccccttatgatcagggctacacacgtgctacaatggcgtaaacaaa

SEQ ID NO: 120 - DNA, 1547 bp, artificial sequence
  >GCF_900016165.1_00752 Leuconostoc_gelidum
attgagagtttgatcctggctcaggatgaacgctggcggcgtgcctaatacatgcaagtcgaacgcacagcgaaaggtgcttgcacctttcaagtgagtggcgaacgggtgagtaacacgtggataacctacctcaaggttggggataacatttggaaacagatgctaataccgaataaaacttcgtatcgcatgataccaggttaaaaggcgctacggcgtcacctagagatggatccgcggtgcattagttagttggtggggtaaaggcttaccaagacaatgatgcatagccgagttgagagactgatcggccacattgggactgagacacggcccaaactcctacgggaggctgcagtagggaatcttccacaatgggcgaaagcctgatggagcaacgccgcgtgtgtgatgaaggctttcgggtcgtaaagcactgttgtatgggaagaacagctagagtagggaatgactttagtttgacggtaccataccagaaagggacggctaaatacgtgccagcagccgcggtaatacgtatgtcccgagcgttatccggatttattgggcgtaaagcgagcgcagacggttaattaagtctgatgtgaaagcccggagctcaactccggaaaggcattggaaactggttaacttgagtgcagtagaggtaagtggaactccatgtgtagcggtggaatgcgtagatatatggaagaacaccagcggcgaaggcggcttactggactgtaactgacgttgaggctcgaaagtgtgggtagcaaacaggattagataccctggtagtccacaccgtaaacgatgaacactaggtgttaggaggtttccgcctcttagtgccgaagctaacgcattaagtgttccgcctggggagtacgaccgcaaggttgaaactcaaaggaattgacggggacccgcacaagcggtggagcatgtggtttaattcgaagcaacgcgaagaaccttaccaggtcttgacatcctttgaagcttttagagatagaagtgttctcttcggagacaaagtgacaggtggtgcatggtcgtcgtcagctcgtgtcgtgagatgttgggttaagtcccgcaacgagcgcaacccttattgttagttgccagcattcagatgggcactctagcgagactgccggtgacaaaccggaggaaggcggggacgacgtcagatcatcatgccccttatgacctgggctacacacgtgctacaatggcgtatacaacgagttgccaacctgtgaaggtgagctaatctcttaaagtacgtctcagttcggactgcagtctgcaactcgactgcacgaagtcggaatcgctagtaatcgcggatcagcacgccgcggtgaatacgttcccgggtcttgtacacaccgcccgtcacaccatgggagtttgtaatgcccaaagccggtggcctaaccgtaaggagggaaccgtctaaggcaggacagatgactggggtgaagtcgtaacaaggtagccgtaggagaacctgcggctggatcacctccttt

SEQ ID NO: 121 - DNA, 1538 bp, artificial sequence
  >GCF_900048895.1_00120 Neglecta_timonensis
tttagagagtttgatcctggctcaggacgaacgctggcggcgtgcctaacacatgcaagtcgaacggagatagacgctgaaagggagacagcttgctgtaagaatttcttgtttatcttagtggcggacgggtgagtaacgcgtgagtaacctgcctttcagagggggataacgtctggaaacggacgctaataccgcatgagaccacagcttcacatggagcggcggtcaaaggagcaatccgctgaaagatggactcgcgtccgattagatagttggcggggtaacggcccaccaagtcgacgatcggtagccggactgagaggttgaacggccacattgggactgagacacggcccagactcctacgggaggcagcagtgagggatattggtcaatgggggaaaccctgaaccagcaacgccgcgtgagggaagacggttttcggattgtaaacctctgtcctctgtgaagatagtgacggtagcagaggaggaagctccggctaactacgtgccagcagccgcggtaatacgtagggagcgagcgttgtccggatttactgggtgtaaagggtgcgtaggcggctctgcaagtcagaagtgaaatccatgggcttaacccatgaactgcttttgaaactgtagagcttgagtgaagtagaggtaggcggaattcccggtgtagcggtgaaatgcgtagagatcgggaggaacaccagtggcgaaggcggcctactgggctttaactgacgctgaggcacgaaagcatgggtagcaaacaggattagataccctggtagtccatgccgtaaacgatgattactaggtgtggggggtctgaccccctccgtgccggagttaacacaataagtaatccacctggggagtacgaccgcaaggttgaaactcaaaggaattgacgggggcccgcacaagcagtggagtatgtggattaattcgaagcaacgcgaagaaccttaccaggtcttgacatccaactaacgaagcagagatgcattaggtgcccttcggggaaagttgagacaggtggtgcatggttgtcgtcagctcgtgtcgtgagatgttgggttaagtcccgcaacgagcgcaacccttactgttagttgctacgcaagagcactctagcaggactgccgttgacaaaacggaggaaggtggggacgacgtcaaatcatcatgccccttatgacctgggcctcacacgtactacaatggccattaacagagggaagcaagcccgcgaggtggagcaaaaccctaaaaatggtctcagttcggatcgtaggctgaaacccgcctgcgtgaagttggaattgctagtaatcgcggatcagcatgccgcggtgaatacgttcccgggccttgtacacaccgcccgtcacaccatgggagccggtaatacccgaagtcagtagtctaaccgcaagggggacgctgccgaaggtaggattggcgactggggtgaagtcgtaacaaggtagccgtatcggaaggtgcggctggatcacctccttt

SEQ ID NO: 122 - DNA, 1513 bp, artificial sequence
  >GCF_900067065.1_01679 Ruminococcaceae_NG12_sp1
tttagagagtttgatcctggctcaggacgaacgctggcggcgtgcctaacacatgcaagtcgaacggacgagaaggtgcttgcaccttcaagttagtggcggacgggtgagtaacgcgtgagcaacctgcctcaaagagggggataacgtctggaaacggacgctaataccgcatgacgtattcgataggcatctattgaataccaaaggagcaatccgctttgagatgggctcgcgtctgattagctagttggtggggtaaaggcctaccaaggcgacgatcagtagccggactgagaggttgaacggccacattgggactgagacacggcccagactcctacgggaggcagcagtgggggatattgcacaatgggggaaaccctgatgcagcaacgccgcgtgaaggaagacggttttcggattgtaaacttctgttcttagtgacgataatgacggtagctaaggagaaagctccggctaactacgtgccagcagccgcggtaatacgtagggagcgagcgttgtccggaattactgggtgtaaagggagcgtaggcgggagatcaagtcagatgtgaaaactatgggctcaacccataacctgcatttgaaactggttttcttgagtgaagtagaggcaggcggaattccgagtgtagcggtgaaatgcgtagatattcggaggaacaccagtggcgaaggcggcctgctgggcttttactgacgctgaggctcgaaagcatggggagcaaacaggattagataccctggtagtccatgccgtaaacgatgattactaggtgtggggtggctgacccattccgtgccggagttaacacaataagtaatccacctggggagtacggccgcaaggttgaaactcaaaggaattgacgggggcccgcacaagcagtggagtatgtggtttaattcgaagcaacgcgaagaaccttaccaggtcttgacatccgactaacgaagtagagatacattaggtgcccttcggggaaagtcgagacaggtggtgcatggttgtcgtcagctcgtgtcgtgagatgttgggttaagtcccgcaacgagcgcaacccttgtcattagttgctacgcaagagcactctaatgagactgccgttgacaaaacggaggaaggtggggacgacgtcaaatcatcatgccccttatgacctgggctacacacgtactacaatggccgttaacagagggaagcaatactgtgaagtggagcaaacccctaaaaacggtcccagttcagattgcaggctgcaacccgcctgcatgaagtcggaattgctagtaatcgcggatcagcatgccgcggtgaatacgttcccgggccttgtacacaccgcccgtcacaccatgggagccggtaatacccgaagtcggtagtctaaccgcaaggagggcgccgccgaaggtaggattggcgactggggtgaagtcgtaacaaggtagccgtatcggaaggtgcggctggatcacctccttt

SEQ ID NO: 123 - DNA, 1527 bp, artificial sequence
  >GCF_900078295.2_00974 Blautia_wexlerae
tcagagagtttgatcctggctcaggatgaacgctggcggcgtgcttaacacatgcaagtcgaacgggaattattttattgaaacttcggtcgatttaatttaattctagtggcggacgggtgagtaacgcgtgggtaacctgccttatacagggggataacagtcagaaatggctgctaataccgcataagcgcacagagctgcatggctcagtgtgaaaaactccggtggtataagatggacccgcgttggattagcttgttggtggggtaacggcccaccaaggcgacgatccatagccggcctgagagggtgaacggccacattgggactgagacacggcccagactcctacgggaggcagcagtggggaatattgcacaatgggggaaaccctgatgcagcgacgccgcgtgaaggaagaagtatctcggtatgtaaacttctatcagcagggaagatagtgacggtacctgactaagaagccccggctaactacgtgccagcagccgcggtaatacgtagggggcaagcgttatccggatttactgggtgtaaagggagcgtagacggtgtggcaagtctgatgtgaaaggcatgggctcaacctgtggactgcattggaaactgtcatacttgagtgccggaggggtaagcggaattcctagtgtagcggtgaaatgcgtagatattaggaggaacaccagtggcgaaggcggcttactggacggtaactgacgttgaggctcgaaagcgtggggagcaaacaggattagataccctggtagtccacgccgtaaacgatgaatactaggtgtcggggagcatggctcttcggtgccgtcgcaaacgcagtaagtattccacctggggagtacgttcgcaagaatgaaactcaaaggaattgacggggacccgcacaagcggtggagcatgtggtttaattcgaagcaacgcgaagaaccttaccaagtcttgacatccgcctgaccgatccttaaccggatctttccttcgggacaggcgagacaggtggtgcatggttgtcgtcagctcgtgtcgtgagatgttgggttaagtcccgcaacgagcgcaacccctatcctcagtagccagcatttaaggtgggcactctggggagactgccagggataacctggaggaaggcggggatgacgtcaaatcatcatgccccttatgatttgggctacacacgtgctacaatggcgtaaacaaagggaagcgagattgtgagatggagcaaatcccaaaaataacgtcccagttcggactgtagtctgcaacccgactacacgaagctggaatcgctagtaatcgcggatcagaatgccgcggtgaatacgttcccgggtcttgtacacaccgcccgtcacaccatgggagtcagtaacgcccgaagtcagtgacctaactgcaaagaaggagctgccgaaggcgggaccgatgactggggtgaagtcgtaacaaggtagccgtatcggaaggtgcggctggatcacctccttt

SEQ ID NO: 124 - DNA, 1522 bp, artificial sequence
  >GCF_900078395.1_01262 [Anaerotruncus]_rubiinfantis
aaagagtttgatcctggctcaggacgaacgctggcggcgcgcctaacacatgcaagtcgaacggagtttatccgactgaagttttcggatggaagatggataaacttagtggcggacgggtgagtaacacgtgagcaacctgcctttcagagggggataacgattggaaacgatcgctaataccgcataacattatgaggagacatcttcttataatcaaaggagcaatccgctgaaagatgggctcgcggccgattagctagatggtggggtaacggcccaccatggcgacgatcggtagccggactgagaggttgaacggccacattgggactgagacacggcccagactcctacgggaggcagcagtgggggatattgcacaatggaggaaactctgatgcagcgacgccgcgtgagggaagacggtcttcggattgtaaacctctgtcttaggggaagaaaatgacggtaccctaagaggaagctccggctaactacgtgccagcagccgcggtaatacgtagggagcgagcgttgtccggaattactgggtgtaaagggagcgtaggcgggatggcaagttggatgtttaaactaacggctcaactgttaggtgcatccaaaactgctgttcttgagtgaagtagaggcaggcggaattcctagtgtagcggtgaaatgcgtagatattaggaggaacaccagtggcgaaggcggcctgctgggctttaactgacgctgaggctcgaaagcgtggggagcaaacaggattagataccctggtagtccacgctgtaaacgatgattactaggtgtggggggactgaccccttccgtgccgcagttaacacaataagtaatccacctggggagtacggccgcaaggttgaaactcaaaggaattgacgggggcccgcacaagcagtggagtatgtggtttaattcgaagcaacgcgaagaaccttaccaggtcttgacatcggatgcataccatagagatatgggaagtccttcgggacatccagacaggtggtgcatggttgtcgtcagctcgtgtcgtgagatgttgggttaagtcccgcaacgagcgcaacccttattattagttgctacgcaagagcactctaatgagactgccgttgacaaaacggaggaaggtggggatgacgtcaaatcatcatgccccttatgacctgggctacacacgtactacaatggcacttaaacaaagggcagcaacgtcgcgaggcgaagcgaatcccgaaaaagtgtctcagttcggatcgcaggctgcaacccgcctgcgtgaagtcggaattgctagtaatcgcggatcagcatgccgcggtgaatacgttcccgggccttgtacacaccgcccgtcacaccatgggagtcggtaacacccgaagccagtagtctaactgcaaagaggacgctgtcgaaggtgggattgatgactggggtgaagtcgtaacaaggtagccgtatcggaaggtgcggctggatcacctccttt

SEQ ID NO: 125 - DNA, 1528 bp, artificial sequence
  >GCF_900086625.1_00105 [Extibacter]_muris
cgagagtttgatcctggctcaggatgaacgctggcggcgtgcttaacacatgcaagtcgagcgaagcgccttatacagattccttcgggatgaaggatttggcgactgagcggcggacgggtgagtaacgcgtgggcaacctgcctcacacagggggataacagctagaaatggctgctaataccgcataaggccgcggcaccgcatggtgcggcggcagaagctccggcggtgtgagatgggcccgcgtctgattaggtagttggtgcggtaacggcgcaccaagccgacgatcagtagccgacctgagagggtgaccggccacattgggactgagacacggcccaaactcctacgggaggcagcagtggggaatattgcacaatgggggaaaccctgatgcagcgacgccgcgtgaaggatgaagtatttcggtatgtaaacttctatcagcagggaagaagatgacggtacctgactaagaagccccggctaactacgtgccagcagccgcggtaatacgtagggggcaagcgttatccggatttactgggtgtaaagggagcgtagacggcagggcaagtctggagtgaaagcccggggctcaaccccgggactgctttggaaactgccatgctagagtgtcggagaggcaagtggaattcctagtgtagcggtgaaatgcgtagatattaggaggaacaccagtggcgaaggcggcttgctggacgatgactgacgttgaggctcgaaagcgtggggagcaaacaggattagataccctggtagtccacgccgtaaacgatgattactaggtgtcgggaagcaaagcttctcggtgccgcagccaacgcaataagtaatccacctggggagtacgttcgcaagaatgaaactcaaaggaattgacggggacccgcacaagcggtggagcatgtggtttaattcgaagcaacgcgaagaaccttacctggtcttgacatccccctgaccggacagtaacgtgtcctttccttcgggacaggggagacaggtggtgcatggttgtcgtcagctcgtgtcgtgagatgttgggttaagtcccgcaacgagcgcaacccctatctttagtagccagcattccggatgggcactctagagagactgccagggacaacctggaggaaggtggggatgacgtcaaatcatcatgccccttatgatcagggctacacacgtgctacaatggcgtaaacaaagggaagcgaccctgcgaaggcaagcgaatcccaaaaataacgtcccagttcggattgtagtctgcaactcgactacatgaagctggaatcgctagtaatcgcgaatcagaatgtcgcggtgaatacgttcccgggtcttgtacacaccgcccgtcacaccatgggagtcggtaacgcccgaagtcagtgacccaaccgcaaggagggagctgccgaaggtgggaccgataactggggtgaagtcgtaacaaggtagccgtatcggaaggtgcggctggatcacctccttt

SEQ ID NO: 126 - DNA, 1527 bp, artificial sequence
  >GCF_900106785.1_01430 Prevotellamassilia_timonensis
atgaagagtttgatcctggctcaggatgaacgctagctacaggcttaacacatgcaagtcgaggggcagcggtatcgaaagcttgctttcggtagccggcgaccggcgcacgggtgagtaacgcgtatcgaacctgcctcatactcgggaatagccttgcgaaagtaagattaatgcccggtgttttcagagtcccgcatgaggctttgaacaaagatttatcggtatgagatggcgatgcgtcccattagcttgttggcggggtaacggcccaccaaggcatcgatgggtaggggttctgagaggaaggtcccccacattggaactgagacacggtccaaactcctacgggaggcagcagtgaggaatattggtcaatgggcggaagcctgaaccagccaagtagcgtgcaggaagacggccctccgggttgtaaactgcttttagttgggaataaaacggggctcgtgagcccccttgcatgtaccatcagaaaaaggaccggctaattccgtgccagcagccgcggtaatacggaaggtccgggcgttatccggatttattgggtttaaagggagcgcaggcggacctttaagtcagctgtgaaatacggcggctcaaccgtcgaactgcagttgatactggaggtcttgagtgcacacagggatgctggaattcatggtgtagcggtgaaatgctcagatatcatgaagaactccgatcgcgaaggcaggcatccggggtgcaactgacgctgaggctcgaaagtgcgggtatcaaacaggattagataccctggtagtccgcacagtaaacgatgaatactcgcggtttgcgatacaatgtaagccgccaagcgaaagcgttaagtattccacctggggagtacgccggcaacggtgaaactcaaaggaattgacgggggcccgcacaagcggaggaacatgtggtttaattcgatgatacgcgaggaaccttacccgggcttgaactgccagcgacggatgcagagacgcatctttcttcggacgctggcggaggtgctgcatggttgtcgtcagctcgtgccgtgaggtgtcggcttaagtgccataacgagcgcaaccctcatcctcgtttgccatcaggtgatgctgggcactccggggacactgccatcgtaagatgtgaggaaggtggggatgacgtcaaatcagcacggcccttacgtccggggctacacacgtgttacaatgggcggtacagagggcagccactgcgcgagcaggagccaatcctcaaagccgttctcagttcggactggagtctgcaacccgactccacgaagctggattcgctagtaatcgcgcatcagccatggcgcggtgaatacgttcccgggccttgtacacaccgcccgtcaagccatgaaagccgggagcacttgaaggccgtgaccgcaagggtcggtctagagtgatactggtaattggggctaagtcgtaacaaggtagccgtaccggaaggtgcggctggaacacctccttt

SEQ ID NO: 127 - DNA, 1501 bp, artificial sequence
  >GCF_900106845.1_00099 [Romboutsia]_timonensis
atttgagagtttgatcctggctcaggatgaacgctggcggcgtgcctaacacatgcaagtcgagcgatcttcttcggaagagagcggcggacgggtgagtaacgcgtgggtaacctgccctgtacacacggataacataccgaaaggtatgctaatacgagataatatgcttttatcgcatggtagaagtatcaaagctccggcggtacaggatggacccgcgtctgattagctagttggtaaggtaacggcttaccaaggcgacgatcagtagccgacctgagagggtgatcggccacattggaactgagacacggtccaaactcctacgggaggcagcagtggggaatattgcacaatgggcgaaagcctgatgcagcaacgccgcgtgagcgatgaaggccttcgggtcgtaaagctctgtcctcaaggaagataatgacggtacttgaggaggaagccccggctaactacgtgccagcagccgcggtaatacgtagggggctagcgttatccggaattactgggcgtaaagggtgcgtaggtggtttcttaagtcagaggtgaaaggctacggctcaaccgtagtaagcctttgaaactgggaaacttgagtgcaggagaggagagtggaattcctagtgtagcggtgaaatgcgtagatattaggaggaacaccagttgcgaaggcggctctctggactgtaactgacactgaggcacgaaagcgtggggagcaaacaggattagataccctggtagtccacgccgtaaacgatgagtactagctgtcggaggttacccccttcggtggcgcagctaacgcattaagtactccgcctgggaagtacgctcgcaagagtgaaactcaaaggaattgacggggacccgcacaagtagcggagcatgtggtttaattcgaagcaacgcgaagaaccttacctaagcttgacatccttttgaccgatgcctaatcgcatctttcccttcggggacagaagtgacaggtggtgcatggttgtcgtcagctcgtgtcgtgagatgttgggttaagtcccgcaacgagcgcaacccttgcctttagttgccagcattaagttgggcactctagagggactgccagggataacctggaggaaggtggggatgacgtcaaatcatcatgccccttatgcttagggctacacacgtgctacaatgggtggtacagagggcagccaagtcgtgaggcggagctaatcccttaaagccattctcagttcggattgtaggctgaaactcgcctacatgaagctggagttactagtaatcgcagatcagaatgctgcggtgaatgcgttcccgggtcttgtacacaccgcccgtcacaccacgggagttgggggcgcccgaagccggattgctaaccttttggaagcgtccgtcgaaggtgaaatcaataactggggtgaagtcgtaacaaggtagccgtatcggaaggtgcggctggatcacctccttt

SEQ ID NO: 128 - DNA, 891 bp, artificial sequence
  >GCF_900106845.1_02861 [Romboutsia]_timonensis
  misc_feature (7)..(7): n is a, c, g, or t
cagatgncaggagaggagagtggaattcctagtgtagcggtgaaatgcgtagatattaggaggaacaccagttgcgaaggcggctctctggactgtaactgacactgaggcacgaaagcgtggggagcaaacaggattagataccctggtagtccacgccgtaaacgatgagtactagctgtcggaggttacccccttcggtggcgcagctaacgcattaagtactccgcctgggaagtacgctcgcaagagtgaaactcaaaggaattgacggggacccgcacaagtagcggagcatgtggtttaattcgaagcaacgcgaagaaccttacctaagcttgacatccttttgaccgatgcctaatcgcatctttcccttcggggacagaagtgacaggtggtgcatggttgtcgtcagctcgtgtcgtgagatgttgggttaagtcccgcaacgagcgcaacccttgcctttagttgccagcattaagttgggcactctagagggactgccagggataacctggaggaaggtggggatgacgtcaaatcatcatgccccttatgcttagggctacacacgtgctacaatgggtggtacagagggcagccaagtcgtgaggcggagctaatcccttaaagccattctcagttcggattgtaggctgaaactcgcctacatgaagctggagttactagtaatcgcagatcagaatgctgcggtgaatgcgttcccgggtcttgtacacaccgcccgtcacaccacgggagttgggggcgcccgaagccggattgctaaccttttggaagcgtccgtcgaaggtgaaatcaataactggggtgaagtcgtaacaaggtagccgtatcggaaggtgcggctggatcacctccttt

SEQ ID NO: 129 - DNA, 1426 bp, artificial sequence
  >GCF_900129135.1_00002 Lactonifactor_longoviformis
ctgagtggcggacgggtgagtaacgcgtggataacctgcctcatacagggggataacagttagaaatgactgctaataccgcataagcgcacagtgctgcatggcacagtgtgaaaagctccggcggtatgagatggatccgcgtttgattagctagttggtggggtaaaggcctaccaaggcgacgatcaatagccgacctgagagggtgaccggccacattgggactgagacacggcccaaactcctacgggaggcagcagtggggaatattgcacaatgggggaaaccctgatgcagcgacgccgcgtgaaggaagaagtatttcggtatgtaaacttctatcagcagggaagaaaatgacggtacctgactaagaagccccggctaattacgtgccagcagccgcggtaatacgtaaggggcaagcgttatccggatttactgggtgtaaagggagcgtagacggcagtgcaagtctgatgtgaaagcccggggctcaaccccgggactgcattggaaactgtgcagctagagtgtcggagaggtaagtggaattcctagtgtagcggtgaaatgcgtagatattaggaggaacaccagtggcgaaggcggcttactggacgataactgacgttgaggctcgaaagcgtggggagcaaacaggattagataccctggtagtccacgccgtaaacgatgaatactaggtgtcgggcgccaaaggcgttcggtgccgcagcaaacgcaataagtattccacctggggagtacgttcgcaagaatgaaactcaaaggaattgacggggacccgcacaagcggtggagcatgtggtttaattcgaagcaacgcgaagaaccttaccaagtcttgacatctgcctgaccggtccgtaacaggacccttccttcgggacaggcaagacaggtggtgcatggttgtcgtcagctcgtgtcgtgagatgttgggttaagtcccgcaacgagcgcaacccttatccttagtagccagcaggtagagctgggcactctagggagactgccagggacaacctggaggaaggtggggatgacgtcaaatcatcatgccccttatgatttgggctacacacgtgctacaatggcgtaaacaaagggaagcgaaggggtgacctgaagcaaatcccaaaaataacgtctcagttcggattgtagtctgcaactcgactacatgaagctggaatcgctagtaatcgcgaatcagaatgtcgcggtgaatacgttcccgggtcttgtacacaccgcccgtcacaccatgggagtcggatatgcccgaagccggtgaccgaacccgaaagggaaggagccgtcgaaggtggagccgataactggggtgaagtcgtaacaaggtagccgtatcggaaggtgcggctggatcacctccttt

SEQ ID NO: 130 - DNA, 1522 bp, artificial sequence
  >GCF_900155615.1_02753 Massilimaliae_massiliensis
aaagagtttgatcctggctcaggacgaacgctgtcggcgcgcctaacacatgcaagtcgaacgaagctgcatcgaacgaattcttcggaaagagattggtacagcttagtggcggacgggtgagtaacgcgtgagtaacctgcctttcagagggggataacgtttggaaacgaacgctaataccgcataacatattaaattcgcatggatttgatatcaaaggagcaatccgctgaaagatggactcgcgtccaattagctagttggtgaggtaacggcccaccaaggcgacgattggtagccggactgagaggttgaacggccacattgggactgagacacggcccagactcctacgggaggcagcagtggggaatattgcacaatgggggaaaccctgatgcagcgacgccgagtgagggaagaaggttttcggattgtaaacctctgtccttggtgaagataatgacggtagccaaggaggaagctacggctaactacgtgccagcagccgcggtaatacgtaggtagcgagcgttgtccggaattactgggtgtaaagggagcgtaggcgggattgcaagttgaatgtcaaatctacgggcttaacccgtagccgcgttcaaaactgcagttcttgagtgaagtagaggcaggcggaattcctagtgtagcggtgaaatgcgtaaatattaggaggaacaccagtggcgaaggcggcctgctgggctttaactgacgctgaggctcgaaagcgtgggtagcaaacaggattagataccctggtagtccacgctgtaaacgatgattactaggtgtgggggggactgaccccttccgtgccggagttaacacaataagtaatccacctggggagtacgaccgcaaggttgaaactcaaaggaattgacgggggcccgcacaagcagtggagtatgtggtttaattcgaagcaacgcgaagaaccttaccaggtcttgacatcgtgcgcatagcctagagataggtgaagcccttcggggcgcatagacaggtggtgcatggttgtcgtcagctcgtgtcgtgagatgttgggttaagtcccgcaacgagcgcaacccttacgtttagttgctacgcaagagcactctagacggactgccgttgacaaaacggaggaaggtggggatgacgtcaaatcatcatgccccttatgacctgggctacacacgtactacaatggctattaacagagggaagcaagatggtgacatggagcaaacccctaaaaatagtctcagttcggattgcaggctgcaacccgcctgcatgaagccggaattgctagtaatcgcggatcagcatgccgcggtgaatacgttcccgggccttgtacacaccgcccgtcacaccatgagagttggcaacacccgaagccgatagtctaaccgcaagggggacgtcgtcgaaggtggggttgatgattggggtgaagtcgtaacaaggtagccgtatcggaaggtgcggctggatcacctccttt

SEQ ID NO: 131 - DNA, 1511 bp, Artificial Sequence
  >GCF_900169495.1_00035 Harryflintia_acetispora
ctaaagagtttgatcctggctcaggacgaacgctggcggcgcgcctaacacatgcaagtcgaacggagaaatgctgagcttgctttgcattttttagtggcggacgggtgagtaacacgtgagcaacctgcctttgtgaggggaataacgtctggaaacggacgctaataccgcataacgtcaaggaaccgcatggttttttgaccaaagattttatcgcaaaaagatgggctcgcggctgattagctagttggcggggtaacggcccaccaaggcgacgatcagtagccggactgagaggttgatcggccacattgggactgagacacggcccagactcctacgggaggcagcagtgggggatattgcacaatgggggaaaccctgatgcagcgacgccgcgtgagggaagacggttttcggattgtaaacctctgtcttcagggacgaaatcaatgacggtacctgaggaggaagccacggctaactacgtgccagcagccgcggtaatacgtaggtggcaagcgttgtccggaattactgggtgtaaagggagcgtaggcgggaatgcaagttgaatgtttaaactatcggctcaactgataatcgcgttcaaaactgcatttcttgagtggagtagaggcaggcggaattcctagtgtagcggtgaaatgcgtagatattaggaggaacaccagtggcgaaggcggcctgctgggctctaactgacgctgaggctcgaaagcgtgggtagcaaacaggattagataccctggtagtccacgccgtaaacgatgattactaggtgtggggggactgaccccttccgtgccggagttaacacaataagtaatccacctggggagtacggtcgcaagactgaaactcaaaggaattgacgggggcccgcacaagcagtggagtatgtggtttaattcgaagcaacgcgaagaaccttaccaggtcttgacatcgtgcgcataccgtagagatacgggaagtccttcgggacgcatagacaggtggtgcatggttgtcgtcagctcgtgtcgtgagatgttgggttaagtcccgcaacgagcgcaacccttattattagttgctacgcaagagcactctaatgagactgccgttgacaaaacggcggaaggtggggatgacgtcaaatcatcatgccccttatgacctgggctacacacgtactacaatggcacttaacagagggaagcaagaccgcgaggtggagcaaacccccaaaaagtgtctcagttcggattgcaggctgcaacccgcctgtatgaagtcggaattgctagtaatcgcggatcagcatgccgcggtgaatacgttcccgggccttgtacacaccgcccgtcacaccatgagagccggtaacacccgaagtcagtagcctaaccgcaaggagggcgctgccgaaggtgggattggtgattagggtgaagtcgtaacaaggtagccgtatcggaaggtgcggctggatcacctccttt

SEQ ID NO: 132 - DNA, 1523 bp, artificial sequence
  >GCF_900289145.1_00008 Neobitarella_massiliensis
taaagagtttgatcctggctcaggacgaacgctggcggcgcgcttaacacatgcaagtcgaacggacacatccgacggaatagcttgctaggaagatggatgttgttagtggcggacgggtgagtaacacgtgagcaacctacctcagagtgggggacaacagttggaaacgactgctaataccgcataagatggcagggtcgcatggcctggtcataaaaggagcaattcgctctgagatgggctcgcgtctgattagctagttggtgaggtaacggctcaccaaggcaacgatcagtagccggactgagaggttgaacggccacattgggactgagacacggcccagactcctacgggaggcagcagtggggaatattgcacaatgggggaaaccctgatgcagcgacgccgcgtgagggaagacggttttcggattgtaaacctctgtcttgtgggacgatagtgacggtaccacaggaggaagccatggctaactacgtgccagcagccgcggtaatacgtagatggcgagcgttgtccggaattactgggtgtaaagggagtgtaggcgggctggtaagttgaatgtgaaaccttcgggctcaacccggagcgtgcgttcaaaactgctggtcttgagtgaagtagaggcaggcggaattcccggtgtagcggtggaatgcgtagatatcgggaggaacaccagtggcgaaggcggcctgctgggcttttactgacgctgaggctcgaaagcatgggtagcaaacaggattagataccctggtagtccatgccgtaaacgatgattactaggtgtggggggattgaccccctccgtgccggagttaacacaataagtaatccacctggggagtacgaccgcaaggttgaaactcaaaggaattgacgggggcccgcacaagcagtggagtatgtggtttaattcgaagcaacgcgaaaaaccttaccaggtcttgacatccatcgccaggctaagagattagctgttcccttcggggacgatgagacaggtggtgcatggttgtcgtcagctcgtgtcgtgagatgttgggttaagtcccgcaacgagcgcaacccttactattagttgctacgcaagagcactctaatgggactgccgttgacaaaacggaggaaggtggggatgacgtcaaatcatcatgccccttatgacctgggctacacacgtactacaatggccgttaacagagagcagcgataccgcgaggtggagcgaatctagaaaaacggtctcagttcggattgcaggctgaaactcgcctgcatgaagtcggaattgctagtaatcgcggatcagcatgccgcggtgaatacgttcccgggccttgtacacaccgcccgtcacaccatgagagccggtaacacccgaagtcagtagcctaaccgcaaggagggcgctgccgaaggtggggctggtaattggggtgaagtcgtaacaaggtagccgtatcggaaggtgcggctggatcacctccttt

SEQ ID NO: 133 - DNA, 1530 bp, artificial sequence
  >GCF_900604355.1_02753 Muricomes_sp1
aacgagagtttgatcctggctcaggatgaacgctggcggcgtgcttaacacatgcaagtcgagcggagcgccgcgcacggaacccacgggggaagggcgcggtgtcttagcggcggacgggtgagtaacgcgtgggcaacctgccccataccgggggataacagccagaaatggctgctaataccgcataaggccgcggcggcgcatgccgcagcggcaaaaactccggtggtatgggatgggcccgcgtctgattagctagttggcggggcaacggcccaccaaggcgacgatcagtagccggcctgagagggcggacggccacattgggactgagacacggcccaaactcctacgggaggcagcagtggggaatattgcacaatggggggaaccctgatgcagcgacgccgcgtgaaggatgaagtatttcggtacgtaaacttctatcagcagggaagaaaatgacggtacctgactaagaagccccggctaactacgtgccagcagccgcggtaatacgtagggggcaagcgttatccggatttactgggtgtaaagggagcgtagacgggccagcaagtctgatgtgaaaacccggggcccaaccccgggagtgcattggaaactgcgggcctggagtgccggagaggtaagcggaattcctagtgtagcggtgaaatgcgtagatattaggaggaacaccagtggcgaaggcggcttactggacggtaactgacgttgaggctcgaaagcgtggggagcaaacaggattagataccctggtagtccacgccgtaaacgatgactactaggtgtcggggagcaaagctgcccggtgccgcagccaacgcaataagtagtccacctggggagtacgttcgcaagaatgaaactcaaaggaattgacggggacccgcacaagcggtggagcatgtggtttaattcgaagcaacgcgaagaaccttacctgcccttgacatccggatggccggcgagcaatgtcgccttctcttcggagcatccgagacaggtggtgcatggttgtcgtcagctcgtgtcgtgagatgttgggttaagtcccgcaacgagcgcaacccttacccttagtagccagcacaaaaaaggtgggcactctagggggactgccagggagaacctggaggaaggtggggatgacgtcaaatcatcatgccccttatgggcagggctacacacgtgctacaatggcgtaaacaaagggaggcgaggccgcgaggcggagcaaaccccaaaaataacgtcccagttcggattgtagcctgcaacccggctacatgaagctggaatcgctagtaatcgcggatcagaatgccgcggtgaatacgttcccgggtcttgtacacaccgcccgtcacaccatgggagttggcaacgcccgaagtcagtgacccaaccggaaggggggagctgccgaaggcggggccggtaactggggtgaagtcgtaacaaggtagccgtatcggaaggtgcggctggatcacctccttt

SEQ ID NO: 134 - DNA, 1501 bp, artificial sequence
  STR00223_Collinsella_intestinalis
cggagagttcgatcctggctcaggatgaacgctggcggcgcgcctaacacatgcaagtcgaacggcacccctcctcggagggaagcgagtggcgaacggctgagtaacacgtggagaacccgccccctcctccgggatagcctcgggaaaccgtgggtaataccggatgaccccgcagggccgcatggccccgcgggcaaagcccagacgggaggggatggctccgcggcccatcaggtagacggcggggtgacggcccaccgtgccgacgacgggtagccgggttgagagaccgaccggccagattgggactgagacacggcccagactcctacgggaggcagcagtggggaatcttgcgcaatggggggaaccctgacgcagcgacgccgcgtgcgggacgaaggccctcgggtcgtaaaccgctttcagcagggatgagacaagacggtacctgcagaagaagccccggctaactacgtgccagcagccgcggtaatacgtagggggcgagcgttatccggattcattgggcgtaaagcgcgcgtaggcggcccggcaggcagggggtcaaatggcggggctcaaccccgtcccgccccctgaaccgccgggctcgggtccggtaggggagggtggaacacccggtgtagcggtggaatgcgcagatatcgggtggaacaccggtggcgaaggcggccctctgggccgagaccgacgctgaggcgcgaaagctgggggagcgaacaggattagataccctggtagtcccagccgtaaacgatggacgctaggtgtggggggacgatccctccgtgccgcagccaacgcattaagcgtcccgcctggggagtacggccgcaaggctaaaactcaaaggaattgacgggggcccgcacaagcagcggagcatgtggcttaattcgaagcaacgcgaagaaccttaccagggcttgacatgaccgtgaagccggggagacccggtggccgagaggagcggtcacaggtggtgcatggctgtcgtcagctcgtgtcgtgagatgtttggttaagtccagcaacgagcgcaacccccgccgcatgttgccagcacctcgggtgggcacccatgcgggaccgccggagtcaatccggaggagggcggggacgacgtcaagtcatcatgccccttatgccctgggctgcacacgtgctacaatggccggtacagcgggatgcgatggcgcgagccggagcggatccctgaaagccggccccagttcggattgggggctgcaacccgcccccatgaagtcggagttgctagtaatcgcggatcagcatgccgcggtgaatgcgttcccgggccttgtacacaccgcccgtcacaccacccgagtcgtctgcacccgaagtcgccggcccaaccgcaaggggggaggcgccgaaggtgtggagggtgaggggggtgaagtcgtaacaaggtagccgtacgggaacgtgcggctggatcacctccttt

SEQ ID NO: 135 - DNA, 1505 bp, artificial sequence
  STR00241_Blautia_wexlerae
tcagagagtttgatcctggctcaggatgaacgctggcggcgtgcttaacacatgcaagtcgaacgggaattactttattgaaacttcggtcgatttaatttaattctagtggcggacgggtgagtaacgcgtgggtaacctgccttatacagggggataacagtcagaaatggctgctaataccgcataagcgcacagagctgcatggctcagtgtgaaaaactccggtggtataagatggacccgcgttggattagctagttggtggggtaacggcccaccaaggcgacgatccatagccggcctgagagggtgaacggccacattgggactgagacacggcccagactcctacgggaggcagcagtggggaatattgcacaatgggggaaaccctgatgcagcgacgccgcgtgaaggaagaagtatctcggtatgtaaacttctatcagcagggaagatagtgacggtacctgactaagaagccccggctaactacgtgccagcagccgcggtaatacgtagggggcaagcgttatccggatttactgggtgtaaagggagcgtagacggtgtggcaagtctgatgtgaaaggcatgggctcaacctgtggactgcattggaaactgtcatacttgagtgccggaggggtaagcggaattcctagtgtagcggtgaaatgcgtagatattaggaggaacaccagtggcgaaggcggcttactggacggtaactgacgttgaggctcgaaagcgtggggagcaaacaggattagataccctggtagtccacgccgtaaacgatgaatactaggtgtcggggagcatggctcttcggtgccgtcgcaaacgcagtaagtattccacctggggagtacgttcgcaagaatgaaactcaaaggaattgacggggacccgcacaagcggtggagcatgtggtttaattcgaagcaacgcgaagaaccttaccaagtcttgacatccgcctgaccgatccttaatcggatctttccttcgggacaggcgagacaggtggtgcatggttgtcgtcagctcgtgtcgtgagatgttgggttaagtcccgcaacgagcgcaacccctatcctcagtagccagcatttaaggtgggcactctggggagactgccagggataacctggaggaaggcggggatgacgtcaaatcatcatgccccttatgatttgggctacacacgtgctacaatggcgtaaacaaagggaagcgagattgtgagatggagcaaatcccaaaaataacgtcccagttcggactgtagtctgcaacccgactacacgaagctggaatcgctagtaatcgcggatcagaatgccgcggtgaatacgttcccgggtcttgtacacaccgcccgtcacaccatgggagtcagtaacgcccgaagtcagtgacctaactgcaaagaaggagctgccgaaggcgggaccgatgactggggtgaagtcgtaacaaggtagccgtatcggaag

SEQ ID NO: 136 - DNA, 1013 bp, artificial sequence
  STR00245_Blautia_wexlerae
gtaatacgtagggggcaagcgttatccggatttactgggtgtaaagggagcgtagacggtgtggcaagtctgatgtgaaaggcatgggctcaacctgtggactgcattggaaactgtcatacttgagtgccggaggggtaagcggaattcctagtgtagcggtgaaatgcgtagatattaggaggaacaccagtggcgaaggcggcttactggacggtaactgacgttgaggctcgaaagcgtggggagcaaacaggattagataccctggtagtccacgccgtaaacgatgaatactaggtgtcggggagcatggctcttcggtgccgtcgcaaacgcagtaagtattccacctggggagtacgttcgcaagaatgaaactcaaaggaattgacggggacccgcacaagcggtggagcatgtggtttaattcgaagcaacgcgaagaaccttaccaagtcttgacatccgtctgaccggtccttaatcgtttctttccttcgggataggggagacaggtggtgcatggttgtcgtcagctcgtgtcgtgagatgttgggttaagtcccgcaacgagcgcaacccctatcctcagtagccagcatttaaggtgggcactctggggagactgccagggataacctggaggaaggcggggatgacgtcaaatcatcatgccccttatgatttgggctacacacgtgctacaatggcgtaaacaaagggaagcgagattgtgagatggagcaaatcccaaaaataacgtcccagttcggactgtagtctgcaacccgactacacgaagctggaatcgctagtaatcgcggatcagaatgccgcggtgaatacgttcccgggtcttgtacacaccgcccgtcacaccatgggagtcagtaacgcccgaagtcagtgacctaactgcaaagaaggagctgccgaaggcgggaccgatgactggggtgaagtcgtaacaaggtagccgtatcggaaggtgcggctggatcacctccttt

SEQ ID NO: 137 - DNA, 1418 bp, artificial sequence
  STR00267_Parabacteroides_merdae
acgaagagtttgatcctggctcaggatgaacgctagcgacaggcttaacacatgcaagtcgaggggcagcatgatttgtagcaatacagattgatggcgaccggcgcacgggtgagtaacgcgtatgcaacttacctatcagagggggatagcccggcgaaagtcggattaataccccataaaacaggggtcccgcatgggaatatttgttaaagattcatcgctgatagataggcatgcgttccattaggcagttggcggggtaacggcccaccaaaccgacgatggataggggttctgagaggaaggtcccccacattggtactgagacacggaccaaactcctacgggaggcagcagtgaggaatattggtcaatggccgagaggctgaaccagccaagtcgcgtgaaggaagaaggatctatggtttgtaaacttcttttataggggaataaagtggaggacgtgtccttttttgtatgtaccctatgaataagcatcggctaactccgtgccagcagccgcggtaatacggaggatgcgagcgttatccggatttattgggtttaaagggtgcgtaggtggtgatttaagtcagcggtgaaagtttgtggctcaaccataaaattgccgttgaaactgggttacttgagtgtgtttgaggtaggcggaatgcgtggtgtagcggtgaaatgcatagatatcacgcagaactccgattgcgaaggcagcttactaaaccataactgacactgaagcacgaaagcgtggggatcaaacaggattagataccctggtagtccacgcagtaaacgatgattactaggagtttgcgatacaatgtaagctctacagcgaaagcgttaagtaatccacctggggagtacgccggcaacggtgaaactcaaaggaattgacgggggcccgcacaagcggaggaacatgtggtttaattcgatgatacgcgaggaaccttacccgggtttgaacgtagtctgaccggagtggaaacactccttctagcaatagcagattacgaggtgctgcatggttgtcgtcagctcgtgccgtgaggtgtcggcttaagtgccataacgagcgcaacccttatcactagttactaacaggtgaagctgaggactctggtgagactgccagcgtaagctgtgaggaaggtggggatgacgtcaaatcagcacggcccttacatccggggcgacacacgtgttacaatggcatggacaaagggcagctacctggtgacaggatgctaatctccaaaccatgtctcagttcggatcggagtctgcaactcgactccgtgaagctggattcgctagtaatcgcgcatcagccatggcgcggtgaatacgttcccgggccttgtacacaccgcccgtcaagccatgggagccgg

SEQ ID NO: 138 - DNA, 1000 bp, artificial sequence
  STR00268_Bifidobacterium_catenulatum_group
cgttatccggaattattgggcgtaaagggctcgtaggcggttcgtcgcgtccggtgtgaaagtccatcgcttaacggtggatctgcgccgggtacgggcgggctggagtgcggtaggggagactggaattcccggtgtaacggtggaatgtgtagatatcgggaagaacaccaatggcgaaggcaggtctctgggccgttactgacgctgaggagcgaaagcgtggggagcgaacaggattagataccctggtagtccacgccgtaaacggtggatgctggatgtggggcccgttccacgggttccgtgtcggagctaacgcgttaagcatcccgcctggggagtacggccgcaaggctaaaactcaaagaaattgacgggggcccgcacaagcggcggagcatgcggattaattcgatgcaacgcgaagaaccttacctgggcttgacatgttcccgaccgccgtagagatacggcctcccttcggggcgggttcacaggtggtgcatggtcgtcgtcagctcgtgtcgtgagatgttgggttaagtcccgcaacgagcgcaaccctcgccctgtgttgccagcacgtcatggtgggaactcacgggggaccgccggggtcaactcggaggaaggtggggatgacgtcagatcatcatgccccttacgtccagggcttcacgcatgctacaatggccggtacaacgggatgcgacacggcgacgtggagcggatccctgaaaaccggtctcagttcggattggagtctgcaacccgactccatgaaggcggagtcgctagtaatcgcggatcagcaacgccgcggtgaatgcgttcccgggccttgtacacaccgcccgtcaagtcatgaaagtgggtagcacccgaagccggtggcctaaccctttgtgggatggagccgtctaaggtgagactcgtgattgggactaagtcgtaacaaggtagccgtaccggaaggtgcggctggatcacctccttt

SEQ ID NO: 139 - DNA, 1372 bp, artificial sequence
  STR00185_Blautia_wexlerae
tcagagagtttgatcctggctcaggatgaacgctggcggcgtgcttaacacatgcaagtcgaacgggaaatatttcattgagacttcggtggatttgatctatttctagtggcggacgggtgagtaacgcgtgggtaacctgccttatacagggggataacagtcagaaatggctgctaataccgcataagcgcacagagctgcatggctcagtgtgaaaaactccggtggtataagatggacccgcgttggattagctagttggtggggtaacggcccaccaaggcgacgatccatagccggcctgagagggtgaacggccacattgggactgagacacggcccagactcctacgggaggcagcagtggggaatattgcacaatgggggaaaccctgatgcagcgacgccgcgtgaaggaagaagtatctcggtatgtaaacttctatcagcagggaagatagtgacggtacctgactaagaagccccggctaactacgtgccagcagccgcggtaatacgtagggggcaagcgttatccggatttactgggtgtaaagggagcgtagacggtgtggcaagtctgatgtgaaaggcatgggctcaacctgtggactgcattggaaactgtcatacttgagtgccggaggggtaagcggaattcctagtgtagcggtgaaatgcgtagatattaggaggaacaccagtggcgaaggcggcttactggacggtaactgacgttgaggctcgaaagcgtggggagcaaacaggattagataccctggtagtccacgccgtaaacgatgaatactaggtgtcgggtggcagagccattcggtgccgtcgcaaacgcagtaagtattccacctggggagtacgttcgcaagaatgaaactcaaaggaattgacggggacccgcacaagcggtggagcatgtggtttaattcgaagcaacgcgaagaaccttaccaagtcttgacatccgcctgaccgatccttaaccggatctttccttcgggacaggcgagacaggtggtgcatggttgtcgtcagctcgtgtcgtgagatgttgggttaagtcccgcaacgagcgcaacccctatcctcagtagccagcatttaaggtgggcactctggggagactgccagggataacctggaggaaggcggggatgacgtcaaatcatcatgccccttatgatttgggctacacacgtgctacaatggcgtaaacaaagggaagcgagattgtgagatggagcaaatcccaaaaataacgtcccagttcggactgtagtctgcaacccgactacacgaagctggaatcgctagtaatcgcggatcagaatgccgcggtgaatacgttcccggg

SEQ ID NO: 140 - DNA, 1419 bp, artificial sequence
  STR00195_Intestinibacter_bartlettii
agcggcggacgggtgagtaacgcgtgggtaacctgccctgtacacacggataacataccgaaaggtatgctaatacgggataacataagaaattcgcatgtttttcttatcaaagctccggcggtacaggatggacccgcgtctgattagctagttggtgaggtaacggctcaccaaggcgacgatcagtagccgacctgagagggtgatcggccacattggaactgagacacggtccaaactcctacgggaggcagcagtggggaatattgcacaatgggcgaaagcctgatgcagcaacgccgcgtgagcgatgaaggccttcgggtcgtaaagctctgtcctcaaggaagataatgacggtacttgaggaggaagccccggctaactacgtgccagcagccgcggtaatacgtagggggctagcgttatccggatttactgggcgtaaagggtgcgtaggcggtcttttaagtcaggagtgaaaggctacggctcaaccgtagtaagctcttgaaactggaggacttgagtgcaggagaggagagtggaattcctagtgtagcggtgaaatgcgtagatattaggaggaacaccagtagcgaaggcggctctctggactgtaactgacgctgaggcacgaaagcgtggggagcaaacaggattagataccctggtagtccacgccgtaaacgatgagtactagctgtcggaggttacccccttcggtggcgcagctaacgcattaagtactccgcctggggagtacgctcgcaagagtgaaactcaaaggaattgacggggacccgcacaagtagcggagcatgtggtttaattcgaagcaacgcgaagaaccttacctaagcttgacatccttttgaccgatgcctaatcgcatctttcccttcggggacagaagtgacaggtggtgcatggttgtcgtcagctcgtgtcgtgagatgttgggttaagtcccgcaacgagcgcaacccttgcctttagttgccatcattaagttgggcactctagagggactgccagggataacctggaggaaggtggggatgacgtcaaatcatcatgccccttatgcttagggctacacacgtgctacaatgggtggtacagagggcagcgaagtcgtgaggccaagctaatcccttaaagccattctcagttcggattgtaggctgaaactcgcctacatgaagctggagttactagtaatcgcagatcagaatgctgcggtgaatgcgttcccgggtcttgtacacaccgcccgtcacaccatgggagttgggggcgcccgaagccggctagctaaccttttggaagcggtcgtcgaaggtgaaaccaataactggggtgaagtcgtaacaaggtagccgtatcggaaggtgcggctggatcacctccttt

SEQ ID NO: 141 - DNA, 1524 bp, artificial sequence
  STR00299_Bifidobacterium_catenulatum_group
gtggagggttcgattctggctcaggatgaacgctggcggcgtgcttaacacatgcaagtcgaacgggatccatcaggctttgcttggtggtgagagtggcgaacgggtgagtaatgcgtgaccgacctgccccatacaccggaatagctcctggaaacgggtggtaatgccggatgctccggcctgccgcatggtgggctgggaaagattgtatcggtatgggatggggtcgcgtcctatcaggtagtcggcggggtaacggcccaccgagcctacgacgggtagccggcctgagagggcgaccggccacattgggactgagatacggcccagactcctacgggaggcagcagtggggaatattgcacaatgggcgcaagcctgatgcagcgacgccgcgtgcgggatgacggccttcgggttgtaaaccgcttttgatcgggagcaagccttcgggtgagtgtacctttcgaataagcaccggctaactacgtgccagcagccgcggtaatacgtagggtgcaagcgttatccggaattattgggcgtaaagggctcgtaggcggttcgtcgcgtccggtgtgaaagtccatcgcttaacggtggatctgcgccgggtacgggcgggctggagtgcggtaggggagactggaattcccggtgtaacggtggaatgtgtagatatcgggaagaacaccaatggcgaaggcaggtctctgggccgttactgacgctgaggagcgaaagcgtggggagcgaacaggattagataccctggtagtccacgccgtaaacggtggatgctggatgtggggcccgttccacgggttccgtgtcggagctaacgcgttaagcatcccgcctggggagtacggccgcaaggctaaaactcaaagaaattgacgggggcccgcacaagcggcggagcatgcggattaattcgatgcaacgcgaagaaccttacctgggcttgacatgttcccgaccgctccagagatggggcttcccttcggggcgggttcacaggtggtgcatggtcgtcgtcagctcgtgtcgtgagatgttgggttaagtcccgcaacgagcgcaaccctcgccctgtgttgccagcacgtcatggtgggaactcacgggggaccgccggggtcaactcggaggaaggtggggatgacgtcagatcatcatgccccttacgtccagggcttcacgcatgctacaatggccggtacaacgggatgcgacacggcgacgtggagcggatccctgaaaaccggtctcagttcggattggagtctgcaacccgactccatgaaggcggagtcgctagtaatcgcggatcagcaacgccgcggtgaatgcgttcccgggccttgtacacaccgcccgtcaagtcatgaaagtgggtagcacccgaagccggtggcctaacctttttggatggagccgtctaaggtgagactcgtgattgggactaagtcgtaacaaggtagccgtaccggaaggtgcggctggatcacctccttt

SEQ ID NO: 142 - DNA, 1526 bp, artificial sequence
  STR00312_Bifidobacterium_catenulatum_group
tgtggagggttcgattctggctcaggatgaacgctggcggcgtgcttaacacatgcaagtcgaacgggatccaggcagcttgctgcctggtgagagtggcgaacgggtgagtaatgcgtgaccgacctgccccatacaccggaatagctcctggaaacgggtggtaatgccggatgctccgactcctcgcatggggtgtcgggaaagatttcatcggtatgggatggggtcgcgtcctatcaggtagtcggcggggtaacggcccaccgagcctacgacgggtagccggcctgagagggcgaccggccacattgggactgagatacggcccagactcctacgggaggcagcagtggggaatattgcacaatgggcgcaagcctgatgcagcgacgccgcgtgcgggatgacggccttcgggttgtaaaccgcttttgatcgggagcaagccttcgggtgagtgtacctttcgaataagcaccggctaactacgtgccagcagccgcggtaatacgtagggtgcaagcgttatccggaattattgggcgtaaagggctcgtaggcggttcgtcgcgtccggtgtgaaagtccatcgcttaacggtggatctgcgccgggtacgggcgggctggagtgcggtaggggagactggaattcccggtgtaacggtggaatgtgtagatatcgggaagaacaccaatggcgaaggcaggtctctgggccgttactgacgctgaggagcgaaagcgtggggagcgaacaggattagataccctggtagtccacgccgtaaacggtggatgctggatgtggggcccgttccacgggttccgtgtcggagctaacgcgttaagcatcccgcctggggagtacggccgcaaggctaaaactcaaagaaattgacgggggcccgcacaagcggcggagcatgcggattaattcgatgcaacgcgaagaaccttacctgggcttgacatgttcccgacagccgtagagatgcggcctcccttcggggcgggttcacaggtggtgcatggtcgtcgtcagctcgtgtcgtgagatgttgggttaagtcccgcaacgagcgcaaccctcgccctgtgttgccagcacgtcatggtgggaactcacgggggaccgccggggtcaactcggaggaaggtggggatgacgtcagatcatcatgccccttacgtccagggcttcacgcatgctacaatggccggtacaacgggatgcgacatggcgacatggagcggatccctgaaaaccggtctcagttcggattggagtctgcaacccgactccatgaaggcggagtcgctagtaatcgcggatcagcaacgccgcggtgaatgcgttcccgggccttgtacacaccgcccgtcaagtcatgaaagtgggtagcacccgaagccggtggcctaaccccttgtgggatggagccgtctaaggtgagactcgtgattgggactaagtcgtaacaaggtagccgtaccggaaggtgcggctggatcacctccttt

SEQ ID NO: 143 - DNA, 1240 bp, artificial sequence
  STR00473_Blautia_wexlerae
ctagtggcggacgggtgagtaacgcgtgggtaacctgccttatacagggggataacagtcagaaatggctgctaataccgcataagcgcacagagctgcatggctcagtgtgaaaaactccggtggtataagatggacccgcgttggattagcttgttggtggggtaacggcccaccaaggcgacgatccatagccggcctgagagggtgaacggccacattgggactgagacacggcccagactcctacgggaggcagcagtggggaatattgcacaatgggggaaaccctgatgcagcgacgccgcgtgaaggaagaagtatctcggtatgtaaacttctatcagcagggaagatagtgacggtacctgactaagaagccccggctaactacgtgccagcagccgcggtaatacgtagggggcaagcgttatccggatttactgggtgtaaagggagcgtagacggtgtggcaagtctgatgtgaaaggcatgggctcaacctgtggactgcattggaaactgtcatacttgagtgccggaggggtaagcggaattcctagtgtagcggtgaaatgcgtagatattaggaggaacaccagtggcgaaggcggcttactggacggtaactgacgttgaggctcgaaagcgtggggagcaaacaggattagataccctggtagtccacgccgtaaacgatgaatactaggtgtcggggagcatagccattcggtgccgtcgcaaacgcagtaagtattccacctggggagtacgttcgcaagaatgaaactcaaaggaattgacggggacccgcacaagcggtggagcatgtggtttaattcgaagcaacgcgaagaaccttaccaaatcttgacatccccctgaccgatccttaaccggaccttcccttcggaacagacgagacaggtggtgcatggttgtcgtcagctcgtgtcgtgagatgttgggttaagtcccgcaacgagcgcaacccctatcctcagtagccagcatttaaggtgggcactctggggagactgccagggataacctggaggaaggcggggatgacgtcaaatcatcatgccccttatgatttgggctacacacgtgctacaatggcgtaaacaaagggaagcgagattgtgagatggagcaaatcccaaaaataacgtcccagttcggactgtagtctgcaacccgactacacgaagctggaatcgctagtaatcgcggatca

SEQ ID NO: 144 - DNA, 1529 bp, artificial sequence
  STR00478_Blautia_faecis
atcagagagtttgatcctggctcaggatgaacgctggcggcgtgcttaacacatgcaagtcgaacgggaaatactttattgaaacttcggtggatttaatttatttctagtggcggacgggtgagtaacgcgtgggtaacctgccttatactgggggataacagccagaaatgactgctaataccgcataagcgcacagaaccgcatggttcggtgtgaaaaactccggtggtataagatggacccgcgttggattagctagttggcagggcagcggcctaccaaggcgacgatccatagccggcctgagagggtgaacggccacattgggactgagacacggcccagactcctacgggaggcagcagtggggaatattgcacaatgggggaaaccctgatgcagcgacgccgcgtgaaggaagaagtatctcggtatgtaaacttctatcagcagggaagataatgacggtacctgactaagaagccccggctaactacgtgccagcagccgcggtaatacgtagggggcaagcgttatccggatttactgggtgtaaagggagcgtagacggcgcagcaagtctgatgtgaaaggcaggggcttaacccctggactgcattggaaactgctgtgcttgagtgccggaggggtaagcggaattcctagtgtagcggtgaaatgcgtagatattaggaggaacaccagtggcgaaggcggcttactggacggtaactgacgttgaggctcgaaagcgtggggagcaaacaggattagataccctggtagtccacgccgtaaacgatgaatactaggtgtcagggagcacagctctttggtgccgccgcaaacgcattaagtattccacctggggagtacgttcgcaagaatgaaactcaaaggaattgacggggacccgcacaagcggtggagcatgtggtttaattcgaagcaacgcgaagaaccttaccaaatcttgacatccctctgaccgggacttaaccgtccctttccttcgggacagaggagacaggtggtgcatggttgtcgtcagctcgtgtcgtgagatgttgggttaagtcccgcaacgagcgcaacccctatccttagtagccagcacgcagtggtgggcactctgaggagactgccagggataacctggaggaaggcggggatgacgtcaaatcatcatgccccttatgatttgggctacacacgtgctacaatggcgtaaacaaagggaagcgaacccgcgagggtgggcaaatctcaaaaataacgtcccagttcggactgcagtctgcaactcgactgcacgaagctggaatcgctagtaatcgcggatcagaatgccgcggtgaatacgttcccgggtcttgtacacaccgcccgtcacaccatgggagtcagtaacgcccgaagtcagtgacctaaccgcaaagaaggagctgccgaaggcgggaccgatgactggggtgaagtcgtaacaaggtagccgtatcggaaggtgcggctggatcacctccttt

SEQ ID NO: 145 - DNA, 1527 bp, artificial sequence
  STR00485_Blautia_wexlerae
tcagagagtttgatcctggctcaggatgaacgctggcggcgtgcttaacacatgcaagtcgaacgggaattactttattgaaacttcggtcgatttaatttaattctagtggcggacgggtgagtaacgcgtgggtaacctgccttatacagggggataacagtcagaaatggctgctaataccgcataagcgcacagagctgcatggctcagtgtgaaaaactccggtggtataagatggacccgcgttggattagctagttggtggggtaacggcccaccaaggcgacgatccatagccggcctgagagggtgaacggccacattgggactgagacacggcccagactcctacgggaggcagcagtggggaatattgcacaatgggggaaaccctgatgcagcgacgccgcgtgaaggaagaagtatctcggtatgtaaacttctatcagcagggaagatagtgacggtacctgactaagaagccccggctaactacgtgccagcagccgcggtaatacgtagggggcaagcgttatccggatttactgggtgtaaagggagcgtagacggtgtggcaagtctgatgtgaaaggcatgggctcaacctgtggactgcattggaaactgtcatacttgagtgccggaggggtaagcggaattcctagtgtagcggtgaaatgcgtagatattaggaggaacaccagtggcgaaggcggcttactggacggtaactgacgttgaggctcgaaagcgtggggagcaaacaggattagataccctggtagtccacgccgtaaacgatgaatactaggtgtcggggagcaaagctcttcggtgccgtcgcaaacgcagtaagtattccacctggggagtacgttcgcaagaatgaaactcaaaggaattgacggggacccgcacaagcggtggagcatgtggtttaattcgaagcaacgcgaagaaccttaccaagtcttgacatccgcctgaccgatccttaaccggatctttccttcgggacaggcgagacaggtggtgcatggttgtcgtcagctcgtgtcgtgagatgttgggttaagtcccgcaacgagcgcaacccctatcctcagtagccagcatttaaggtgggcactctggggagactgccagggataacctggaggaaggcggggatgacgtcaaatcatcatgccccttatgatttgggctacacacgtgctacaatggcgtaaacaaagggaagcgagattgtgagatggagcaaatcccaaaaataacgtcccagttcggactgtagtctgcaacccgactacacgaagctggaatcgctagtaatcgcggatcagaatgccgcggtgaatacgttcccgggtcttgtacacaccgcccgtcacaccatgggagtcagtaacgcccgaagtcagtgacctaactgcaaagaaggagctgccgaaggcgggaccgatgactggggtgaagtcgtaacaaggtagccgtatcggaaggtgcggctggatcacctccttt

SEQ ID NO: 146 - DNA, 1527 bp, artificial sequence
  STR00497_Blautia_wexlerae
tcagagagtttgatcctggctcaggatgaacgctggcggcgtgcttaacacatgcaagtcgaacgggaattactttattgaaacttcggtcgatttaatttaattctagtggcggacgggtgagtaacgcgtgggtaacctgccttatacagggggataacagtcagaaatggctgctaataccgcataagcgcacagagctgcatggctcagtgtgaaaaactccggtggtataagatggacccgcgttggattagcttgttggtggggtaacggcccaccaaggcgacgatccatagccggcctgagagggtgaacggccacattgggactgagacacggcccagactcctacgggaggcagcagtggggaatattgcacaatgggggaaaccctgatgcagcgacgccgcgtgaaggaagaagtatctcggtatgtaaacttctatcagcagggaagatagtgacggtacctgactaagaagccccggctaactacgtgccagcagccgcggtaatacgtagggggcaagcgttatccggatttactgggtgtaaagggagcgtagacggtgtggcaagtctgatgtgaaaggcatgggctcaacctgtggactgcattggaaactgtcatacttgagtgccggaggggtaagcggaattcctagtgtagcggtgaaatgcgtagatattaggaggaacaccagtggcgaaggcggcttactggacggtaactgacgttgaggctcgaaagcgtggggagcaaacaggattagataccctggtagtccacgccgtaaacgatgaatactaggtgtcgggtggcatagccattcggtgccgtcgcaaacgcagtaagtattccacctggggagtacgttcgcaagaatgaaactcaaaggaattgacggggacccgcacaagcggtggagcatgtggtttaattcgaagcaacgcgaagaaccttaccaagtcttgacatccgcctgaccgatccttaaccggatctttccttcgggacaggcgagacaggtggtgcatggttgtcgtcagctcgtgtcgtgagatgttgggttaagtcccgcaacgagcgcaacccctatcctcagtagccagcatttaaggtgggcactctggggagactgccagggataacctggaggaaggcggggatgacgtcaaatcatcatgccccttatgatttgggctacacacgtgctacaatggcgtaaacaaagggaagcgagattgtgagatggagcaaatcccaaaaataacgtcccagttcggactgtagtctgcaacccgactacacgaagctggaatcgctagtaatcgcggatcagaatgccgcggtgaatacgttcccgggtcttgtacacaccgcccgtcacaccatgggagtcagtaacgcccgaagtcagtgacctaactgcaaagaaggagctgccgaaggcgggaccgatgactggggtgaagtcgtaacaaggtagccgtatcggaaggtgcggctggatcacctccttt

SEQ ID NO: 147 - DNA, 1529 bp, artificial sequence
  STR00614_Blautia_faecis
atcagagagtttgatcctggctcaggatgaacgctggcggcgtgcttaacacatgcaagtcgaacgggaaacatttcattgaggcttcggcggatttgatctgtttctagtggcggacgggtgagtaacgcgtgggtaacctgccttatactgggggataacagccagaaatgactgctaataccgcataagcgcacagaaccgcatggttcggtgtgaaaaactccggtggtataagatggacccgcgttggattagctagttggcagggcagcggcctaccaaggcgacgatccatagccggcctgagagggtgaacggccacattgggactgagacacggcccagactcctacgggaggcagcagtggggaatattgcacaatgggggaaaccctgatgcagcgacgccgcgtgaaggaagaagtatctcggtatgtaaacttctatcagcagggaagataatgacggtacctgactaagaagccccggctaactacgtgccagcagccgcggtaatacgtagggggcaagcgttatccggatttactgggtgtaaagggagcgtagacggcgcagcaagtctgatgtgaaaggcaggggcttaacccctggactgcattggaaactgctgtgcttgagtgccggaggggtaagcggaattcctagtgtagcggtgaaatgcgtagatattaggaggaacaccagtggcgaaggcggcttactggacggtaactgacgttgaggctcgaaagcgtggggagcaaacaggattagataccctggtagtccacgccgtaaacgatgaatactaggtgtcagggagcacagctctttggtgccgccgcaaacgcattaagtattccacctggggagtacgttcgcaagaatgaaactcaaaggaattgacggggacccgcacaagcggtggagcatgtggtttaattcgaagcaacgcgaagaaccttaccaaatcttgacatccctctgaccgggacttaaccgtccctttccttcgggacaggggagacaggtggtgcatggttgtcgtcagctcgtgtcgtgagatgttgggttaagtcccgcaacgagcgcaacccctatccttagtagccagcacgtaatggtgggcactctgaggagactgccagggataacctggaggaaggcggggatgacgtcaaatcatcatgccccttatgatttgggctacacacgtgctacaatggcgtaaacaaagggaagcgaacccgcgagggtgggcaaatctcaaaaataacgtcccagttcggactgcagtctgcaactcgactgcacgaagctggaatcgctagtaatcgcggatcagaatgccgcggtgaatacgttcccgggtcttgtacacaccgcccgtcacaccatgggagtcagtaacgcccgaagtcagtgacctaaccgcaagggaggagctgccgaaggcgggaccgatgactggggtgaagtcgtaacaaggtagccgtatcggaaggtgcggctggatcacctccttt

SEQ ID NO: 148 - DNA, 1528 bp, artificial sequence
  STR00635_Blautia_wexlerae
atcagagagtttgatcctggctcaggatgaacgctggcggcgtgcttaacacatgcaagtcgaacgggaattactttattgaaacttcggtcgatttaatttaattctagtggcggacgggtgagtaacgcgtgggtaacctgccttatacagggggataacagtcagaaatggctgctaataccgcataagcgcacagagctgcatggctcagtgtgaaaaactccggtggtataagatggacccgcgttggattagctggttggtggggtaacggcccaccaaggcgacgatccatagccggcctgagagggtgaacggccacattgggactgagacacggcccagactcctacgggaggcagcagtggggaatattgcacaatgggggaaaccctgatgcagcgacgccgcgtgaaggaagaagtatctcggtatgtaaacttctatcagcagggaagatagtgacggtacctgactaagaagccccggctaactacgtgccagcagccgcggtaatacgtagggggcaagcgttatccggatttactgggtgtaaagggagcgtagacggtgtggcaagtctgatgtgaaaggcatgggctcaacctgtggactgcattggaaactgtcatacttgagtgccggaggggtaagcggaattcctagtgtagcggtgaaatgcgtagatattaggaggaacaccagtggcgaaggcggcttactggacggtaactgacgttgaggctcgaaagcgtggggagcaaacaggattagataccctggtagtccacgccgtaaacgatgaatactaggtgtcggggagcaaagctcttcggtgccgtcgcaaacgcagtaagtattccacctggggagtacgttcgcaagaatgaaactcaaaggaattgacggggacccgcacaagcggtggagcatgtggtttaattcgaagcaacgcgaagaaccttaccaagtcttgacatccgcctgaccgatccttaaccggatctttccttcgggacaggcgagacaggtggtgcatggttgtcgtcagctcgtgtcgtgagatgttgggttaagtcccgcaacgagcgcaacccctatcctcagtagccagcatttaaggtgggcactctggggagactgccagggataacctggaggaaggcggggatgacgtcaaatcatcatgccccttatgatttgggctacacacgtgctacaatggcgtaaacaaagggaagcgagattgtgagatggagcaaatcccaaaaataacgtcccagttcggactgtagtctgcaacccgactacacgaagctggaatcgctagtaatcgcggatcagaatgccgcggtgaatacgttcccgggtcttgtacacaccgcccgtcacaccatgggagtcagtaacgcccgaagtcagtgacctaactgcaaagaaggagctgccgaaggcgggaccgatgactggggtgaagtcgtaacaaggtagccgtatcggaaggtgcggctggatcacctccttt

SEQ ID NO: 149 - DNA, 1521 bp, artificial sequence
  STR00675_Alistipes_finegoldii
atggagagtttgatcctggctcaggatgaacgctagcggcaggcttaacacatgcaagtcgaggggcagcggggagtagcaatactccgccggcgaccggcgcacgggtgcgtaacgcgtatgcaacctacctttaacaggggcataacactgagaaattggtactaattccccataacattcgagaaggcatcttcttgggttaaaaactccggtggttaaagatgggcatgcgttgtattagctagttggtgaggtaacggctcaccaaggcgacgatacatagggggactgagaggttaaccccccacattggtactgagacacggaccaaactcctacgggaggcagcagtgaggaatattggtcaatggacgcaagtctgaaccagccatgccgcgtgcaggaagacggctctatgagttgtaaactgcttttgtactagggtaaacgctcttacgtgtaggagcctgaaagtatagtacgaataaggatcggctaactccgtgccagcagccgcggtaatacggaggatccaagcgttatccggatttattgggtttaaagggtgcgtaggcggtttgataagttagaggtgaaataccggggctcaactccggaactgcctctaatactgttgaactagagagtagttgcggtaggcggaatgtatggtgtagcggtgaaatgcttagagatcatacagaacaccgattgcgaaggcagcttaccaaactatatctgacgttgaggcacgaaagcgtggggagcaaacaggattagataccctggtagtccacgcagtaaacgatgataactcgttgtcggcgatacacagtcggtgactaagcgaaagcgataagttatccacctggggagtacgttcgcaagaatgaaactcaaaggaattgacgggggcccgcacaagcggaggaacatgtggtttaattcgatgatacgcgaggaaccttacccgggcttgaaagttagtgacgattctggaaacaggatttcccttcggggcacgaaactaggtgctgcatggttgtcgtcagctcgtgccgtgaggtgtcgggttaagtcccataacgagcgcaacccctaccgttagttgccatcaggtcaagctgggcactctggcgggactgccggtgtaagccgagaggaaggtggggatgacgtcaaatcagcacggcccttacgtccggggctacacacgtgttacaatggtaggtacagagggccgctaccccgcgaggggatgccaatctcgaaagcctatctcagttcggatcggaggctgaaacccgcctccgtgaagttggattcgctagtaatcgcgcatcagccatggcgcggtgaatacgttcccgggccttgtacacaccgcccgtcaagccatggaagctgggggtgcctgaagttcgtgaccgcaaggagcgacctagggcaaaaccggtgactggggctaagtcgtaacaaggtagccgtaccggaaggtgcggctggaacacctccttt

SEQ ID NO: 150 - DNA, 1517 bp, artificial sequence
  STR00698_Anaerofustis_stercorihominis
ttttgagagtttgatcctggctcaggacgaacgctggcggcgtgcttaacacatgcaagtcgaacgagaagcttacaattgatccttcgggtgaagctgtaagtggacagtggcgaacgggtgagtaacgcgtaggtaaccaacctcatgcagggggatagcccagggaaacttggattaaacccgcataagaccacagcaccgcatggtgcagaggtaaaaactccggtggcatgagacggacctgcgtcttattaggtagttggtgaggtaacggctcaccaagccaacgatgagtagccgacctgagagggtgatcggccacattgggactgagacacggcccagactcctacgggaggcagcagtggggaatattgcgcaatggggggaaccctgacgcagcaacgccgcgtgagcgatgaaggttttcggatcgtaaagctctgtctttggggaagataatgacggtacccaaggaggaagctccggctaactacgtgccagcagccgcggtaatacgtagggagcaagcgttgtccggattcactgggcgtaaagagcacgtaggcggttaattaagtcaggtgtgaaagttttcggctcaaccggaaaagtgcacttgaaactgaataacttgagtatcggagaggtaagcggaattcctagtgtagcggtgaaatgcgtagagattaggaagaacaccggtggcgaaggcggcttactggacgataactgacgctgaggtgcgaaagcgtggggagcgaacaggattagataccctggtagtccacgccgtaaacgatgaatactaggtgttggggtaactcagtgccgcagttaacacattaagtattccgcctggggagtacgctcgcaagagtgaaactcaaaggaattgacgggggcccgcacaagcagcggagcatgtggtttaattcgaagcaacgcgaagaaccttaccaggtcttgacatcccttgaccgcctaagagattaggctttccttcgggacaaggagacaggtggtgcatggttgtcgtcagctcgtgtcgtgagatgttgggttaagtcccgcaacgagcgcaacccttatgtttagttactaacattaagttgaggactctagacagactgcccttgaaagagggaggaaggtggggacgacgtcaaatcatcatgccccttacgacctgggctacacacgtgctacaatggtctgtacagagggttgcgaagcagtgatgcctagctaatctcaaaaagcagatctcagttcggattgcaggctgcaactcgcctgcatgaagtcggagttgctagtaatcgcgaatcagaatgtcgcggtgaatgcgttcccgggccttgtacacaccgcccgtcacaccacgagagttggtaacacccgaagccagtgagctaaccattaggaggcagctgtcgaaggtgggatcagtaattggggtgaagtcgtaacaaggtagccgtatcggaaggtgcggctggatcacctccttt

SEQ ID NO: 151 - DNA, 938 bp, artificial sequence
  STR00709_Lachnospiraceae_NG29_sp1
gtgaaagcccggggcttaaccccgggactgcatttgaaactgtgtaactagagtgtcggagaggtaagtggaattcctagtgtagcggtgaaatgcgtagatattaggaggaacaccagtggcgaaggcggcttactggacgataactgacgctgaggctcgaaagcgtggggagcaaacaggattagataccctggtagtccacgccgtaaacgatgaatactaggtgttggggagcaaagctcttcggtgccgcagcaaacgcaataagtattccacctggggagtacgttcgcaagaatgaaactcaaaggaattgacggggacccgcacaagcggtggagcatgtggtttaattcgaagcaacgcgaagaaccttaccaagtcttgacatctggatgaccggtccgtaatgggacctttccttcggggcatccaagacaggtggtgcatggttgtcgtcagctcgtgtcgtgagatgttgggttaagtcccgcaacgagcgcaacccttatccttagtagccagcagtaagatgggcactctagggagactgccggagacaatccggaggaaggtggggatgacgtcaaatcatcatgccccttatgacttgggctacacacgtgctacaatggcgtaaacaaagggaagcgagaccgcgaggttaagcaaatctcaaaaataacgtctcagttcggattgtagtctgcaactcgactacatgaagctggaatcgctagtaatcgcgaatcagcatgtcgcggtgaatacgttcccgggtcttgtacacaccgcccgtcacaccatgggagtcgataacgcccgaagccggtgactcaaccgaaaggagagagccgtcgaaggcgggatggataactggggtgaagtcgtaacaaggtagccgtatcggaaggtgcggctggatcacctccttt

SEQ ID NO: 152 - DNA, 1511 bp, artificial sequence
  STR00713_Harryflintia_acetispora
ctaaagagtttgatcctggctcaggacgaacgctggcggcgcgcctaacacatgcaagtcgaacggaaatgtacttagcttgctttgtacattttagtggcggacgggtgagtaacacgtgagcaacctgcctttgtgaggggaataacgtctggaaacggacgctaataccgcataacgtcaaggaaccgcatggttttttgaccaaagattttatcgcacaaagatgggctcgcggctgattagctagttggtgaggtaacggcccaccaaggcgacgatcagtagccggactgagaggttgatcggccacattgggactgagacacggcccagactcctacgggaggcagcagtgggggatattgcacaatgggggaaaccctgatgcagcgacgccgcgtgagggaagacggttttcggattgtaaacctctgtcttcagggacgaaacaaatgacggtacctgaggaggaagccacggctaactacgtgccagcagccgcggtaatacgtaggtggcaagcgttgtccggaattactgggtgtaaagggagcgtaggcgggaatgcaagttgaatgtttaaactatcggctcaactgataatcgcgttcaaaactgcatttcttgagtggagtagaggcaggcggaattcctagtgtagcggtgaaatgcgtagatattaggaggaacaccagtggcgaaggcggcctgctgggctctaactgacgctgaggctcgaaagcgtgggtagcaaacaggattagataccctggtagtccacgctgtaaacgatgattactaggtgtggggggactgaccccttccgtgccggagttaacacaataagtaatccacctggggagtacggtcgcaagactgaaactcaaaggaattgacgggggcccgcacaagcagtggagtatgtggtttaattcgaagcaacgcgaagaaccttaccaggtcttgacatcgtgcgcataacctagagataggtgaagcccttcggggcgcacagacaggtggtgcatggttgtcgtcagctcgtgtcgtgagatgttgggttaagtcccgcaacgagcgcaacccttattattagttgctacgcaagagcactctaatgagactgccgttgacaaaacggaggaaggtggggatgacgtcaaatcatcatgccccttatgacctgggctacacacgtactacaatggcacttaacagagggaagcaagaccgcgaggtggagcaaacccccaaaaagtgtctcagttcggattgcaggctgaaacccgcctgtatgaagtcggaattgctagtaatcgcggatcagcatgccgcggtgaatacgttcccgggccttgtacacaccgcccgtcacaccatgagagccggtaacacccgaagtcagtagcctaaccgcaaggagggcgctgccgaaggtgggattggtgattagggtgaagtcgtaacaaggtagccgtatcggaaggtgcggctggatcacctccttt

SEQ ID NO: 153 - DNA, 1526 bp, artificial sequence
  STR00878_Hungatella_sp1
atgagagtttgatcctggctcaggatgaacgctggcggcgtgcttaacacatgcaagtcgagcgaagcaatttaagtgaagttttcggatggatcttagattgactgagcggcggacgggtgagtaacgcgtggataacctgcctcacacagggggataacagttagaaatgactgctaataccgcataagcgcacggtaccgcatggtacagtgtgaaaaactccggtggtgtgagatggatccgcgtctgattaggtagttggtgaggtaacggcccaccaagccgacgatcagtagccgacctgagagggtgaccggccacattgggactgagacacggcccaaactcctacgggaggcagcagtggggaatattgcacaatgggcgaaagcctgatgcagcaacgccgcgtgagtgaagaagtatctcggtatgtaaagctctatcagcagggaagaaaatgacggtacctgactaagaagccccggctaactacgtgccagcagccgcggtaatacgtagggggcaagcgttatccggatttactgggtgtaaagggagcgcagacggcactgcaagtctgaagtgaaagcccggggctcaaccccgggactgctttggaaactgtagagctagagtgctggagaggcaagcggaattcctagtgtagcggtgaaatgcgtagatattaggaagaacaccagtggcgaaggcggcttgctggacagtaactgacgttcaggctcgaaagcgtggggagcaaacaggattagataccctggtagtccacgccgtaaacgatgaatactaggtgttggtgggcaaagcccatcggtgccgccgcaaacgcaataagtattccacctggggagtacgttcgcaagaatgaaactcaaaggaattgacggggacccgcacaagcggtggagcatgtggtttaattcgaagcaacgcgaagaaccttaccaagtcttgacatcgtgatgaccggaacttaaccgttccttcccttcggggcatcatagacaggtggtgcatggttgtcgtcagctcgtgtcgtgagatgttgggttaagtcccgcaacgagcgcaacccttatcctcagtagccagcagtaagatgggcactctggggagactgccagggataacctggaggaaggtggggatgacgtcaaatcatcatgccccttatgatttgggctacacacgtgctacaatggcgtaaacaaagggaagcaagagggtgacctggagcaaatcccaaaaataacgtcccagttcggactgtagtctgcaacccgactacacgaagctggaatcgctagtaatcgcagatcagaatgctgcggtgaatacgttcccgggtcttgtacacaccgcccgtcacaccatgggagtcagcaacgcccgaagtcagtgactcaaccgcaaggagagagctgccgaaggcggggcaggtaactggggtgaagtcgtaacaaggtagccgtatcggaaggtgcggctggatcacctccttt

SEQ ID NO: 154 - DNA, 1094 bp, artificial sequence
  STR00890_Blautia_faecis
agagtttgatcctggctcaggatgaacgctggcggcgtgcttaacacatgcaagtcgaacgggaaacatttcattgaggcttcggcggatttgatctgtttctagtggcggacgggtgagtaacgcgtgggtaacctgccttatactgggggataacagccagaaatgactgctaataccgcataagcgcacagaaccgcatggttcggtgtgaaaaactccggtggtataagatggacccgcgttggattagctagttggcagggcagcggcctaccaaggcgacgatccatagccggcctgagagggtgaacggccacattgggactgagacacggcccagactcctacgggaggcagcagtggggaatattgcacaatgggggaaaccctgatgcagcgacgccgcgtgaaggaagaagtatctcggtatgtaaacttctatcagcagggaagataatgacggtacctgactaagaagccccggctaactacgtgccagcagccgcggtaatacgtagggggcaagcgttatccggatttactgggtgtaaagggagcgtagacggcgcagcaagtctgatgtgaaaggcaggggcttaacccctggactgcattggaaactgctgtgcttgagtgccggaggggtaagcggaattcctagtgtagcggtgaaatgcgtagatattaggaggaacaccagtggcgaaggcggcttactggacggtaactgacgttgaggctcgaaagcgtggggagcaaacaggattagataccctggtagtccacgccgtaaacgatgaatactaggtgtcagggagcacagctctttggtgccgccgcaaacgcattaagtattccacctggggagtacgttcgcaagaatgaaactcaaaggaattgacggggacccgcacaagcggtggagcatgtggtttaattcgaagcaacgcgaagaaccttaccaaatcttgacatccctctgaccgggacttaaccgtccctttccttcgggacaggggagacaggtggtgcatggttgtcgtcagctcgtgtcgtgagatgttgggttaagtcccgcaacgagcgcaacc

SEQ ID NO: 155 - DNA, 1229 bp, artificial sequence
  STR00895_Blautia_faecis
atcagagagtttgatcctggctcaggatgaacgctggcggcgtgcttaacacatgcaagtcgaacgggaaacattttattgaagcttcggcagatttagcttgtttctagtggcggacgggtgagtaacgcgtgggtaacctgccttatactgggggataacagccagaaatgactgctaataccgcataagcgcacagaaccgcatggttcggtgtgaaaaactccggtggtataagatggacccgcgttggattagctagttggcagggcagcggcctaccaaggcgacgatccatagccggcctgagagggtgaacggccacattgggactgagacacggcccagactcctacgggaggcagcagtggggaatattgcacaatgggggaaaccctgatgcagcgacgccgcgtgaaggaagaagtatctcggtatgtaaacttctatcagcagggaagataatgacggtacctgactaagaagccccggctaactacgtgccagcagccgcggtaatacgtagggggcaagcgttatccggatttactgggtgtaaagggagcgtagacggcgcagcaagtctgatgtgaaaggcaggggcttaacccctggactgcattggaaactgctgtgcttgagtgccggaggggtaagcggaattcctagtgtagcggtgaaatgcgtagatattaggaggaacaccagtggcgaaggcggcttactggacggtaactgacgttgaggctcgaaagcgtggggagcaaacaggattagataccctggtagtccacgccgtaaacgatgaatactaggtgtcagggagcacagctctttggtgccgccgcaaacgcattaagtattccacctggggagtacgttcgcaagaatgaaactcaaaggaattgacggggacccgcacaagcggtggagcatgtggtttaattcgaagcaacgcgaagaaccttaccaaatcttgacatccctctgaccgggacttaaccgtccctttccttcgggacaggggagacaggtggtgcatggttgtcgtcagctcgtgtcgtgagatgttgggttaagtcccgcaacgagcgcaacccctatccttagtagccagcacgtaatggtccggccgggcactctgaggagactgccagggataacctggaggaaggcggggatgacgtcaaatcatcatgccccttatgatttgggctacacacgtgcta

SEQ ID NO: 156 - DNA, 1062 bp, artificial sequence
  STR00899_Blautia_wexlerae
gaatattgcacaatgggggaaaccctgatgcagcgacgccgcgtgaaggaagaagtatctcggtatgtaaacttctatcagcagggaagatagtgacggtacctgactaagaagccccggctaactacgtgccagcagccgcggtaatacgtagggggcaagcgttatccggatttactgggtgtaaagggagcgtagacggtgtggcaagtctgatgtgaaaggcatgggctcaacctgtggactgcattggaaactgtcatacttgagtgccggaggggtaagcggaattcctagtgtagcggtgaaatgcgtagatattaggaggaacaccagtggcgaaggcggcttactggacggtaactgacgttgaggctcgaaagcgtggggagcaaacaggattagataccctggtagtccacgccgtaaacgatgaatactaggtgtcgggtggcagggctcttcggtgccgtcgcaaacgcagtaagtattccacctggggagtacgttcgcaagaatgaaactcaaaggaattgacggggacccgcacaagcggtggagcatgtggtttaattcgaagcaacgcgaagaaccttaccaaatcttgacatccctctgaccggtctttaatcggaccttctcttcggagcagaggtgacaggtggtgcatggttgtcgtcagctcgtgtcgtgagatgttgggttaagtcccgcaacgagcgcaacccctatcctcagtagccagcatttaaggtgggcactctggggagactgccagggataacctggaggaaggcggggatgacgtcaaatcatcatgccccttatgatttgggctacacacgtgctacaatggcgtaaacaaagggaagcgagattgtgagatggagcaaatcccaaaaataacgtcccagttcggactgtagtctgcaacccgactacacgaagctggaatcgctagtaatcgcggatcagaatgccgcggtgaatacgttcccgggtcttgtacacaccgcccgtcacaccatgggagtcagtaacgcccgaagtcagtgacctaac

SEQ ID NO: 157 - DNA, 1499 bp, artificial sequence
  STR00926_Intestinibacter_bartlettii
ttgagagtttgatcctggctcaggatgaacgctggcggcgtgcctaacacatgcaagtcgagcgattctcttcggagaagagcggcggacgggtgagtaacgcgtgggtaacctgccctgtacacacggataacataccgaaaggtatgctaatacgggataacataagaaattcgcatgtttttcttatcaaagctccggcggtacaggatggacccgcgtctgattagctagttggtgaggtaacggctcaccaaggcgacgatcagtagccgacctgagagggtgatcggccacattggaactgagacacggtccaaactcctacgggaggcagcagtggggaatattgcacaatgggcgaaagcctgatgcagcaacgccgcgtgagcgatgaaggccttcgggtcgtaaagctctgtcctcaaggaagataatgacggtacttgaggaggaagccccggctaactacgtgccagcagccgcggtaatacgtagggggctagcgttatccggatttactgggcgtaaagggtgcgtaggcggtcttttaagtcaggagtgaaaggctacggctcaaccgtagtaagctcttgaaactggaggacttgagtgcaggagaggagagtggaattcctagtgtagcggtgaaatgcgtagatattaggaggaacaccagtagcgaaggcggctctctggactgtaactgacgctgaggcacgaaagcgtggggagcaaacaggattagataccctggtagtccacgccgtaaacgatgagtactaggtgtcgggggttacccccctcggtgccgcagctaacgcattaagtactccgcctggggagtacgctcgcaagagtgaaactcaaaggaattgacggggacccgcacaagtagcggagcatgtggtttaattcgaagcaacgcgaagaaccttacctaagcttgacatccttttgaccgatgcctaatcgcatctttcccttcggggacagaagtgacaggtggtgcatggttgtcgtcagctcgtgtcgtgagatgttgggttaagtcccgcaacgagcgcaacccttgcctttagttgccatcattaagttgggcactctagagggactgccagggataacctggaggaaggtggggatgacgtcaaatcatcatgccccttatgcttagggctacacacgtgctacaatgggtggtacagagggcagcgaagtcgtgaggccaagctaatcccttaaagccattctcagttcggattgtaggctgaaactcgcctacatgaagctggagttactagtaatcgcagatcagaatgctgcggtgaatgcgttcccgggtcttgtacacaccgcccgtcacaccatgggagttgggggcgcccgaagccggctagctaaccttttggaagcggtcgtcgaaggtgaaaccaataactggggtgaagtcgtaacaaggtagccgtatcggaaggtgcggctggatcacctccttt

SEQ ID NO: 158 - DNA, 1226 bp, artificial sequence
  STR00982_Lactonifactor_longoviformis
ctgagagggtgaccggccacattgggactgagacacggcccaaactcctacgggaggcagcagtggggaatattgcacaatgggggaaaccctgatgcagcgacgccgcgtgaaggaagaagtatttcggtatgtaaacttctatcagcagggaagaaaatgacggtacctgactaagaagccccggctaattacgtgccagcagccgcggtaatacgtaaggggcaagcgttatccggatttactgggtgtaaagggagcgtagacggcagtgcaagtctgatgtgaaagcccggggctcaaccccgggactgcattggaaactgtgcagctagagtgtcggagaggtaagtggaattcctagtgtagcggtgaaatgcgtagatattaggaggaacaccagtggcgaaggcggcttactggacgataactgacgttgaggctcgaaagcgtggggagcaaacaggattagataccctggtagtccacgccgtaaacgatgaatactaggtgtcgggcgccaaaggcgttcggtgccgcagcaaacgcaataagtattccacctggggagtacgttcgcaagaatgaaactcaaaggaattgacggggacccgcacaagcggtggagcatgtggtttaattcgaagcaacgcgaagaaccttaccaagtcttgacatctgcctgaccggtccgtaacaggacccttccttcgggacaggcaagacaggtggtgcatggttgtcgtcagctcgtgtcgtgagatgttgggttaagtcccgcaacgagcgcaacccttatccttagtagccagcaggtagagctgggcactctagggagactgccagggacaacctggaggaaggtggggatgacgtcaaatcatcatgccccttatgatttgggctacacacgtgctacaatggcgtaaacaaagggaggcgaaggggtgacctggagcaaatcccaaaaataacgtctcagttcggattgtagtctgcaactcgactacatgaagctggaatcgctagtaatcgcgaatcagaatgtcgcggtgaatacgttcccgggtcttgtacacaccgcccgtcacaccatgggagtcggatatgcccgaagccggtgaccgaacccgaaagggaaggagccgtcgaaggtggagccgataactggggtgaagtcgtaacaaggtagccgtatcggaaggtgcggctggatcacctccttt

SEQ ID NO: 159 - DNA, 1221 bp, artificial sequence
  STR01458_Blautia_faecis
gagagggtgaacggccacattgggactgagacacggcccagactcctacgggaggcagcagtggggaatattgcacaatgggggaaaccctgatgcagcgacgccgcgtgaaggaagaagtatctcggtatgtaaacttctatcagcagggaagataatgacggtacctgactaagaagccccggctaactacgtgccagcagccgcggtaatacgtagggggcaagcgttatccggatttactgggtgtaaagggagcgtagacggcgcagcaagtctgatgtgaaaggcaggggcttaacccctggactgcattggaaactgctgtgcttgagtgccggaggggtaagcggaattcctagtgtagcggtgaaatgcgtagatattaggaggaacaccagtggcgaaggcggcttactggacggtaactgacgttgaggctcgaaagcgtggggagcaaacaggattagataccctggtagtccacgccgtaaacgatgaatactaggtgtcagggagcacagctctttggtgccgccgcaaacgcattaagtattccacctggggagtacgttcgcaagaatgaaactcaaaggaattgacggggacccgcacaagcggtggagcatgtggtttaattcgaagcaacgcgaagaaccttaccaaatcttgacatccctctgaccgggacttaaccgtccctttccttcgggacaggggagacaggtggtgcatggttgtcgtcagctcgtgtcgtgagatgttgggttaagtcccgcaacgagcgcaacccctatccttagtagccagcggtccggccgggcactctgaggagactgccagggataacctggaggaaggcggggatgacgtcaaatcatcatgccccttatgatttgggctacacacgtgctacaatggcgtaaacaaagggaagcgaacccgcgagggtgggcaaatctcaaaaataacgtcccagttcggactgcagtctgcaactcgactgcacgaagctggaatcgctagtaatcgcggatcagaatgccgcggtgaatacgttcccgggtcttgtacacaccgcccgtcacaccatgggagtcagtaacgcccgaagtcagtgacctaaccgcaaagaaggagctgccgaaggcgggaccgatgactggggtgaagtcgtaacaaggtagccgtatcggaaggtgcggctggatcacctccttt

SEQ ID NO: 160 - DNA, 1439 bp, artificial sequence
  STR01475_Barnesiella_intestinihominis
gtcggcgaccggcgcacgggtgagtaacacgtatgcaatccacctgtaacagggggataacccggagaaatccggactaataccccataatatgggcgctccgcatggagagcccattaaagagagcaattttggttacagacgagcatgcgctccattagccagttggcggggtaacggcccaccaaagcgacgatggataggggttctgagaggaaggtcccccacattggaactgagacacggtccaaactcctacgggaggcagcagtgaggaatattggtcaatggtcggcagactgaaccagccaagtcgcgtgagggaagacggccctacgggttgtaaacctcttttgtcggagagtaaagtacgctacgtgtagtgtattgcaagtatccgaagaaaaagcatcggctaactccgtgccagcagccgcggtaatacggaggatgcaagcgttatccggatttattgggtttaaagggtgcgtaggcggcacgccaagtcagcggtgaaatttccgggctcaacccggagtgtgccgttgaaactggcgagctagagtacacaagaggcaggcggaatgcgtggtgtagcggtgaaatgcatagatatcacgcagaaccccgattgcgaaggcagcctgctagggtgaaacagacgctgaggcacgaaagcgtgggtatcgaacaggattagataccctggtagtccacgcagtaaacgatgaatactaactgtttgcgatacaatgtaagcggtacagcgaaagcgttaagtattccacctggggagtacgccggcaacggtgaaactcaaaggaattgacgggggcccgcacaagcggaggaacatgtggtttaattcgatgatacgcgaggaaccttacccgggctcaaacgcagggggaatatatatgaaagtatatagctagcaatagtcacctgcgaggtgctgcatggttgtcgtcagctcgtgccgtgaggtgtcggcttaagtgccataacgagcgcaacccctatcgacagttactaacgggtcaagccgaggactctgtcgagactgccggcgcaagccgcgaggaaggtggggatgacgtcaaatcagcacggcccttacgtccggggcgacacacgtgttacaatggcaggtacagaaggcagccagtcagcaatgacgcgcgaatcccgaaaacctgtctcagttcggattggagtctgcaacccgactccatgaagctggattcgctagtaatcgcgcatcagccatggcgcggtgaatacgttcccgggccttgtacacaccgcccgtcaagccatggaagccgggagtacctgaagcatgcaaccgcaaggagcgtacgaaggtaataccggtaactggggctaagtcgtaacaaggtagccgtaccggaaggtgcggctggaacacctccttt

SEQ ID NO: 161 - DNA, 969 bp, artificial sequence
  STR01482_Bifidobacterium_catenulatum_group
ctcgtaggcggttcgtcgcgtccggtgtgaaagtccatcgcttaacggtggatctgcgccgggtacgggcgggctggagtgcggtaggggagactggaattcccggtgtaacggtggaatgtgtagatatcgggaagaacaccaatggcgaaggcaggtctctgggccgttactgacgctgaggagcgaaagcgtggggagcgaacaggattagataccctggtagtccacgccgtaaacggtggatgctggatgtggggcccgttccacgggttccgtgtcggagctaacgcgttaagcatcccgcctggggagtacggccgcaaggctaaaactcaaagaaattgacgggggcccgcacaagcggcggagcatgcggattaattcgatgcaacgcgaagaaccttacctgggcttgacatgttcccgaccgctccagagatggggcttcccttcggggcgggttcacaggtggtgcatggtcgtcgtcagctcgtgtcgtgagatgttgggttaagtcccgcaacgagcgcaaccctcgccctgtgttgccagcacgtcatggtgggaactcacgggggaccgccggggtcaactcggaggaaggtggggatgacgtcagatcatcatgccccttacgtccagggcttcacgcatgctacaatggccggtacaacgggatgcgacacggcgacgtggagcggatccctgaaaaccggtctcagttcggattggagtctgcaacccgactccatgaaggcggagtcgctagtaatcgcggatcagcaacgccgcggtgaatgcgttcccgggccttgtacacaccgcccgtcaagtcatgaaagtgggtagcacccgaagccggtggcctaacctttttggatggagccgtctaaggtgagactcgtgattgggactaagtcgtaacaaggtagccgtaccggaaggtgcggctggatcacctccttt

SEQ ID NO: 162 - DNA, 1506 bp, artificial sequence
  STR01485_Gordonibacter_pamelaeae
acggagagtttgatcctggctcaggatgaacgctggcggcgtgcctaacacatgcaagtcgaacgattaagacggctccggccgtgaatagagtggcgaacgggtgagtaacacgtgaccaacctgccccctaccccgggataacgcaaggaaacctgcgctaataccggatactccttcccctgctcctgcaggggtcgggaaagcccagacggtaggggatggggtcgcggcccattaggtagacggcggggcaacggcccaccgtgcctgcgatgggtagccgggttgagagaccgaccggccacattgggactgagatacggcccagactcctacgggaggcagcagtggggaattttgcgcaatggggggaaccctgacgcagcaacgccgcgtgcgggatgaaggccttcgggttgtaaaccgctttcagcagggaagatagtgacggtacctgcagaagaagccccggctaactacgtgccagcagccgcggtaatacgtagggggcgagcgttatccggattcattgggcgtaaagcgcgcgtaggcggcccgtcaagcggaacctctaacccgagggctcaacccccggtcgggttccgaactggcaggctcgagtttggtagaggaagatggaattcccggtgtagcggtggaatgcgcagatatcgggaagaacaccgatggcgaaggcagtcttctgggccatcaactgacgctgaggcgcgaaagctgggggagcgaacaggattagataccctggtagtcccagccgtaaacgatgggtgctaggtgtggggggatcatccctccgtgccgcagccaacgcattaagcaccccgcctggggagtacggccgcaaggctaaaactcaaaggaattgacgggggcccgcacaagcagcggagcatgtggcttaattcgaagcaacgcgaagaaccttaccagggcttgacatgctagtgaagccggggaaacccggtggccgagaggagctagcgcaggtggtgcatggctgtcgtcagctcgtgtcgtgagatgttgggttaagtcccgcaacgagcgcaacccctatcgtatgttgccagcattgagttggggactcatacgagactgccggcgtcaagccggaggaaggtggggacgacgtcaagtcatcatgccctttatgccctgggctgcacacgtgctacaatggccggtacaacgggccgcgacctggcgacaggaagcgaatccctcaaagccggccccagttcggatcggaggctgcaacccgcctccgtgaagtcggagttgctagtaatcgcggatcagcatgccgcggtgaatacgttcccgggccttgtacacaccgcccgtcacaccacccgagtcgtctgcacccgaagccgccggccgaacccgcaaggggcggaggcgtcgaaggtgtggagggtaaggggggtgaagtcgtaacaaggtagccgtaccggaaggtgcggctggatcacctccttt

SEQ ID NO: 163 - DNA, 1526 bp, artificial sequence
  STR01496_Alistipes_indistinctus
atggagagtttgatcctggctcaggataaacgctagcggcaggcctaacacatgcaagtcgaggggcagcgggtggagtatttcggtactcctgccggcgaccggcgcacgggtgcgtaacgcgtatgcaacctacctttaacagggggataatccgaagaaatttggtctaataccccataatatcatttaaggcatcttagatggttgaaaattccgatggttagagatgggcatgcgttgtattagctagttggtgaggtaacggctcaccaaggctacgatacatagggggactgagaggttttccccccacactggtactgagacacggaccagactcctacgggaggcagcagtgaggaatattggtcaatggacgcaagtctgaaccagccatgccgcgtgcaggatgaaggtgctatgcattgtaaactgcttttgtacgagggtaaatgcaggtacgtgtacctgtttgaaagtatcgtacgaataagggtcggctaactccgtgccagcagccgcggtaatacggaggacccgagcgttatccggatttattgggtttaaagggtgcgtaggcggattagtaagttagaggtgaaagctcgatgctcaacatcgaaattgcctctgatactgttagtctagagtatagttgcggaaggcggaatgtgtggtgtagcggtgaaatgcttagatatcacacagaacaccgattgcgaaggcagctttccaagctattactgacgctgatgcacgaaagcgtggggagcgaacaggattagataccctggtagtccacgccgtaaacgatgataactcgttgcaggcgatacacagtctgtgacttagcgaaagcgttaagttatccacctggggagtacgttcgcaagaatgaaactcaaaggaattgacgggggcccgcacaagcggaggaacatgtggtttaattcgatgatacgcgaggaaccttacccgggcttgaaagttagcgacggatcctgaaaggggtcttctcttcggagcgcgaaactaggtgctgcatggttgtcgtcagctcgtgccgtgaggtgtcgggttaagtcccataacgagcgcaacccctactgttagttaccagcacgtcaaggtgggcactctagcaggactgccggtgtaagccgagaggaaggtggggatgacgtcaaatcagcacggcccttacgtccggggcgacacacgtgttacaatggtcggtacagagggtcgctaccccgtgaggggatgccaatctcgaaagccgatctcagttcggattggaggctgaaactcgcctccatgaagttggattcgctagtaatcgcgcatcagccatggcgcggtgaatacgttcccgggccttgtacacaccgcccgtcaagccatgggagttgggggtgcctgaagtacgtgaccgcaaggagcgtcctagggcaaaaccgatgactggggctaagtcgtaacaaggtagccgtaccggaaggtgcggctggaacacctccttt

SEQ ID NO: 164 - DNA, 1521 bp, artificial sequence
  STR01506_Alistipes_onderdonkii
atggagagtttgatcctggctcaggatgaacgctagcggcaggcctaacacatgcaagtcgaggggcatcacgaggtagcaatactttggtggcgaccggcgcacgggtgcgtaacgcgtatgtaacctacctataacaggggcataacactgagaaattggtactaattccccataatattcggagaggcatctctccgggttgaaaactccggtggttatagatggacatgcgttgtattagctagttggtgaggtaacggctcaccaaggcaacgatacatagggggactgagaggttaaccccccacactggtactgagacacggaccagactcctacgggaggcagcagtgaggaatattggtcaatggacgcaagtctgaaccagccatgccgcgtgcaggaagacggctctatgagttgtaaactgcttttgtacgagggtaaactcacctacgtgtaggtgactgaaagtatcgtacgaataaggatcggctaactccgtgccagcagccgcggtaatacggaggattcaagcgttatccggatttattgggtttaaagggtgcgtaggcggtttgataagttagaggtgaaatcccggggcttaactccggaactgcctctaatactgttagactagagagtagttgcggtaggcggaatgtatggtgtagcggtgaaatgcttagagatcatacagaacaccgattgcgaaggcagcttaccaaactatatctgacgttgaggcacgaaagcgtggggagcaaacaggattagataccctggtagtccacgcagtaaacgatgataactcgttgtcggcgatacacagtcggtgactaagcgaaagcgataagttatccacctggggagtacgttcgcaagaatgaaactcaaaggaattgacgggggcccgcacaagcggaggaacatgtggtttaattcgatgatacgcgaggaaccttacccgggcttgaaagttactgacgattctggaaacaggatttccctttggggcaggaaactaggtgctgcatggttgtcgtcagctcgtgccgtgaggtgtcgggttaagtcccataacgagcgcaacccctaccgttagttgccatcaggtcaagctgggcactctggcgggactgccggtgtaagccgagaggaaggtggggatgacgtcaaatcagcacggcccttacgtccggggctacacacgtgttacaatggtaggtacagagggtcgctaccccgcgaggggatgccaatctcgaaagcctatctcagttcggattggaggctgaaacccgcctccatgaagttggattcgctagtaatcgcgcatcagccatggcgcggtgaatacgttcccgggccttgtacacaccgcccgtcaagccatggaagctgggggtgcctgaagttcgtgaccgcaaggagcgacctagggcaaaaccggtaactggggctaagtcgtaacaaggtagccgtaccggaaggtgcggctggaacacctccttt

SEQ ID NO: 165 - DNA, 1526 bp, artificial sequence
  STR01549_Alistipes_indistinctus
atggagagtttgatcctggctcaggataaacgctagcggcaggcctaacacatgcaagtcgaggggcagcgggtggagtatttcggtactcctgccggcgaccggcgcacgggtgcgtaacgcgtatgcaacctacctttaacagggggataatccgaagaaatttggtctaataccccataatatcatttaaggcatcttagatggttgaaaattccgatggttagagatgggcatgcgttgtattagctagttggtgaggtaacggctcaccaaggctacgatacatagggggactgagaggttttccccccacactggtactgagacacggaccagactcctacgggaggcagcagtgaggaatattggtcaatggacgcaagtctgaaccagccatgccgcgtgcaggatgaaggtgctatgcattgtaaactgcttttgtacgagggtaaatccaggtacgtgtacctggttgaaagtatcgtacgaataagggtcggctaactccgtgccagcagccgcggtaatacggaggacccgagcgttatccggatttattgggtttaaagggtgcgtaggcggattagtaagttagaggtgaaagctcgatgctcaacatcgaaattgcctctgatactgttagtctagagtatagttgcggaaggcggaatgtgtggtgtagcggtgaaatgcttagatatcacacagaacaccgattgcgaaggcagctttccaagctattactgacgctgatgcacgaaagcgtggggagcgaacaggattagataccctggtagtccacgccgtaaacgatgataactcgttgcaggcgatacacagtctgtgacttagcgaaagcgttaagttatccacctggggagtacgttcgcaagaatgaaactcaaaggaattgacgggggcccgcacaagcggaggaacatgtggtttaattcgatgatacgcgaggaaccttacccgggcttgaaagttagcgacggatcctgaaaggggtcttctcttcggagcgcgaaactaggtgctgcatggttgtcgtcagctcgtgccgtgaggtgtcgggttaagtcccataacgagcgcaacccctactgttagttaccagcacgtcaaggtgggcactctagcaggactgccggtgtaagccgagaggaaggtggggatgacgtcaaatcagcacggcccttacgtccggggcgacacacgtgttacaatggtcggtacagagggtcgctaccccgtgaggggatgccaatctcgaaagccgatctcagttcggattggaggctgaaactcgcctccatgaagttggattcgctagtaatcgcgcatcagccatggcgcggtgaatacgttcccgggccttgtacacaccgcccgtcaagccatgggagttgggggtgcctgaagtacgtgaccgcaaggagcgtcctagggcaaaaccgatgactggggctaagtcgtaacaaggtagccgtaccggaaggtgcggctggaacacctccttt

SEQ ID NO: 166 - DNA, 1539 bp, artificial sequence
  STR01553_Alistipes_obesi
atggagagtttgatcctggctcaggatgaacgctagcggcaggcttaacacatgcaagtcgaggggcagcataatggtagtaatactattgatggcgaccggcggacgggtgcgtaacgcgtatgcaacctaccctttacagggggataacactgagaaatcggtactaataccccataatattctgggaggcatctttcggagttgaaagctttggtggtaaaggatgggcatgcgttgtattagctagttggtaaggtaacggcttaccaaggcgacgatacatagggggactgagaggttaaccccccacattggtactgagacacggaccaaactcctacgggaggcagcagtgaggaatattggtcaatggacggaagtctgaaccagccatgccgcgtgcaggaagacggctctatgagttgtaaactgcttttgtacgagggtaaacgcagatacgtgtatctgcctgaaagtatcgtacgaataaggatcggctaactccgtgccagcagccgcggtaatacggaggatccaagcgttatccggatttattgggtttaaagggtgcgtaggcggtttagtaagtcagcggtgaaattttggtgcttaacaccaaacgtgccgttgatactgctgggctagagagtagttgcggtaggcggaatgtatggtgtagcggtgaaatgcttagagatcatacagaacaccgattgcgaaggcagcttaccaaactatatctgacgttgaggcacgaaagcgtggggagcaaacaggattagataccctggtagtccacgcagtaaacgatgatagctcgttgtcggcgatacacagtcggtgactaagagaaatcgataagctatccacctggggagtacgttcgcaagaatgaaactcaaaggaattgacgggggcccgcacaagcggaggaacatgtggtttaattcgatgatacgcgaggaaccttacccgggcttgaaagttactgacgattctggaaacaggatttcccttcggggcaggaaactaggtgctgcatggttgtcgtcagctcgtgccgtgaggtgtcgggttaagtcccataacgagcgcaacccctactgatagttgccatcagagcgtttgagcgatcaaacaagctgggcactctatcgggactgccggtgtaagccgagaggaaggtggggatgacgtcaaatcagcacggcccttacgtccggggcgacacacgtgttacaatggtaggtacagagggcagccacccagtgatggggagcgaatctcgaaagcctatctcagttcggattggaggctgaaactcgcctccatgaagttggattcgctagtaatcgcgcatcagccatggcgcggtgaatacgttcccgggccttgtacacaccgcccgtcaagccatgggagttgggggtgcctgaagttcgtgaccgaaaggagcgacctagggcaaaaccgatgactggggctaagtcgtaacaaggtagccgtaccggaaggtgcggctggaacacctccttt

SEQ ID NO: 167 - DNA, 1528 bp, artificial sequence
  STR01559_Barnesiella_intestinihominis
cgaagagtttgatcctggctcaggatgaacgctagcgacaggcctaacacatgcaagtcgaggggcagcggagaggtagcaatacctttgccggcgaccggcgcacgggtgagtaacacgtatgcaatccacctgtaacagggggataacccggagaaatccggactaataccccataatatgggctctccgcatggagggtccattaaagagagcaattttggttacagacgagcatgcgctccattagccagttggcggggtaacggcccaccaaagcgacgatggataggggttctgagaggaaggtcccccacattggaactgagacacggtccaaactcctacgggaggcagcagtgaggaatattggtcaatggtcggcagactgaaccagccaagtcgcgtgagggaagacggccctacgggttgtaaacctcttttgtcggagagtaaagtacgctacgtgtagtgtattgcaagtatccgaagaaaaagcatcggctaactccgtgccagcagccgcggtaatacggaggatgcaagcgttatccggatttattgggtttaaagggtgcgtaggcggcacgccaagtcagcggtgaaattttcgggctcaacccggactgtgccgttgaaactggcgagctagagtacacaagaggcaggcggaatgcgtggtgtagcggtgaaatgcatagatatcacgcagaaccccgattgcgaaggcagcctgctagggtgaaacagacgctgaggcacgaaagcgtgggtatcgaacaggattagataccctggtagtccacgcagtaaacgatgaatactaactgtttgcgatacaatgtaagcggtacagcgaaagcgttaagtattccacctggggagtacgccggcaacggtgaaactcaaaggaattgacgggggcccgcacaagcggaggaacatgtggtttaattcgatgatacgcgaggaaccttacccgggctcaaacgcagggggaatatatatgaaagtatatagctagcaatagtcacctgcgaggtgctgcatggttgtcgtcagctcgtgccgtgaggtgtcggcttaagtgccataacgagcgcaacccctatcgacagttactaacgggttaagccgaggactctgtcgagactgccggcgcaagccgcgaggaaggtggggatgacgtcaaatcagcacggcccttacgtccggggcgacacacgtgttacaatggcaggtacagaaggcagccagtcagcaatgacgcgcgaatcccgaaaacctgtctcagttcggattggagtctgcaacccgactccatgaagctggattcgctagtaatcgcgcatcagccatggcgcggtgaatacgttcccgggccttgtacacaccgcccgtcaagccatggaagccgggagtacctgaagcatgcaaccgcaaggagcgtacgaaggtaataccggtaactggggctaagtcgtaacaaggtagccgtaccggaaggtgcggctggaacacctccttt

SEQ ID NO: 168 - DNA, 1527 bp, artificial sequence
  STR01611_Blautia_wexlerae
tcagagagtttgatcctggctcaggatgaacgctggcggcgtgcttaacacatgcaagtcgaacgggaattactttattgaaacttcggtcgatttaatttaattctagtggcggacgggtgagtaacgcgtgggtaacctgccttatacagggggataacagtcagaaatggctgctaataccgcataagcgcacagagctgcatggctcagtgtgaaaaactccggtggtataagatggacccgcgttggattagcttgttggtggggtaacggcccaccaaggcgacgatccatagccggcctgagagggtgaacggccacattgggactgagacacggcccagactcctacgggaggcagcagtggggaatattgcacaatgggggaaaccctgatgcagcgacgccgcgtgaaggaagaagtatctcggtatgtaaacttctatcagcagggaagatagtgacggtacctgactaagaagccccggctaactacgtgccagcagccgcggtaatacgtagggggcaagcgttatccggatttactgggtgtaaagggagcgtagacggtgtggcaagtctgatgtgaaaggcatgggctcaacctgtggactgcattggaaactgtcatacttgagtgccggaggggtaagcggaattcctagtgtagcggtgaaatgcgtagatattaggaggaacaccagtggcgaaggcggcttactggacggtaactgacgttgaggctcgaaagcgtggggagcaaacaggattagataccctggtagtccacgccgtaaacgatgaatactaggtgtcgggtggcaaagccattcggtgccgtcgcaaacgcagtaagtattccacctggggagtacgttcgcaagaatgaaactcaaaggaattgacggggacccgcacaagcggtggagcatgtggtttaattcgaagcaacgcgaagaaccttaccaaatcttgacatccctctgaccggtctttaatcggaccttctcttcggagcagaggtgacaggtggtgcatggttgtcgtcagctcgtgtcgtgagatgttgggttaagtcccgcaacgagcgcaacccctatcctcagtagccagcatttaaggtgggcactctggggagactgccagggataacctggaggaaggcggggatgacgtcaaatcatcatgccccttatgatttgggctacacacgtgctacaatggcgtaaacaaagggaagcgagatcgtgagatggagcaaatcccaaaaataacgtcccagttcggactgtagtctgcaacccgactacacgaagctggaatcgctagtaatcgcggatcagaatgccgcggtgaatacgttcccgggtcttgtacacaccgcccgtcacaccatgggagtcagtaacgcccgaagtcagtgacctaactgcaaagaaggagctgccgaaggcgggaccgatgactggggtgaagtcgtaacaaggtagccgtatcggaaggtgcggctggatcacctccttt

SEQ ID NO: 169 - DNA, 1527 bp, artificial sequence
  STR01613.2_Blautia_wexlerae
tcagagagtttgatcctggctcaggatgaacgctggcggcgtgcttaacacatgcaagtcgaacgggaattactttattgaaacttcggtcgatttaatttaattctagtggcggacgggtgagtaacgcgtgggtaacctgccttatacagggggataacagtcagaaatggctgctaataccgcataagcgcacagagctgcatggctcagtgtgaaaaactccggtggtataagatggacccgcgttggattagctagttggtggggtaacggcccaccaaggcgacgatccatagccggcctgagagggtgaacggccacattgggactgagacacggcccagactcctacgggaggcagcagtggggaatattgcacaatgggggaaaccctgatgcagcgacgccgcgtgaaggaagaagtatctcggtatgtaaacttctatcagcagggaagatagtgacggtacctgactaagaagccccggctaactacgtgccagcagccgcggtaatacgtagggggcaagcgttatccggatttactgggtgtaaagggagcgtagacggtgtggcaagtctgatgtgaaaggcatgggctcaacctgtggactgcattggaaactgtcatacttgagtgccggaggggtaagcggaattcctagtgtagcggtgaaatgcgtagatattaggaggaacaccagtggcgaaggcggcttactggacggtaactgacgttgaggctcgaaagcgtggggagcaaacaggattagataccctggtagtccacgccgtaaacgatgaatactaggtgtcggggagcatggctcttcggtgccgtcgcaaacgcagtaagtattccacctggggagtacgttcgcaagaatgaaactcaaaggaattgacggggacccgcacaagcggtggagcatgtggtttaattcgaagcaacgcgaagaaccttaccaagtcttgacatccgcctgaccgatccttaaccggatctttccttcgggacaggcgagacaggtggtgcatggttgtcgtcagctcgtgtcgtgagatgttgggttaagtcccgcaacgagcgcaacccctatcctcagtagccagcatttaaggtgggcactctggggagactgccagggataacctggaggaaggcggggatgacgtcaaatcatcatgccccttatgatttgggctacacacgtgctacaatggcgtaaacaaagggaagcgagattgtgagatggagcaaatcccaaaaataacgtcccagttcggactgtagtctgcaacccgactacacgaagctggaatcgctagtaatcgcggatcagaatgccgcggtgaatacgttcccgggtcttgtacacaccgcccgtcacaccatgggagtcagtaacgcccgaagtcagtgacctaactgcaaagaaggagctgccgaaggcgggaccgatgactggggtgaagtcgtaacaaggtagccgtatcggaaggtgcggctggatcacctccttt

SEQ ID NO: 170 - DNA, 1398 bp, artificial sequence
  STR01636_Blautia_wexlerae
cgtgggtaacctgccttatacagggggataacagtcagaaatggctgctaataccgcataagcgcacagagctgcatggctcagtgtgaaaaactccggtggtataagatggacccgcgttggattagctagttggtggggtaacggcccaccaaggcgacgatccatagccggcctgagagggtgaacggccacattgggactgagacacggcccagactcctacgggaggcagcagtggggaatattgcacaatgggggaaaccctgatgcagcgacgccgcgtgaaggaagaagtatctcggtatgtaaacttctatcagcagggaagatagtgacggtacctgactaagaagccccggctaactacgtgccagcagccgcggtaatacgtagggggcaagcgttatccggatttactgggtgtaaagggagcgtagacggtgtggcaagtctgatgtgaaaggcatgggctcaacctgtggactgcattggaaactgtcatacttgagtgccggaggggtaagcggaattcctagtgtagcggtgaaatgcgtagatattaggaggaacaccagtggcgaaggcggcttactggacggtaactgacgttgaggctcgaaagcgtggggagcaaacaggattagataccctggtagtccacgccgtaaacgatgaatactaggtgtcggggagcaaagctcttcggtgccgtcgcaaacgcagtaagtattccacctggggagtacgttcgcaagaatgaaactcaaaggaattgacggggacccgcacaagcggtggagcatgtggtttaattcgaagcaacgcgaagaaccttaccaaatcttgacatccctctgaccggtctttaatcggaccttctcttcggagcagaggtgacaggtggtgcatggttgtcgtcagctcgtgtcgtgagatgttgggttaagtcccgcaacgagcgcaacccctatcctcagtagccagcatttaaggtgggcactctggggagactgccagggataacctggaggaaggcggggatgacgtcaaatcatcatgccccttatgatttgggctacacacgtgctacaatggcgtaaacaaagggaagcgagatcgtgagatggagcaaatcccaaaaataacgtcccagttcggactgtagtctgcaacccgactacacgaagctggaatcgctagtaatcgcggatcagaatgccgcggtgaatacgttcccgggtcttgtacacaccgcccgtcacaccatgggagtcagtaacgcccgaagtcagtgacctaactgcaaagaaggagctgccgaaggcgggaccgatgactggggtgaagtcgtaacaaggtagccgtatcggaaggtgcggctggatcacctccttt

SEQ ID NO: 171 - DNA, 1529 bp, artificial sequence
  STR01640_Blautia_faecis
atcagagagtttgatcctggctcaggatgaacgctggcggcgtgcttaacacatgcaagtcgaacgggaaatactttattgaaacttcggtggatttaatttatttctagtggcggacgggtgagtaacgcgtgggtaacctgccttatactgggggataacagccagaaatgactgctaataccgcataagcgcacagaaccgcatggttccgtgtgaaaaactccggtggtataagatggacccgcgttggattagctagttggcagggcagcggcctaccaaggcgacgatccatagccggcctgagagggtgaacggccacattgggactgagacacggcccagactcctacgggaggcagcagtggggaatattgcacaatgggggaaaccctgatgcagcgacgccgcgtgaaggaagaagtatctcggtatgtaaacttctatcagcagggaagataatgacggtacctgactaagaagccccggctaactacgtgccagcagccgcggtaatacgtagggggcaagcgttatccggatttactgggtgtaaagggagcgtagacggcgcagcaagtctgatgtgaaaggcaggggcttaacccctggactgcattggaaactgctgtgcttgagtgccggaggggtaagcggaattcctagtgtagcggtgaaatgcgtagatattaggaggaacaccagtggcgaaggcggcttactggacggtaactgacgttgaggctcgaaagcgtggggagcaaacaggattagataccctggtagtccacgccgtaaacgatgaatactaggtgtcagggagcacagctctttggtgccgccgcaaacgcattaagtattccacctggggagtacgttcgcaagaatgaaactcaaaggaattgacggggacccgcacaagcggtggagcatgtggtttaattcgaagcaacgcgaagaaccttaccaaatcttgacatccctctgaccgggacttaaccgtccctttccttcgggacaggggagacaggtggtgcatggttgtcgtcagctcgtgtcgtgagatgttgggttaagtcccgcaacgagcgcaacccctatccttagtagccagcacgtaatggtgggcactctgaggagactgccagggataacctggaggaaggcggggatgacgtcaaatcatcatgccccttatgatttgggctacacacgtgctacaatggcgtaaacaaagggaagcgaacctgtgagggtgggcaaatctcaaaaataacgtcccagttcggactgcagtctgcaactcgactgcacgaagctggaatcgctagtaatcgcggatcagaatgccgcggtgaatacgttcccgggtcttgtacacaccgcccgtcacaccatgggagtcagtaacgcccgaagtcagtgacctaaccgcaagggaggagctgccgaaggcgggaccgatgactggggtgaagtcgtaacaaggtagccgtatcggaaggtgcggctggatcacctccttt

SEQ ID NO: 172 - DNA, 1514 bp, artificial sequence
  STR01947_Peptoniphilaceae_NG4_sp2
atatgagagtttgatcctggctcaggatgaacgctggcggcgtgcctaacacatgcaagtcgagcgagaagctgatgattgacacttcggttgagagaatcagtggaaagcggcggacgggtgagtaacgcgtaggcaacctgccctttgcagagggatagcctcgggaaaccgggattaaaacctcatgatgctgtatgtccgcatgggcagacggtcaaagatttatcggcagaggatgggcctgcgtctgattagttagttggtggggtaacggcctaccaaggcaacgatcagtagccgacctgagagggtgatcggccacattggaactgagacacggtccaaactcctacgggaggcagcagtggggaatattgcacaatgggggaaaccctgatgcagcaacgccgcgtgagcgaagaaggcctttgggtcgtaaagctctgtccttggggaagaaaaaatgacggtacccaaggaggaagccccggctaactacgtgccagcagccgcggtaatacgtagggggcaagcgttatccggaattattgggcgtaaagagtatgtaggtggtttcttaagcgcagggtataaggcaatggcttaaccattgttcgccccgtgaactgagagacttgagtgctggagaggaaagcggaattcctagtgtagcggtgaaatgcgtagatattaggaggaacaccagtggcgaaggcggctttctggacagtaactgacactgagatacgaaagcgtggggagcaaacaggattagataccctggtagtccacgccgtaaacgatgagcactaggtgtcgggctcgcaagagttcggtgccggagttaacgcattaagtgctccgcctggggagtacgcacgcaagtgtaaaactcaaaggaattgacggggacccgcacaagcagcggagcatgtggtttaattcgaagcaacgcgaagaaccttaccagggcttgacatccctccgaccggtccttaatcggacctttctacggacgggggagacaggtggtgcatggttgtcgtcagctcgtgtcgtgagatgttgggttaagtcccgcaacgagcgcaacccttgtcattagttgctaacagtaagatgagaactctaatgagactgccgtggataacacggaggaaggtggggatgacgtcaaatcatcatgccccttatgtcctgggctacacacgtgctacaatggtcggtacaaagagaagcaagaccgcaaggtggagcaaatctcaaaaaccgatcccagttcggattgcaggctgcaactcgcctgcatgaagtcggagttgctagtaatcgcagatcagaatgctgcggtgaatgcgttcccgggtcttgtacacaccgcccgtcacaccatggaagttgggggcgcccgaagtcggctagtaaataggctgcctaaggcgaaatcaatgactggggtgaagtcgtaacaaggtagccgtatcggaaggtgcggctggatcacctccttt

SEQ ID NO: 173 - DNA, 1531 bp, artificial sequence
  STR01980_Sutterella_wadsworthensis
taaagagtttgatcctggctcagattgaacgctggcggcatgctttacacatgcaagtcgaacggcagcgcggggagcttgctccctggcggcgagtggcgcacgggtgagtaatacatcggaacgtgtcttctagtgggggataactgcccgaaagggcagctaataccgcatgagacctgagggtgaaagcgggggatcgcaagacctcgcgctggaagagcggccgatgtccgattagctggttggtgaggtaaaggctcaccaaggcgacgatcggtagctggtctgagaggacgaccagccacactgggactgagacacggcccagactcctacgggaggcagcagtggggaattttggacaatgggggcaaccctgatccagccatgccgcgtgcaggatgaaggtcttcggattgtaaactgcttttgtcagggacgaaaagggatgcgataacaccgcattccgctgacggtacctgaagaataagcaccggctaactacgtgccagcagccgcggtaatacgtagggtgcaagcgttaatcggaattactgggcgtaaagcgtgcgcaggcggttctgtaagatagatgtgaaatccccgggctcaacctgggaattgcatatatgactgcaggacttgagtttgtcagaggagggtggaattccacgtgtagcagtgaaatgcgtagatatgtggaagaacaccgatggcgaaggcagccctctgggacatgactgacgctcatgcacgaaagcgtggggagcaaacaggattagataccctggtagtccacgccctaaacgatgtctactagttgttggggacgatagtccttggtaacgcagctaacgcgtgaagtagaccgcctggggagtacggtcgcaagattaaaactcaaaggaattgacggggacccgcacaagcggtggatgatgtggattaattcgatgcaacgcgaaaaaccttacctagccttgacatgccaggaaggtctgagagatcaggccgtgcccgcaagggaatctggacacaggtgctgcatggctgtcgtcagctcgtgtcgtgagatgttgggttaagtcccgcaacgagcgcaacccttgtcattagttgctacgaaagggcactctaatgagactgccggtgacaaaccggaggaaggtggggatgacgtcaagtcctcatggcccttatggctagggcctcacacgtcatacaatggtcggaacagagggaagcgaagccgcgaggtgaagccaatcccagaaaaccgatcgtagtccggattgcagtctgcaactcgactgcatgaagtcggaatcgctagtaatcgcggatcagcatgccgcggtgaatacgttcccgggtcttgtacacaccgcccgtcacaccatgggagtggggttcaccagaagacgtttgcccaaccgaaaggaaggcggcgtccacggtgggcttcatgactggggtgaagtcgtaacaaggtagccgtaccggaaggtgcggctggatcacctccttt

SEQ ID NO: 174 - DNA, 1513 bp, artificial sequence
  STR02054_Ruminococcaceae_NG12_sp1
tttagagagtttgatcctggctcaggacgaacgctggcggcgtgcctaacacatgcaagtcgaacggacgagaaggtgcttgcaccttcaagttagtggcggacgggtgagtaacgcgtgagcaacctgcctcaaagagggggataacgtctggaaacggacgctaataccgcatgacgtattcgataggcatctattggataccaaaggagcaatccgctttgagatgggctcgcgtctgattagctagttggtggggtaaaggcctaccaaggcgacgatcagtagccggactgagaggttgaacggccacattgggactgagacacggcccagactcctacgggaggcagcagtgggggatattgcacaatgggggaaaccctgatgcagcaacgccgcgtgaaggaagacggttttcggattgtaaacttctgttcttagtgacgataatgacggtagctaaggagaaagctccggctaactacgtgccagcagccgcggtaatacgtagggagcgagcgttgtccggaattactgggtgtaaagggagcgtaggcgggagatcaagtcagatgtgaaaactatgggctcaacccataacctgcatttgaaactgttcttcttgagtgaagtagaggcaggcggaattccgagtgtagcggtgaaatgcgtagatattcggaggaacaccagtggcgaaggcggcctgctgggcttttactgacgctgaggctcgaaagcatggggagcaaacaggattagataccctggtagtccatgccgtaaacgatgattactaggtgtggggtggctgacccattccgtgccggagttaacacaataagtaatccacctggggagtacggccgcaaggttgaaactcaaaggaattgacgggggcccgcacaagcagtggagtatgtggtttaattcgaagcaacgcgaagaaccttaccaggtcttgacatccgactaacgaagtagagatacattaggtgcccttcggggaaagtcgagacaggtggtgcatggttgtcgtcagctcgtgtcgtgagatgttgggttaagtcccgcaacgagcgcaacccttgtcattagttgctacgcaagagcactctaatgagactgccgttgacaaaacggaggaaggtggggacgacgtcaaatcatcatgccccttatgacctgggctacacacgtactacaatggccgttaacagagggaagcaatactgtgaagtggagcaaacccctaaaaacggtcccagttcagattgcaggctgcaacccgcctgcatgaagtcggaattgctagtaatcgcggatcagcatgccgcggtgaatacgttcccgggccttgtacacaccgcccgtcacaccatgggagccggtaatacccgaagtcggtagtctaaccgcaaggaggacgccgccgaaggtaggattggcgactggggtgaagtcgtaacaaggtagccgtatcggaaggtgcggctggatcacctccttt

SEQ ID NO: 175 - DNA, 1423 bp, artificial sequence
  STR02163_[Extibacter]_muris
tgagcggcggacgggtgagtaacgcgtgggcaacctgcctcacacagggggataacagctagaaatggctgctaataccgcataaggccgaagcaccgcatggtgcgccggcaaaagctccggcggtgtgagatgggcccgcgtctgattaggtagttggtgcggtaacggcgcaccaagccgacgatcagtagccgacctgagagggtgaccggccacattgggactgagacacggcccaaactcctacgggaggcagcagtggggaatattgcacaatgggggaaaccctgatgcagcgacgccgcgtgaaggatgaagtatttcggtatgtaaacttctatcagcagggaagaagatgacggtacctgactaagaagccccggctaactacgtgccagcagccgcggtaatacgtagggggcaagcgttatccggatttactgggtgtaaagggagcgtagacggcagggcaagtctggagtgaaagcccggggctcaaccccgggactgctttggaaactgccctgctagagtgtcggagaggcaagtggaattcctagtgtagcggtgaaatgcgtagatattaggaggaacaccagtggcgaaggcggcttgctggacgatgactgacgttgaggctcgaaagcgtggggagcaaacaggattagataccctggtagtccacgccgtaaacgatgattactaggtgtcgggaagcaaagcttctcggtgccgcagcaaacgcagtaagtaatccacctggggagtacgttcgcaagaatgaaactcaaaggaattgacggggacccgcacaagcggtggagcatgtggtttaattcgaagcaacgcgaagaaccttacctggtcttgacatccccctgaccggacagtaacgtgtcctttcctacgggacaggggagacaggtggtgcatggttgtcgtcagctcgtgtcgtgagatgttgggttaagtcccgcaacgagcgcaacccctatctttagtagccagcaggtgaggctgggcactctagagagactgccagggagaacctggaggaaggtggggatgacgtcaaatcatcatgccccttatgatcagggctacacacgtgctacaatggcgtaaacagagggaagcgaccctgcgaaggcaagcgaatcccaaaaataacgtcccagttcggattgtagtctgcaacccgactacatgaagctggaatcgctagtaatcgcgaatcagaatgtcgcggtgaatacgttcccgggtcttgtacacaccgcccgtcacaccatgggagtcggtaacgcccgaagtcagtgacccaaccgcaaggagggagctgccgaaggtgggaccgataactggggtgaagtcgtaacaaggtagccgtatcggaaggtgcggctggatcacctccttt

SEQ ID NO: 176 - DNA, 1534 bp, artificial sequence
  STR02283_Lactonifactor_longoviformis
atcagagagtttgatcctggctcaggatgaacgctggcggcgtgcttaacacatgcaagtcgaacgaagcataaggaacggattatttcggtaagaagtactttatgactgagtggcggacgggtgagtaacgcgtggataacctgcctcatacagggggataacagttagaaatgactgctaataccgcataagcgcacagtgctgcatggcacagtgtgaaaagctccggcggtatgagatggatccgcgtttgattagctagttggtggggtaaaggcctaccaaggcgacgatcaatagccgacctgagagggtgaccggccacattgggactgagacacggcccaaactcctacgggaggcagcagtggggaatattgcacaatgggggaaaccctgatgcagcgacgccgcgtgaaggaagaagtatttcggtatgtaaacttctatcagcagggaagaaaatgacggtacctgactaagaagccccggctaattacgtgccagcagccgcggtaatacgtaaggggcaagcgttatccggatttactgggtgtaaagggagcgtagacggcagtgcaagtctgatgtgaaagcccggggctcaaccccgggactgcattggaaactgtgcagctagagtgtcggagaggtaagtggaattcctagtgtagcggtgaaatgcgtagatattaggaggaacaccagtggcgaaggcggcttactggacgataactgacgttgaggctcgaaagcgtggggagcaaacaggattagataccctggtagtccacgccgtaaacgatgaatactaggtgtcgggcgccaaaggcgttcggtgccgcagcaaacgcaataagtattccacctggggagtacgttcgcaagaatgaaactcaaaggaattgacggggacccgcacaagcggtggagcatgtggtttaattcgaagcaacgcgaagaaccttaccaagtcttgacatctgcctgaccggtccgtaacaggacccttccttcgggacaggcaagacaggtggtgcatggttgtcgtcagctcgtgtcgtgagatgttgggttaagtcccgcaacgagcgcaacccttatccttagtagccagcaggtagagctgggcactctagggagactgccagggacaacctggaggaaggtggggatgacgtcaaatcatcatgccccttatgatttgggctacacacgtgctacaatggcgtaaacaaagggaggcgaaggggtgacctggagcaaatcccaaaaataacgtctcagttcggattgtagtctgcaactcgactacatgaagctggaatcgctagtaatcgcgaatcagaatgtcgcggtgaatacgttcccgggtcttgtacacaccgcccgtcacaccatgggagtcggatatgcccgaagccggtgaccgaacccgaaagggaaggagccgtcgaaggtggagccgataactggggtgaagtcgtaacaaggtagccgtatcggaaggtgcggctggatcacctccttt

SEQ ID NO: 177 - DNA, 1529 bp, artificial sequence
  STR02390_Blautia_faecis
atcagagagtttgatcctggctcaggatgaacgctggcggcgtgcttaacacatgcaagtcgaacgggaaacattttattgaagcttcggcagatttagcttgtttctagtggcggacgggtgagtaacgcgtgggtaacctgccttatactgggggataacagccagaaatgactgctaataccgcataagcgcacagaaccgcatggttcggtgtgaaaaactccggtggtataagatggacccgcgttggattagctagttggcagggcagcggcctaccaaggcgacgatccatagccggcctgagagggtgaacggccacattgggactgagacacggcccagactcctacgggaggcagcagtggggaatattgcacaatgggggaaaccctgatgcagcgacgccgcgtgaaggaagaagtatctcggtatgtaaacttctatcagcagggaagataatgacggtacctgactaagaagccccggctaactacgtgccagcagccgcggtaatacgtagggggcaagcgttatccggatttactgggtgtaaagggagcgtagacggcgcagcaagtctgatgtgaaaggcaggggcttaacccctggactgcattggaaactgctgtgcttgagtgccggaggggtaagcggaattcctagtgtagcggtgaaatgcgtagatattaggaggaacaccagtggcgaaggcggcttactggacggtaactgacgttgaggctcgaaagcgtggggagcaaacaggattagataccctggtagtccacgccgtaaacgatgaatactaggtgtcagggagcacagctctttggtgccgccgcaaacgcattaagtattccacctggggagtacgttcgcaagaatgaaactcaaaggaattgacggggacccgcacaagcggtggagcatgtggtttaattcgaagcaacgcgaagaaccttaccaaatcttgacatccctctgaccgggacttaaccgtccctttccttcgggacaggggagacaggtggtgcatggttgtcgtcagctcgtgtcgtgagatgttgggttaagtcccgcaacgagcgcaacccctatccttagtagccagcacgtaatggtgggcactctgaggagactgccagggataacctggaggaaggcggggatgacgtcaaatcatcatgccccttatgatttgggctacacacgtgctacaatggcgtaaacaaagggaagcgaacccgcgagggtgggcaaatctcaaaaataacgtcccagttcggactgcagtctgcaactcgactgcacgaagctggaatcgctagtaatcgcggatcagaatgccgcggtgaatacgttcccgggtcttgtacacaccgcccgtcacaccatgggagtcagtaacgcccgaagtcagtgacctaaccgcaagggaggagctgccgaaggcgggaccgatgactggggtgaagtcgtaacaaggtagccgtatcggaaggtgcggctggatcacctccttt

SEQ ID NO: 178 - DNA, 1528 bp, artificial sequence
  STR02414_Blautia_wexlerae
atcagagagtttgatcctggctcaggatgaacgctggcggcgtgcttaacacatgcaagtcgaacgggaattactttattgaaacttcggtcgatttaatttaattctagtggcggacgggtgagtaacgcgtgggtaacctgccttatacagggggataacagtcagaaatggctgctaataccgcataagcgcacagagctgcatggctcagtgtgaaaaactccggtggtataagatggacccgcgttggattagctggttggtggggtaacggcccaccaaggcgacgatccatagccggcctgagagggtgaacggccacattgggactgagacacggcccagactcctacgggaggcagcagtggggaatattgcacaatgggggaaaccctgatgcagcgacgccgcgtgaaggaagaagtatctcggtatgtaaacttctatcagcagggaagatagtgacggtacctgactaagaagccccggctaactacgtgccagcagccgcggtaatacgtagggggcaagcgttatccggatttactgggtgtaaagggagcgtagacggtgtggcaagtctgatgtgaaaggcatgggctcaacctgtggactgcattggaaactgtcatacttgagtgccggaggggtaagcggaattcctagtgtagcggtgaaatgcgtagatattaggaggaacaccagtggcgaaggcggcttactggacggtaactgacgttgaggctcgaaagcgtggggagcaaacaggattagataccctggtagtccacgccgtaaacgatgaatactaggtgtcgggtggcagagccattcggtgccgtcgcaaacgcagtaagtattccacctggggagtacgttcgcaagaatgaaactcaaaggaattgacggggacccgcacaagcggtggagcatgtggtttaattcgaagcaacgcgaagaaccttaccaaatcttgacatccctctgaccggtctttaatcggaccttctcttcggagcagaggtgacaggtggtgcatggttgtcgtcagctcgtgtcgtgagatgttgggttaagtcccgcaacgagcgcaacccctatcctcagtagccagcatttaaggtgggcactctggggagactgccagggataacctggaggaaggcggggatgacgtcaaatcatcatgccccttatgatttgggctacacacgtgctacaatggcgtaaacaaagggaagcgagatcgtgagatggagcaaatcccaaaaataacgtcccagttcggactgtagtctgcaacccgactacacgaagctggaatcgctagtaatcgcggatcagaatgccgcggtgaatacgttcccgggtcttgtacacaccgcccgtcacaccatgggagtcagtaacgcccgaagtcagtgacctaaccgaaagggaggagctgccgaaggcgggaccgatgactggggtgaagtcgtaacaaggtagccgtatcggaaggtgcggctggatcacctccttt

SEQ ID NO: 179 - DNA, 1523 bp, artificial sequence
  STR02420_Neobitarella_massiliensis
taaagagtttgatcctggctcaggacgaacgctggcggcgcgcttaacacatgcaagtcgaacggacacatccgacggaatagcttgctaggaagatggatgttgttagtggcggacgggtgagtaacacgtgagcaacctacctcagagtgggggacaacagttggaaacgactgctaataccgcataagatggcagggtcgcatggcctggtcataaaaggagcaatttgctctgagatgggctcgcgtctgattagctagttggtgaggtaacggcccaccaaggcaacgatcagtagccggactgagaggttgaacggccacattgggactgagacacggcccagactcctacgggaggcagcagtggggaatattgcacaatgggggaaaccctgatgcagcgacgccgcgtgagggaagacggttttcggattgtaaacctctgtcttgtgggacgatagtgacggtaccacaggaggaagccatggctaactacgtgccagcagccgcggtaatacgtagatggcgagcgttgtccggaattactgggtgtaaagggagtgtaggcgggctggtaagttgaatgtgaaaccttcgggctcaacccggagcgtgcgttcaaaactgctggtcttgagtgaagtagaggcaggcggaattcccggtgtagcggtggaatgcgtagatatcgggaggaacaccagtggcgaaggcggcctgctgggcttttactgacgctgaggctcgaaagcatgggtagcaaacaggattagataccctggtagtccatgccgtaaacgatgattactaggtgtggggggattgaccccctccgtgccggagttaacacaataagtaatccacctggggagtacgaccgcaaggttgaaactcaaaggaattgacgggggcccgcacaagcagtggagtatgtggtttaattcgaagcaacgcgaaaaaccttaccaggtcttgacatccatcgccaggctaagagattagctgttcccttcggggacgatgagacaggtggtgcatggttgtcgtcagctcgtgtcgtgagatgttgggttaagtcccgcaacgagcgcaacccttactattagttgctacgcaagagcactctaatgggactgccgttgacaaaacggaggaaggtggggatgacgtcaaatcatcatgccccttatgacctgggctacacacgtactacaatggccgttaacagagagcagcgataccgcgaggtggagcgaatctagaaaaacggtctcagttcggattgcaggctgaaactcgcctgcatgaagtcggaattgctagtaatcgcggatcagcatgccgcggtgaatacgttcccgggccttgtacacaccgcccgtcacaccatgagagccggtaacacccgaagtcagtagcctaaccgcaaggagggcgctgccgaaggtggggctggtaattggggtgaagtcgtaacaaggtagccgtatcggaaggtgcggctggatcacctccttt

SEQ ID NO: 180 - DNA, 1527 bp, artificial sequence
  STR02450_Blautia_wexlerae
tcagagagtttgatcctggctcaggatgaacgctggcggcgtgcttaacacatgcaagtcgaacgggaattattttattgaaacttcggtcgatttaatttaattctagtggcggacgggtgagtaacgcgtgggtaacctgccttatacagggggataacagtcagaaatggctgctaataccgcataagcgcacagagctgcatggctcggtgtgaaaaactccggtggtataagatggacccgcgttggattagcttgttggtggggtaacggcccaccaaggcgacgatccatagccggcctgagagggtgaacggccacattgggactgagacacggcccagactcctacgggaggcagcagtggggaatattgcacaatgggggaaaccctgatgcagcgacgccgcgtgaaggaagaagtatctcggtatgtaaacttctatcagcagggaagatagtgacggtacctgactaagaagccccggctaactacgtgccagcagccgcggtaatacgtagggggcaagcgttatccggatttactgggtgtaaagggagcgtagacggtgtggcaagtctgatgtgaaaggcatgggctcaacctgtggactgcattggaaactgtcatacttgagtgccggaggggtaagcggaattcctagtgtagcggtgaaatgcgtagatattaggaggaacaccagtggcgaaggcggcttactggacggtaactgacgttgaggctcgaaagcgtggggagcaaacaggattagataccctggtagtccacgccgtaaacgatgaatactaggtgtcgggtggcagagccattcggtgccgtcgcaaacgcagtaagtattccacctggggagtacgttcgcaagaatgaaactcaaaggaattgacggggacccgcacaagcggtggagcatgtggtttaattcgaagcaacgcgaagaaccttaccaagtcttgacatccctctgaccggtacttaatcgttcctttccttcgggacagaggagacaggtggtgcatggttgtcgtcagctcgtgtcgtgagatgttgggttaagtcccgcaacgagcgcaacccctatcctcagtagccagcatttaaggtgggcactctggggagactgccagggataacctggaggaaggcggggatgacgtcaaatcatcatgccccttatgatttgggctacacacgtgctacaatggcgtaaacaaagggaagcgagattgtgagatggagcaaatcccaaaaataacgtcccagttcggactgtagtctgcaacccgactacacgaagctggaatcgctagtaatcgcggatcagaatgccgcggtgaatacgttcccgggtcttgtacacaccgcccgtcacaccatgggagtcagtaacgcccgaagtcagtgacctaactgcaaagaaggagctgccgaaggcgggaccgatgactggggtgaagtcgtaacaaggtagccgtatcggaaggtgcggctggatcacctccttt

SEQ ID NO: 181 - DNA, 1513 bp, artificial sequence
  STR02480_Anaeromassilibacillus_sp3
tttagagagtttgatcctggctcaggacgaacgctggcggcgtgcctaacacatgcaagtcgaacggacgagagggagcttgctccctcaagttagtggcggacgggtgagtaacgcgtgagtaacctgcctttcagaggggaataacattctgaaaaggatgctaataccgcatgacatcgtagtatcgcatggtacagcgatcaaaggagcaatccgctgaaagatggactcgcgtccgattagctagttggcgggataaaggcccaccaaggcgacgatcggtagccggactgagaggttgatcggccacattgggactgagacacggcccagactcctacgggaggcagcagtgggggatattgcacaatgggggaaaccctgatgcagcaacgccgcgtgaaggaagaaggtcttcggattgtaaacttctgtcctcagggaagataatgacggtacctgaggaggaagctccggctaactacgtgccagcagccgcggtaatacgtagggagcgagcgttgtccggatttactgggtgtaaagggtgcgtaggcggatctgcaagtcagtagtgaaatcccagggcttaaccctggaactgctattgaaactgtgggtcttgagtgaggtagaggcaggcggaattcccggtgtagcggtgaaatgcgtagagatcgggaggaacaccagtggcgaaggcggcctgctgggccttaactgacgctgaggcacgaaagcatgggtagcaaacaggattagataccctggtagtccatgccgtaaacgatgattactaggtgtgggtggtctgaccccatccgtgccggagttaacacaataagtaatccacctggggagtacggccgcaaggttgaaactcaaaggaattgacgggggcccgcacaagcagtggagtatgtggtttaattcgaagcaacgcgaagaaccttaccaggtcttgacatcctgctaacgaggtagagatacgttaggtgcccttcggggaaagcagagacaggtggtgcatggttgtcgtcagctcgtgtcgtgagatgttgggttaagtcccgcaacgagcgcaacccctgctattagttgctacgcaagagcactctaataggactgccgttgacaaaacggaggaaggtggggacgacgtcaaatcatcatgccccttatgacctgggctacacacgtactacaatggccgtcaacagagagaagcaaaactgcgaagtggagcaaaactctaaaaacggtcccagttcggatcgtaggctgcaacccgcctacgtgaagttggaattgctagtaatcgcggatcatcatgccgcggtgaatacgttcccgggccttgtacacaccgcccgtcacaccatgggagccggtaatacccgaagtcagtagtctaaccgcaagggggacgctgccgaaggtaggattggcgactggggtgaagtcgtaacaaggtagccgtatcggaaggtgcggctggatcacctccttt

SEQ ID NO: 182 - DNA, 1518 bp, artificial sequence
  STR02509_Blautia_wexlerae
tcagagagtttgatcctggctcaggatgaacgctggcggcgtgcttaacacatgcaagtcgaacgggaattactttattgaaacttcggtcgatttaatttaattctagtggcggacgggtgagtaacgcgtgggtaacctgccttatacagggggataacagtcagaaatggctgctaataccgcataagcgcacagagctgcatggctcagtgtgaaaaactccggtggtataagatggacccgcgttggattagcttgttggtggggtaacggcccaccaaggcgacgatccatagccggcctgagagggtgaacggccacattgggactgagacacggcccagactcctacgggaggcagcagtggggaatattgcacaatgggggaaaccctgatgcagcgacgccgcgtgaaggaagaagtatctcggtatgtaaacttctatcagcagggaagatagtgacggtacctgactaagaagccccggctaactacgtgccagcagccgcggtaatacgtagggggcaagcgttatccggatttactgggtgtaaagggagcgtagacggtgtggcaagtctgatgtgaaaggcatgggctcaacctgtggactgcattggaaactgtcatacttgagtgccggaggggtaagcggaattcctagtgtagcggtgaaatgcgtagatattaggaggaacaccagtggcgaaggcggcttactggacggtaactgacgttgaggctcgaaagcgtggggagcaaacaggattagataccctggtagtccacgccgtaaacgatgaatactaggtgtcggggagcatggctcttcggtgccgtcgcaaacgcagtaagtattccacctggggagtacgttcgcaagaatgaaactcaaaggaattgacggggacccgcacaagcggtggagcatgtggtttaattcgaagcaacgcgaagaaccttaccaagtcttgacatccgcctgaccgatccttaaccggatctttccttcgggacaggcgagacaggtggtgcatggttgtcgtcagctcgtgtcgtgagatgttgggttaagtcccgcaacgagcgcaacccctatcctcagtagccagcatttaaggtgggcactctggggagactgccagggataacctggaggaaggcggggatgacgtcaaatcatcatgccccttatgatttgggctacacacgtgctacaatggcgtaaacaaagggaagcgagatcgtgagatggagcaaatcccaaaaataacgtcccagttcggactgtagtctgcaacccgactacacgaagctggaatcgctagtaatcgcggatcagaatgccgcggtgaatacgttcccgggtcttgtacacaccgcccgtcacaccatgggagtcagtaacgcccgaagtcagtgacctaactgcaaagaaggagctgccgaaggcgggaccgatgactggggtgaagtcgtaacaaggtagccgtatcggaaggtgcggctggatc

SEQ ID NO: 183 - DNA, 1517 bp, artificial sequence
  STR02527_Anaerofustis_stercorihominis
ttttgagagtttgatcctggctcaggacgaacgctggcggcgtgcttaacacatgcaagtcgaacgagaaacttataattgatccttcgggtgaagttataagcggacagtggcgaacgggtgagtaacgcgtaggtaaccaacctcatgcagggggatagcccagggaaacttggattaaacccgcataagaccacagcaccgcatggtgcaggggtaaaaactccggtggcatgagacggacctgcgtcttattaggtagttggtgaggtaacggctcaccaagccaacgatgagtagccgacctgagagggtgatcggccacattgggactgagacacggcccagactcctacgggaggcagcagtggggaatattgcgcaatgggggaaaccctgacgcagcaacgccgcgtgagcgatgaaggttttcggatcgtaaagctctgtctttggggaagataatgacggtacccaaggaggaagctccggctaactacgtgccagcagccgcggtaatacgtagggagcaagcgttgtccggattcactgggcgtaaagagcacgtaggcggttaattaagtcaggtgtgaaagttttcggctcaaccggaaaagtgcacttgaaactggataacttgagtatcggagaggtaagcggaattcctagtgtagcggtgaaatgcgtagagattaggaagaacaccggtggcgaaggcggcttactggacgataactgacgctgaggtgcgaaagcgtggggagcgaacaggattagataccctggtagtccacgccgtaaacgatgaatactaggtgttggggtaactcagtgccgcagttaacacattaagtattccgcctggggagtacgctcgcaagagtgaaactcaaaggaattgacgggggcccgcacaagcagcggagcatgtggtttaattcgaagcaacgcgaagaaccttaccaggtcttgacatcccttgaccgcctaagagattaggctttccttcgggacaaggagacaggtggtgcatggttgtcgtcagctcgtgtcgtgagatgttgggttaagtcccgcaacgagcgcaacccttatgtttagttactaacattcagttgaggactctagacagactgcccttgaaagagggaggaaggtggggacgacgtcaaatcatcatgccccttacgacctgggctacacacgtgctacaatggtctgtacagagggttgcgaagcagtgatgctaagctaatctcaaaaagcagatctcagttcggattgcaggctgcaactcgcctgcatgaagtcggagttgctagtaatcgcgaatcagaatgtcgcggtgaatgcgttcccgggccttgtacacaccgcccgtcacaccacgagagttggtaacacccgaagccagtgagctaaccattaggaggcagctgtcgaaggtgggatcagtaattggggtgaagtcgtaacaaggtagccgtatcggaaggtgcggctggatcacctccttt

SEQ ID NO: 184 - DNA, 1515 bp, artificial sequence
  STR02552_Ruminococcaceae_NG33_sp1
tttagagagtttgatcctggctcaggatgaacgctggcggcgtgcctaacacatgcaagtcgaacggagcaccccggaacgagacttcggtcaagggaagggaatgcttagtggcggacgggtgagtaacgcgtgaggaacctgccttccagtgggggataacacatcgaaaggtgtgctaataccgcataacgtatgtttaccgcatggtagagataccaaagatttattgctggaagatggcctcgcgtccaattagctagttggcggggtaaatgcccaccaaggcgacgattggtagccggactgagaggttgaacggccacattgggactgagacacggcccagactcctacgggaggcagcagtggggaatattgcacaatgggggaaaccctgatgcagcaacgccgcgtgaaggatgaaggttttcggattgtaaacttcttttattcgggacgaagaaagtgacggtaccgaatgaataagccacggctaactacgtgccagcagccgcggtaatacgtaggtggcgagcgttatccggatttactgggtgtaaagggcgagtaggcgggattgcaagtcagatgtgaaaactatgggctcaacccatagactgcatttgaaactgtagttcttgagtgatggagaggcaggcggaattcccggtgtagcggtggaatgcgtagatatcgggaggaacaccagtggcgaaggcggcctgctggacattaactgacgctgaggcgcgaaagcgtggggagcaaacaggattagataccctggtagtccacgctgtaaacgatgattactaggtgtggggggtactgaccccctccgtgccggagttaacacaataagtaatccacctggggagtacggccgcaaggttgaaactcaaaggaattgacgggggcccgcacaagcagtggagtatgtggtttaattcgaagcaacgcgaagaaccttaccagggcttgacatcccactaacgaagtagagatacattaggtgcccttcggggaaagtggagacaggtggtgcatggttgtcgtcagctcgtgtcgtgagatgttgggttaagtcccgcaacgagcgcaacccttattgttagttgctacgcaagagcactctagcgagactgccgttgacaaaacggaggaaggtggggacgacgtcaaatcatcatgccctttatgtcctgggctacacacgtactacaatggcggtcatacagagggaagcaagacagtgatgtggagcaaaaccctaaaagccgtctcagttcagattgcaggctgaaacccgcctgcatgaagtcggaattgctagtaatcgcggatcagcatgccgcggtgaatacgttcccgggccttgtacacaccgcccgtcacaccatgagagtcggaaacacccgaagtcggtagtccaaccgcaaggagggcgccgccgaaggtgggtctgataattggggtgaagtcgtaacaaggtagccgtatcggaaggtgcgg

SEQ ID NO: 185 - DNA, 1512 bp, artificial sequence
  STR02560_Peptoniphilaceae_NG4_sp4
ataaagagtttgatcctggctcaggatgaacgctggcggcgtgcctaacacatgcaagtcgagcgagaagctttgaactgacgcttcggttgatgatcaaagtggaaagcggcggacgggtgagtaacgcgtaggcaacctgccctttgcagagggatagcctcgggaaaccgggattaaaacctcataacgcacaactgagacatcttggatgtgccaaagatttatcggcagaggatgggcctgcgtctgattagttagttggtggggtaacggcctaccaaggcgacgatcagtagccgacctgagagggtgatcggccacattggaactgagacacggtccaaactcctacgggaggcagcagtggggaatattgcacaatgggggaaaccctgatgcagcaacgccgcgtgaaggatgaaggctcttgggtcgtaaacttctgttctaggggaagatagtgacggtaccttaggagcaagtcccggctaactacgtgccagcagccgcggtaatacgtagggggcaagcgttatccggaattattgggcgtaaagagtacgtaggtggttacctaagcaaggggtttaaggcaatggcttaactattgttcgccccttgaactgggctacttgagtgcaggagaggaaagcggaattcctagtgtagcggtgaaatgcgtagatattaggaggaacaccagtggcgaaggcggctttctggactgtaactgacactgaggtacgaaagcgtggggagcaaacaggattagataccctggtagtccacgccgtaaacgatgagcactaggtgtcggggtcgcaagacttcggtgccgcagttaacgcaataagtgctccgcctggggagtacgttcgcaagaatgaaactcaaaggaattgacggggacccgcacaagcagcggagcatgtggtttaattcgaagcaacgcgaagaaccttaccagggcttgacatcttcctgacagacccttaaacgggtccttcttcggacaggaaagacaggtggtgcatggttgtcgtcagctcgtgtcgtgagatgttgggttaagtcccgcaacgagcgcaacccttgctgttagttgccatcattaagttgggcactctaacgggactgccggggataactcggaggaaggtggggatgacgtcaaatcatcatgccccttatgttctgggctacacacgtgctacaatggccggtacaaagaggaagcgagaccgcgaggtggagcgaatctcaaaagccggtcccagttcggattgcaggctgcaactcgcctgcatgaagtcggagttgctagtaatcgcgaatcagaatgtcgcggtgaatgcgttcccgggtcttgtacacaccgcccgtcacaccatggaagttgggggcgcccgaagttggcaggcaaatatgttacctaaggcgaaaccaatgactggggtgaagtcgtaacaaggtagccgtatcggaaggtgcggctggatcacctccttt

SEQ ID NO: 186 - DNA, 1526 bp, artificial sequence
  STR02701_Ruthenibacterium_sp1
aatgaagagtttgatcctggctcaggacgaacgctggcggcgcgcctaacacatgcaagtcgaacggagttatattggcagaagttttcggacggacgcggatataacttagtggcgaacgggtgagtaacacgtgagcaacctacccttcagagggggacaacagttggaaacgactgctaataccgcataagaccacggtgtggcatcacacaggggtcaaaggagaaatccgctgaaggatgggctcgcgtccaattagctagatggtgaggtaacggcccaccatggcgacgattggtagccggactgagaggttgatcggccacattgggactgagacacggcccagactcctacgggaggcagcagtggggaatattgcacaatggaggaaactctgatgcagcgacgccgcgtgagggaagaaggtcttcggattgtaaacctctgttgtcagggacgatgatgacggtacctgacgaggaagccacggctaactacgtgccagcagccgcggtaaaacgtaggtggcaagcgttgtccggaattactgggtgtaaagggagcgcaggcgggagagcaagttgggagtgaaatctgtgggctcaacccacaaattgctttcaaaactgtttttcttgagtggtgtagaggtaggcggaattcccggtgtagcggtggaatgcgtagatatcgggaggaacaccagtggcgaaggcggcctactgggcactaactgacgctgaggctcgaaagcatgggtagcaaacaggattagataccctggtagtccatgccgtaaacgatgattactaggtgtgggaggattgaccccttccgtgccgcagttaacacaataagtaatccacctggggagtacgaccgcaaggttgaaactcaaaggaattgacgggggcccgcacaagcagtggagtatgtggtttaattcgaagcaacgcgaagaaccttaccaggtcttgacatcccgtgcatagctaagagattagtgaagtccttcgggacacggagacaggtggtgcatggttgtcgtcagctcgtgtcgtgagatgttgggttaagtcccgcaacgagcgcaacccttatcgttagttactacgcaagaggactctagcgagactgccgttgacaaaacggaggaaggtggggatgacgtcaaatcatcatgccctttatgacctgggctacacacgtactacaatggctattaacagagagaagcgaagtcgcgaggcagagcaaacctcagaaaaatagtctcagttcggatcgcaggctgcaacccgcctgcgtgaagccggaattgctagtaatcgcggatcagcatgccgcggtgaatacgttcccgggccttgtacacaccgcccgtcacaccatgagagccggggggacccgaagtcggtagtctaaccgcaaggaggacgccgccgaaggtaaaactggtgattggggtgaagtcgtaacaaggtagccgtatcggaaggtgcggctggatcacctccttt

SEQ ID NO: 187 - DNA, 1267 bp, artificial sequence
  >ERR1022306_03347 Blautia_luti_group
gttggtggggtaacggcctaccaaggcgacgatccatagccggcctgagagggtgaacggccacattgggactgagacacggcccagactcctacgggaggcagcagtggggaatattgcacaatgggggaaaccctgatgcagcgacgccgcgtgaaggaagaagtatctcggtatgtaaacttctatcagcagggaagaaaatgacggtacctgactaagaagccccggctaactacgtgccagcagccgcggtaatacgtagggggcaagcgttatccggatttactgggtgtaaagggagcgtagacggatggacaagtctgatgtgaaaggctggggctcaaccccgggactgcattggaaactgcccgtcttgagtgccggagaggtaagcggaattcctagtgtagcggtgaaatgcgtagatattaggaggaacaccagtggcgaaggcggcttactggacggtaactgacgttgaggctcgaaagcgtggggagcaaacaggattagataccctggtagtccacgcggtaaacgatgaatgctaggtgtcgggtgacaaagtcattcggtgccgccgcaaacgcattaagcattccacctggggagtacgttcgcaagaatgaaactcaaaggaattgacggggacccgcacaagcggtggagcatgtggtttaattcgaagcaacgcgaagaaccttaccaagtcttgacatccttctgaccggaacttaaccgttccttcccttcggggcagaagtgacaggtggtgcatggttgtcgtcagctcgtgtcgtgagatgttgggttaagtcccgcaacgagcgcaacccctatcctcagtagccagcagttcggctgggcactctgtggagactgccagggataacctggaggaaggcggggatgacgtcaaatcatcatgccccttatgatttgggctacacacgtgctacaatggcgtaaacaaagggaagcgaacctgcgagggtgggcaaatcccaaaaataacgtcccagttcggactgtagtctgcaacccgactacacgaagctggaatcgctagtaatcgcggatcagaatgccgcggtgaatacgttcccgggtcttgtacacaccgcccgtcacaccatgggagtcagtaacgcccgaagtcagtgacctaaccgcaaggaaggagctgccgaaggcgggaccgatgactggggtgaagtcgtaacaaggtagccgtatcggaaggtgcggctggatcacctccttt

SEQ ID NO: 188 - DNA, 1515 bp, artificial sequence
  >ERR1022317_02208 Ruminococcaceae_NG13_sp1
ttttgagagtttgatcctggctcaggacgaacgctggcggcgtgcctaacacatgcaagtcgaacgaagctttgaggagcttgctttttaaagcttagtggcggacgggtgagtaacgcgtgagcaacctgcctctcagaggggaataacgttttgaaaagaacgctaataccgcataacatatcggaaccgcatgattctgatatcaaaggagcaatccgctgagagatgggctcgcgtccgattagttagttggtgaggtaacggctcaccaagactacgatcggtagccggactgagaggttgatcggccacattgggactgagacacggcccagactcctacgggaggcagcagtgggggatattgcgcaatgggggaaaccctgacgcagcaacgccgcgtgaaggaagaaggtcttcggattgtaaacttcttttgtcagggacgaagaaagtgacggtacctgacgaataagctccggctaactacgtgccagcagccgcggtaatacgtagggagcgagcgttgtccggatttactgggtgtaaagggtgcgtaggcggccgagcaagtcagttgtgaaaactatgggcttaacccataacgtgcaattgaaactgtccggcttgagtgaagtagaggtaggcggaattcccggtgtagcggtgaaatgcgtagagatcgggaggaacaccagtggcgaaggcggcctactgggctttaactgacgctgaggcacgaaagcatgggtagcaaacaggattagataccctggtagtccatgccgtaaacgatgattactaggtgtggggggactgaccccttccgtgccgcagttaacacaataagtaatccacctggggagtacggccgcaaggttgaaactcaaaggaattgacgggggcccgcacaagcagtggagtatgtggtttaattcgaagcaacgcgaagaaccttaccaggtcttgacatcctgagaatccttaagagattagggagtgccttcgggaactcagagacaggtggtgcatggttgtcgtcagctcgtgtcgtgagatgttgggttaagtcccgcaacgagcgcaacccttgctattagttgctacgcaagagcactctaataggactgccgttgacaaaacggaggaaggtggggacgacgtcaaatcatcatgccccttatgacctgggctacacacgtactacaatggccattaacagagggaagcaaaaccgcgaggcagagcaaacccctaaaaatggtcccagttcggattgtaggctgcaacccgcctacatgaagttggaattgctagtaatcgcggatcagcatgccgcggtgaatacgttcccgggccttgtacacaccgcccgtcacaccatgggagccggtaatacccgaagtcagtagtctaacagcaatgaggacgctgccgaaggtaggattggcgactggggtgaagtcgtaacaaggtagccgtatcggaaggtgcggctggatcacctccttt

SEQ ID NO: 189 - DNA, 1527 bp, artificial sequence
  >ERR1022337_03091 Blautia_luti_group
tcagagagtttgatcctggctcaggatgaacgctggcggcgtgcttaacacatgcaagtcgaacgggaaaccttttattgaagcttcggcagatttagattgtttctagtggcggacgggtgagtaacgcgtgggtaacctgccttatacagggggataacagtcagaaatgactgctaataccgcataagcgcacagagctgcatggctcggtgtgaaaaactccggtggtataagatggacccgcgttggattagctagttggtgaggtaacggcccaccaaggcgacgatccatagccggcctgagagggtgaacggccacattgggactgagacacggcccagactcctacgggaggcagcagtggggaatattgcacaatgggggaaaccctgatgcagcgacgccgcgtgaaggaagaagtatctcggtatgtaaacttctatcagcagggaagaaaatgacggtacctgactaagaagccccggctaactacgtgccagcagccgcggtaatacgtagggggcaagcgttatccggatttactgggtgtaaagggagcgtagacggatggacaagtctgatgtgaaaggctggggctcaaccccgggactgcattggaaactgcccgtcttgagtgccggagaggtaagcggaattcctagtgtagcggtgaaatgcgtagatattaggaggaacaccagtggcgaaggcggcttactggacggtaactgacgttgaggctcgaaagcgtggggagcaaacaggattagataccctggtagtccacgcggtaaacgatgaatgctaggtgtcggggagcaaagctcttcggtgccgccgcaaacgcattaagcattccacctggggagtacgttcgcaagaatgaaactcaaaggaattgacggggacccgcacaagcggtggagcatgtggtttaattcgaagcaacgcgaagaaccttaccaagtcttgacatccctctgaccgactcttaaccgagtctttccttcgggacagaggagacaggtggtgcatggttgtcgtcagctcgtgtcgtgagatgttgggttaagtcccgcaacgagcgcaacccctatcctcagtagccagcatttaaggtgggcactctggggagactgccagggataacctggaggaaggcggggatgacgtcaaatcatcatgccccttatgatttgggctacacacgtgctacaatggcgtaaacaaagggaagcgaacctgcgagggtgggcaaatcccaaaaataacgtcccagttcggactgtagtctgcaacccgactacacgaagctggaatcgctagtaatcgcggatcagaatgccgcggtgaatacgttcccgggtcttgtacacaccgcccgtcacaccatgggagtcagtaacgcccgaagtcagtgacctaaccgcaaggaaggagctgccgaaggcgggaccgatgactggggtgaagtcgtaacaaggtagccgtatcggaaggtgcggctggatcacctccttt

SEQ ID NO: 190 - DNA, 1531 bp, artificial sequence
  >ERR1022431_03520 Fusicatenibacter_sp2
ttagagagtttgatcctggctcaggatgaacgctggcggcgtgcttaacacatgcaagtcgaacgaagcactttggacagattcttcggatgaagtccttagtgactgagtggcggacgggtgagtaacgcgtgggtaacctgcctcatacagggggataacagttagaaatggctgctaataccgcataagcgcacggtactgcatggtacagtgtgaaaaactccggtggtatgagatggacccgcgttggattagctagttggcagggtaacggcctaccaaggcgacgatccatagccggcctgagagggtggacggccacattgggactgagacacggcccagactcctacgggaggcagcagtggggaatattgcacaatgggggaaaccctgatgcagcgacgccgcgtgagcgaagaagtatttcggtatgtaaagctctatcagcagggaagaaaatgacggtacctgactaagaagccccggctaactacgtgccagcagccgcggtaatacgtagggggcaagcgttatccggatttactgggtgtaaagggagcgtagacggaatggcaagtctgatgtgaaaggccggggctcaaccccgggactgcattggaaactgtcaatctagagtaccggaggggtaagtggaattcctagtgtagcggtgaaatgcgtagatattaggaggaacaccagtggcgaaggcggcttactggacggtaactgacgttgaggctcgaaagcgtggggagcaaacaggattagataccctggtagtccacgccgtaaacgatgaatactaggtgttggggagcaaagctcttcggtgccgcagcaaacgcaataagtattccacctggggagtacgttcgcaagaatgaaactcaaaggaattgacggggacccgcacaagcggtggagcatgtggtttaattcgaagcaacgcgaagaaccttaccaaatcttgacatcgatctgaccggactgtaatgagtcctttcccttcggggacagagaagacaggtggtgcatggttgtcgtcagctcgtgtcgtgagatgttgggttaagtcccgcaacgagcgcaacccttatcctcagtagccagcaagtgaagttgggcactctgtggagactgccagggataacctggaggaaggtggggatgacgtcaaatcatcatgccccttatgatttgggctacacacgtgctacaatggcgtaaacaaagggaagcgatcacgcgagtgtgagcaaatctcaaaaataacgtctcagttcggattgtagtctgcaactcgactacatgaagctggaatcgctagtaatcgcaggtcagcatactgcggtgaatacgttcccgggtcttgtacacaccgcccgtcacaccatgggagtcagtaacacccgaagccggtgacctaaccgaaagggaggagccgtcgaaggtgggaccgataactggggtgaagtcgtaacaaggtagccgtatcggaaggtgcggctggatcacctccttt

SEQ ID NO: 191 - DNA, 1529 bp, artificial sequence
  >ERR1022440_02714 Agathobaculum_butyriciproducens_group
tttagagagtttgatcctggctcaggatgaacgctggcggcgtgcctaacacatgcaagtcgaacggagtcgttttggaaatctcttcggagatggaattctcgacttagtggcggacgggtgagtaacgcgtgagcaatctgcctttaagagggggataacagtcggaaacggctgctaataccgcataaagcattaaattcgcatgtttttgatgccaaaggagcaatccgcttttagatgagctcgcgtctgattagctagttggcggggtaacggcccaccaaggcgacgatcagtagccggactgagaggttgaacggccacattgggactgagacacggcccagactcctacgggaggcagcagtggggaatattgcgcaatgggggaaaccctgacgcagcaacgccgcgtgattgaagaaggccttcgggttgtaaagatctttaatcagggacgaaaaaaatgacggtacctgaagaataagctccggctaactacgtgccagcagccgcggtaatacgtagggagcaagcgttatccggatttactgggtgtaaagggcgcgcaggcgggccggtaagttggaagtgaaatctatgggcttaacccataaactgctttcaaaactgctggtcttgagtgatggagaggcaggcggaattccgtgtgtagcggtgaaatgcgtagatatacggaggaacaccagtggcgaaggcggcctgctggacattaactgacgctgaggcgcgaaagcgtggggagcaaacaggattagataccctggtagtccacgccgtaaacgatggatactaggtgtgggaggtattgaccccttccgtgccgcagttaacacaataagtatcccacctggggagtacggccgcaaggttgaaactcaaaggaattgacgggggcccgcacaagcagtggagtatgtggtttaattcgaagcaacgcgaagaaccttaccaggtcttgacatcccgatgaccggttcagagataagccttttcttcggaacatcggtgacaggtggtgcatggttgtcgtcagctcgtgtcgtgagatgttgggttaagtcccgcaacgagcgcaacccttacggttagttgatacgcaagatcactctagccggactgccgttgacaaaacggaggaaggtggggacgacgtcaaatcatcatgccccttatgacctgggctacacacgtactacaatggcagtcatacagagggaagcaaaaccgcgaggtggagcaaatccctaaaagctgtcccagttcagattgcaggctgcaacccgcctgcatgaagtcggaattgctagtaatcgcggatcagcatgccgcggtgaatacgttcccgggccttgtacacaccgcccgtcacaccatgagagccgtcaatacccgaagtccgtagcctaaccgcaaggagggcgcggccgaaggtaggggtggtaattagggtgaagtcgtaacaaggtagccgtatcggaaggtgcggctggatcacctccttt

SEQ ID NO: 192 - DNA, 1527 bp, artificial sequence
  >ERR1022486_02114 [Ruminococcus]_bromii
ttagagagtttgatcctggctcaggacgaacgctggcggcgtgcctaacacatgcaagtcgaacggaactgttttgaaagatttcttcggaatgaatttgatttagtttagtggcggacgggtgagtaacgcgtgagtaacctgccttcaagagggggataacattctgaaaaggatgctaataccgcatgacatatcggaaccacatggttttgatatcaaagattttatcgcttgaagatggactcgcgtccgattagttagttggtgaggtaacggctcaccaagaccgcgatcggtagccggactgagaggttgaacggccacattgggactgagacacggcccagactcctacgggaggcagcagtgggggatattgcgcaatgggggcaaccctgacgcagcaacgccgcgtgaaggatgaaggttttcggattgtaaacttcttttattaaggacgaaaaatgacggtacttaatgaataagctccggctaactacgtgccagcagccgcggtaatacgtagggagcaagcgttgtccggatttactgggtgtaaagggtgcgtaggcggctttgcaagtcagatgtgaaatctatgggctcaacccataaactgcatttgaaactgtagagcttgagtgaagtagaggcaggcggaattccccgtgtagcggtgaaatgcgtagagatggggaggaacaccagtggcgaaggcggcctgctgggctttaactgacgctgaggcacgaaagcgtgggtagcaaacaggattagataccctggtagtccacgctgtaaacgatgattactaggtgtggggggtctgaccccttccgtgccggagttaacacaataagtaatccacctggggagtacggccgcaaggttgaaactcaaaggaattgacgggggcccgcacaagcagtggagtatgtggtttaattcgaagcaacgcgaagaaccttaccaggtcttgacatccaactaacgaagtagagatacattaggtgcccttcggggaaagttgagacaggtggtgcatggttgtcgtcagctcgtgtcgtgagatgttgggttaagtcccgcaacgagcgcaacccttgctattagttgctacgcaagagcactctaataggactgccgttgacaaaacggaggaaggtggggacgacgtcaaatcatcatgccccttatgacctgggctacacacgtactacaatggatgttaacagagggaagcaagacagcgatgtggagcaaacccctaaaaacattctcagttcagattgcaggctgcaacccgcctgcatgaagatggaattgctagtaatcgcggatcagcatgccgcggtgaatacgttcccgggccttgtacacaccgcccgtcacaccatgggagccggtaatacccgaagtcagtagtccaacctcgtgaggacgctgccgaaggtaggattggcgactggggtgaagtcgtaacaaggtagccgtatcggaaggtgcggctggatcacctccttt

SEQ ID NO: 193 - DNA, 1531 bp, artificial sequence
  >ERR1203950_03117 Fusicatenibacter_sp2
ttagagagtttgatcctggctcaggatgaacgctggcggcgtgcttaacacatgcaagtcgaacgaagcactttggacagattcttcggatgaagtccttagtgactgagtggcggacgggtgagtaacgcgtgggtaacctgcctcatacagggggataacagttagaaatggctgctaataccgcataagcgcacggtaccgcatggtacggtgtgaaaaactccggtggtatgagatggacccgcgttggattagctagttggcagggtaacggcctaccaaggcgacgatccatagccggcctgagagggtggacggccacattgggactgagacacggcccagactcctacgggaggcagcagtggggaatattgcacaatgggggaaaccctgatgcagcgacgccgcgtgagcgaagaagtatttcggtatgtaaagctctatcagcagggaagaaaatgacggtacctgactaagaagccccggctaactacgtgccagcagccgcggtaatacgtagggggcaagcgttatccggatttactgggtgtaaagggagcgtagacggaatggcaagtctgatgtgaaaggccggggctcaaccccgggactgcattggaaactgtcaatctagagtaccggaggggtaagtggaattcctagtgtagcggtgaaatgcgtagatattaggaggaacaccagtggcgaaggcggcttactggacggtaactgacgttgaggctcgaaagcgtggggagcaaacaggattagataccctggtagtccacgccgtaaacgatgaatactaggtgttggggagcaaagctcttcggtgccgcagcaaacgcaataagtattccacctggggagtacgttcgcaagaatgaaactcaaaggaattgacggggacccgcacaagcggtggagcatgtggtttaattcgaagcaacgcgaagaaccttaccaaatcttgacatcgatctgaccggaccgtaatgggtcctttcccttcggggacagagaagacaggtggtgcatggttgtcgtcagctcgtgtcgtgagatgttgggttaagtcccgcaacgagcgcaacccttatcctcagtagccagcaagtgaagttgggcactctgtggagactgccagggataacctggaggaaggtggggatgacgtcaaatcatcatgccccttatgatttgggctacacacgtgctacaatggcgtaaacaaagggaagcgatcacgcgagtgtgagcaaatctcaaaaataacgtctcagttcggattgtagtctgcaactcgactacatgaagctggaatcgctagtaatcgcaggtcagcatactgcggtgaatacgttcccgggtcttgtacacaccgcccgtcacaccatgggagtcagtaacacccgaagccggtgacctaaccgaaaggaaggagccgtcgaaggtgggaccgataactggggtgaagtcgtaacaaggtagccgtatcggaaggtgcggctggatcacctccttt

SEQ ID NO: 194 - DNA, 1546 bp, artificial sequence
  >ERR2221175_01905 Streptococcus_parasanguinis
taatgagagtttgatcctggctcaggatgaacgctggcggcgtgcctaatacatgcaagtagaacgctgaagcttggtgcttgcaccgagcggatgagttgcgaacgggtgagtaacgcgtaggtaacctgcctcttagcgggggataactattggaaacgatagctaataccgcataaaagacgatatcgcatgatattgacttgaaaggtgcaattgcatcactaagagatggacctgcgttgtattagctagttggtgaggtaacggctcaccaaggcgacgatacatagccgacctgagagggtgatcggccacactgggactgagacacggcccagactcctacgggaggcagcagtagggaatcttcggcaatgggggcaaccctgaccgagcaacgccgcgtgagtgaagaaggttttcggatcgtaaagctctgttgtaagagaagaacgagtgtgagagtggaaagttcacactgtgacggtaacttaccagaaagggacggctaactacgtgccagcagccgcggtaatacgtaggtcccgagcgttatccggatttattgggcgtaaagcgagcgcaggcggttagataagtctgaagttaaaggctgtggcttaaccatagtacgctttggaaactgtttaacttgagtgcagaaggggagagtggaattccatgtgtagcggtgaaatgcgtagatatatggaggaacaccggtggcgaaagcggctctctggtctgtaactgacgctgaggctcgaaagcgtggggagcaaacaggattagataccctggtagtccacgccgtaaacgatgagtgctaggtgttgggtcctttccgggactcagtgccgcagctaacgcattaagcactccgcctggggagtacgaccgcaaggttgaaactcaaaggaattgacgggggcccgcacaagcggtggagcatgtggtttaattcgaagcaacgcgaagaaccttaccaggtcttgacatccctctgaccgctctagagatagagttttccttcgggacagaggtgacaggtggtgcatggttgtcgtcagctcgtgtcgtgagatgttgggttaagtcccgcaacgagcgcaacccctattgttagttgccatcattcagttgggcactctagcgagactgccggtaataaaccggaggaaggtggggatgacgtcaaatcatcatgccccttatgacctgggctacacacgtgctacaatggctggtacaacgagtcgcgagtcggtgacggcaagctaatctcttaaagccagtctcagttcggattgtaggctgcaactcgcctacatgaagtcggaatcgctagtaatcgcggatcagcacgccgcggtgaatacgttcccgggccttgtacacaccgcccgtcacaccacgagagtttgtaacacccgaagtcggtgaggtaaccgtaaggagccagccgcctaaggtgggatagatgattggggtgaagtcgtaacaaggtagccgtatcggaaggtgcggctggatcacctccttt

SEQ ID NO: 195 - DNA, 1529 bp, artificial sequence
  >ERR2221177_02729 Agathobaculum_butyriciproducens_group
tttagagagtttgatcctggctcaggatgaacgctggcggcgtgcctaacacatgcaagtcgaacggagtcgttttggaaaatccttcgggattggaattctcgacttagtggcggacgggtgagtaacgcgtgagcaatctgcctttaagagggggataacagtcggaaacggctgctaataccgcataaagcatcgaaaccgcatgattttgatgccaaaggagcaatccgcttttagatgagctcgcgtctgattagctggttggcggggtaacggcccaccaaggcgacgatcagtagccggactgagaggttgaacggccacattgggactgagacacggcccagactcctacgggaggcagcagtggggaatattgcgcaatgggggaaaccctgacgcagcaacgccgcgtgattgaagaaggccttcgggttgtaaagatctttaatcagggacgaaacaaatgacggtacctgaagaataagctccggctaactacgtgccagcagccgcggtaatacgtagggagcaagcgttatccggatttactgggtgtaaagggcgcgcaggcgggccggtaagttggaagtgaaatctatgggcttaacccataaactgctttcaaaactgctggtcttgagtgatggagaggcaggcggaattccgtgtgtagcggtgaaatgcgtagatatacggaggaacaccagtggcgaaggcggcctgctggacattaactgacgctgaggcgcgaaagcgtggggagcaaacaggattagataccctggtagtccacgccgtaaacgatggatactaggtgtgggaggtattgaccccttccgtgccgcagttaacacaataagtatcccacctggggagtacggccgcaaggttgaaactcaaaggaattgacgggggcccgcacaagcagtggagtatgtggtttaattcgaagcaacgcgaagaaccttaccaggtcttgacatcccgatgaccgccttagagataaggcttttcttcggaacatcggtgacaggtggtgcatggttgtcgtcagctcgtgtcgtgagatgttgggttaagtcccgcaacgagcgcaacccttacggttagttgatacgcaagatcactctagccggactgccgttgacaaaacggaggaaggtggggacgacgtcaaatcatcatgccccttatgacctgggctacacacgtactacaatggcagtcatacagagggaagcaaaaccgcgaggtggagcaaatccctaaaagctgtcccagttcagattgcaggctgcaacccgcctgcatgaagtcggaattgctagtaatcgcggatcagcatgccgcggtgaatacgttcccgggccttgtacacaccgcccgtcacaccatgagagccgtcaatacccgaagtccgtagcctaaccgtaaggagggcgcggccgaaggtaggggtggtaattagggtgaagtcgtaacaaggtagccgtatcggaaggtgcggctggatcacctccttt

SEQ ID NO: 196 - DNA, 1528 bp, artificial sequence
  >ERR2221180_02278 Monoglobus_pectinilyticus
atcgagagtttgatcctggctcaggacgaacgctggcggcgtgcctaacacatgcaagtcgagcgagaaatttttaacggatcccttcggggagaagataaggatggaaagcggcggacgggtgagtaacgcgtgagtaacctgcctttaggagggggacaacattccgaaagggatgctaataccgcataaaattattgtatcgcatggtataataatcaaagatttatcgcctaaagatggactcgcgtccgattagctagttggtggggtaaaagcctaccaaggcgacgatcggtagccgaactgagaggttgatcggccacattgggactgagacacggcccagactcctacgggaggcagcagtgggggatattgcgcaatgggggaaaccctgacgcagcaacgccgcgtgaaggaagaaggccttcgggttgtaaacttctttaagtgtggaagataatgacggtacacacagaataagccacggctaactacgtgccagcagccgcggtaatacgtaggtggcaagcgttgtccggatttactgggtgtaaagggcgtgtaggcgggtagacaagtcagatgtgaaataccggggctcaactccggggctgcatttgaaactgtatatcttgagtgtcggagaggaaagcggaattcctagtgtagcggtgaaatgcgtagatattaggaggaacaccagtggcgaaggcggctttctggacgataactgacgctgaggcgcgaaagcgtggggagcaaacaggattagataccctggtagtccacgccgtaaacgatggatactaggtgtaggaggtatcgaccccttctgtgccgcagttaacacaataagtatcccacctggggagtacggtcgcaagattgaaactcaaaggaattgacgggggcccgcacaagcagtggagtatgtggtttaattcgaagcaacgcgaagaaccttaccaggacttgacatcccacgcatagcctagagataggtgaagtcctacgggacgtggagacaggtggtgcatggttgtcgtcagctcgtgtcgtgagatgttgggttaagtcccgcaacgagcgcaacccttactgtcagttaccatcattaagttggggactctggcaggactgccggtgacaaatcggaggaaggtggggacgacgtcaaatcatcatgccccttatgtcctgggctacacacgtactacaatggctgttaacaaagtgaagcaaagcagtgatgtggagcaaaacacaaaaagcagtctcagttcagattgtaggctgaaactcgcctatatgaagtcggaattgctagtaatcgcagatcagcatgctgcggtgaatacgttcccgggccttgtacacaccgcccgtcacaccatgagagtcgataacacccgaagcctgtagcttaaccttagggagagcgcagtcgaaggtgggattgataattagggtgaagtcgtaacaaggtagccgtatcggaaggtgcggctggatcacctccttt

SEQ ID NO: 197 - DNA, 1545 bp, artificial sequence
  >ERR2221353_01942 Streptococcus_australis
aatgagagtttgatcctggctcaggatgaacgctggcggcgtgcctaatacatgcaagtagaacgctgaagcttggtgcttgcaccgagcggatgagttgcgaacgggtgagtaacgcgtaggtaacctgcctggtagcgggggataactattggaaacgatagctaataccgcataacagtagatattgcatgatatctgcttgaaaggtgcaattgcatcactaccagatggacctgcgttgtattagctagttggtgaggtaacggctcaccaaggcgacgatacatagccgacctgagagggtgatcggccacactgggactgagacacggcccagactcctacgggaggcagcagtagggaatcttcggcaatggacggaagtctgaccgagcaacgccgcgtgagtgaagaaggttttcggatcgtaaagctctgttgtaagagaagaacgagtgtgagagtggaaagttcacactgtgacggtatcttaccagaaagggacggctaactacgtgccagcagccgcggtaatacgtaggtcccgagcgttatccggatttattgggcgtaaagcgagcgcaggcggttagataagtctgaagttaaaggctgtggcttaaccatagtacgctttggaaactgtttaacttgagtgcaagaggggagagtggaattccatgtgtagcggtgaaatgcgtagatatatggaggaacaccggtggcgaaagcggctctctggcttgtaactgacgctgaggctcgaaagcgtggggagcaaacaggattagataccctggtagtccacgccgtaaacgatgagtgctaggtgttgggtcctttccgggactcagtgccgcagctaacgcattaagcactccgcctggggagtacgaccgcaaggttgaaactcaaaggaattgacgggggcccgcacaagcggtggagcatgtggtttaattcgaagcaacgcgaagaaccttaccaggtcttgacatccctctgaccgctctagagatagagttttccttcgggacagaggtgacaggtggtgcatggttgtcgtcagctcgtgtcgtgagatgttgggttaagtcccgcaacgagcgcaacccctattgttagttgccatcattcagttgggcactctagcgagactgccggtaataaaccggaggaaggtggggatgacgtcaaatcatcatgccccttatgacctgggctacacacgtgctacaatggctggtacaacgagtcgcaagtcggtgacggcaagctaatctcttaaagccagtctcagttcggattgtaggctgcaactcgcctacatgaagtcggaatcgctagtaatcgcggatcagcacgccgcggtgaatacgttcccgggccttgtacacaccgcccgtcacaccacgagagtttgtaacacccgaagtcggtgaggtaaccttttaggagccagccgcctaaggtgggatagatgattggggtgaagtcgtaacaaggtagccgtatcggaaggtgcggctggatcacctcctt

SEQ ID NO: 198 - DNA, 1545 bp, artificial sequence
  >ERR2221360_01931 Streptococcus_australis
aatgagagtttgatcctggctcaggatgaacgctggcggcgtgcctaatacatgcaagtagaacgctgaagcttggtgcttgcaccgagcggatgagttgcgaacgggtgagtaacgcgtaggtaacctgcctggtagcgggggataactattggaaacgatagctaataccgcataacagtagatattgcatgatatctgcttgaaaggggcaattgctccactaccagatggacctgcgttgtattagctagttggtgaggtaacggctcaccaaggcgacgatacatagccgacctgagagggtgatcggccacactgggactgagacacggcccagactcctacgggaggcagcagtagggaatcttcggcaatggacggaagtctgaccgagcaacgccgcgtgagtgaagaaggttttcggatcgtaaagctctgttgtaagagaagaacgagtgtgagagtggaaagttcacactgtgacggtatcttaccagaaagggacggctaactacgtgccagcagccgcggtaatacgtaggtcccgagcgttatccggatttattgggcgtaaagcgagcgcaggcggttagataagtctgaagttaaaggctgtggcttaaccatagtacgctttggaaactgtttaacttgagtgcaagaggggagagtggaattccatgtgtagcggtgaaatgcgtagatatatggaggaacaccggtggcgaaagcggctctctggcttgtaactgacgctgaggctcgaaagcgtggggagcaaacaggattagataccctggtagtccacgccgtaaacgatgagtgctaggtgttgggtcctttccgggactcagtgccgcagctaacgcattaagcactccgcctggggagtacgaccgcaaggttgaaactcaaaggaattgacgggggcccgcacaagcggtggagcatgtggtttaattcgaagcaacgcgaagaaccttaccaggtcttgacatccctctgaccgctctagagatagagttttccttcgggacagaggtgacaggtggtgcatggttgtcgtcagctcgtgtcgtgagatgttgggttaagtcccgcaacgagcgcaacccctattgttagttgccatcattcagttgggcactctagcgagactgccggtaataaaccggaggaaggtggggatgacgtcaaatcatcatgccccttatgacctgggctacacacgtgctacaatggctggtacaacgagtcgcaagtcggtgacggcaagctaatctcttaaagccagtctcagttcggattgtaggctgcaactcgcctacatgaagtcggaatcgctagtaatcgcggatcagcacgccgcggtgaatacgttcccgggccttgtacacaccgcccgtcacaccacgagagtttgtaacacccgaagtcggtgaggtaaccttttaggagccagccgcctaaggtgggatagatgattggggtgaagtcgtaacaaggtagccgtatcggaaggtgcggctggatcacctcctt

SEQ ID NO: 199 - DNA, 1528 bp, artificial sequence
  >ERR2230109_02979 Lachnospiraceae_NG30_sp3
tacgagagtttgatcctggctcaggatgaacgctggcggcgtgcttaacacatgcaagtcgaacgaagcacttaagtttgattcttcggatgaagacttttgtgactgagtggcggacgggtgagtaacgcgtgggtaacctgcctcatacagggggataacagttagaaatggctgctaataccgcataagaccacagcaccgcatggtgcaggggtaaaaactccggtggtatgagatggacccgcgtctgattagctagttggtggggtaacggcctaccaaggcgacgatcagtagccgacctgagagggtgaccggccacattgggactgagacacggcccaaactcctacgggaggcagcagtggggaatattgcacaatgggggaaaccctgatgcagcgacgccgcgtgaaggatgaagtatttcggtatgtaaacttctatcagcagggaagaaaatgacggtacctgactaagaagccccggctaactacgtgccagcagccgcggtaatacgtagggggcaagcgttatccggatttactgggtgtaaagggagcgtagacggtatggcaagtctgatgtgaaaggccagggctcaaccctgggactgcattggaaactgtcgaactagagtgtcggagaggcaagtggaattcctagtgtagcggtgaaatgcgtagatattaggaggaacaccagtggcgaaggcggcttgctggacgatgactgacgttgaggctcgaaagcgtggggagcaaacaggattagataccctggtagtccacgccgtaaacgatgactactaggtgtcgggtagcagagctattcggtgccgcagccaacgcaataagtagtccacctggggagtacgttcgcaagaatgaaactcaaaggaattgacggggacccgcacaagcggtggagcatgtggtttaattcgaagcaacgcgaagaaccttacctgctcttgacatctccctgaccggcaagtaatgttgcctttccttcgggacagggatgacaggtggtgcatggttgtcgtcagctcgtgtcgtgagatgttgggttaagtcccgcaacgagcgcaacccctatctttagtagccagcggttcggccgggcactctagagagactgccagggataacctggaggaaggtggggatgacgtcaaatcatcatgccccttatgagcagggctacacacgtgctacaatggcgtaaacaaagggaagcgagcctgcgagggtaagcaaatctcaaaaataacgtctcagttcggattgtagtctgcaactcgactacatgaagctggaatcgctagtaatcgcgaatcagaatgtcgcggtgaatacgttcccgggtcttgtacacaccgcccgtcacaccatgggagttggtaacgcccgaagtcagtgacccaaccgcaaggagggagctgccgaaggtgggaccgataactggggtgaagtcgtaacaaggtagccgtatcggaaggtgcggctggatcacctccttt

SEQ ID NO: 200 - DNA, 1527 bp, artificial sequence
  >ERR2230116_03334 Blautia_luti_group
tcagagagtttgatcctggctcaggatgaacgctggcggcgtgcttaacacatgcaagtcgaacgggaattactttattgaaacttcggtcgatttaatttaattctagtggcggacgggtgagtaacgcgtgggtaacctgccttgtacagggggataacagtcagaaatgactgctaataccgcataagcgcacaggaccgcatggtccggtgtgaaaaactccggtggtataagatggacccgcgttggattagctagttggcagggtaacggcctaccaaggcgacgatccatagccggcctgagagggtgaacggccacattgggactgagacacggcccagactcctacgggaggcagcagtggggaatattgcacaatgggggaaaccctgatgcagcgacgccgcgtgaaggaagaagtatctcggtatgtaaacttctatcagcagggaagaaaatgacggtacctgactaagaagccccggctaactacgtgccagcagccgcggtaatacgtagggggcaagcgttatccggatttactgggtgtaaagggagcgtagacggatggacaagtctgatgtgaaaggctggggctcaaccccgggactgcattggaaactgcccgtcttgagtgccggagaggtaagcggaattcctagtgtagcggtgaaatgcgtagatattaggaggaacaccagtggcgaaggcggcttactggacggtaactgacgttgaggctcgaaagcgtggggagcaaacaggattagataccctggtagtccacgcggtaaacgatgaatgctaggtgtcgggtgacaaagtcattcggtgccgccgcaaacgcattaagcattccacctggggagtacgttcgcaagaatgaaactcaaaggaattgacggggacccgcacaagcggtggagcatgtggtttaattcgaagcaacgcgaagaaccttaccaagtcttgacatccctctgaccggaacttaaccgttccttcccttcggggcagaggagacaggtggtgcatggttgtcgtcagctcgtgtcgtgagatgttgggttaagtcccgcaacgagcgcaacccctatccccagtagccagcatttaaggtgggcactctgaggagactgccagggataacctggaggaaggcggggatgacgtcaaatcatcatgccccttatgatttgggctacacacgtgctacaatggcgtaaacaaagggaagcgaacccgcgagggtgggcaaatcccaaaaataacgtcccagttcggactgtagtctgcaacccgactacacgaagctggaatcgctagtaatcgcggatcagaatgccgcggtgaatacgttcccgggtcttgtacacaccgcccgtcacaccatgggagtcagtaacgcccgaagtcagtgacctaaccgtaaggagggagctgccgaaggcgggaccgatgactggggtgaagtcgtaacaaggtagccgtatcggaaggtgcggctggatcacctccttt

SEQ ID NO: 201 - DNA, 1527 bp, artificial sequence
  >ERR2230130_03308 Blautia_luti_group
tcagagagtttgatcctggctcaggatgaacgctggcggcgtgcttaacacatgcaagtcgaacgggaaaccttttattgaagcttcggcagatttagattgtttctagtggcggacgggtgagtaacgcgtgggtaacctgccttatacagggggataacagtcagaaatgactgctaataccgcataagcgcacagagctgcatggctcggtgtgaaaaactccggtggtataagatggacccgcgttggattagctagttggtgaggtaacggcccaccaaggcgacgatccatagccggcctgagagggtgaacggccacattgggactgagacacggcccagactcctacgggaggcagcagtggggaatattgcacaatgggggaaaccctgatgcagcgacgccgcgtgaaggaagaagtatctcggtatgtaaacttctatcagcagggaagaaaatgacggtacctgactaagaagccccggctaactacgtgccagcagccgcggtaatacgtagggggcaagcgttatccggatttactgggtgtaaagggagcgtagacggatggacaagtctgatgtgaaaggctggggctcaaccccgggactgcattggaaactgcccgtcttgagtgccggagaggtaagcggaattcctagtgtagcggtgaaatgcgtagatattaggaggaacaccagtggcgaaggcggcttactggacggtaactgacgttgaggctcgaaagcgtggggagcaaacaggattagataccctggtagtccacgcggtaaacgatgaatgctaggtgtcgggtgacgaagtcattcggtgccgccgcaaacgcattaagcattccacctggggagtacgttcgcaagaatgaaactcaaaggaattgacggggacccgcacaagcggtggagcatgtggtttaattcgaagcaacgcgaagaaccttaccaagtcttgacatccctctgaccggaacttaaccgttccttcccttcgggacagaggagacaggtggtgcatggttgtcgtcagctcgtgtcgtgagatgttgggttaagtcccgcaacgagcgcaacccctatccccagtagccagcggttcggccgggcactctgaggagactgccagggataacctggaggaaggcggggatgacgtcaaatcatcatgccccttatgatttgggctacacacgtgctacaatggcgtaaacaaagggaagcgaacccgcgagggtgggcaaatcccaaaaataacgtcccagttcggactgtagtctgcaacccgactacacgaagctggaatcgctagtaatcgcggatcagaatgccgcggtgaatacgttcccgggtcttgtacacaccgcccgtcacaccatgggagtcagtaacgcccgaagtcagtgacctaaccgcaaggaaggagctgccgaaggcgggaccgatgactggggtgaagtcgtaacaaggtagccgtatcggaaggtgcggctggatcacctccttt

SEQ ID NO: 202 - DNA, 1572 bp, artificial sequence
  >GCF_000010145.1_00155 [Lactobacillus]_fermentum
tatgagagtttgatcctggctcaggatgaacgccggcggtgtgcctaatacatgcaagtcgaacgcgttggcccgattgattgatggtgcttgcacctgattgattttggtcgccaacgagtggcggacgggtgagtaacacgtaggtaacctgcccagaagcgggggacaacatttggaaacagatgctaataccgcataacaacgttgttcgcatgaacaacgcttaaaagatggcttctcgctatcacttctggatggacctgcggtgcattagcttgttggtggggtaacggcctaccaaggcgatgatgcatagccgagttgagagactgatcggccacaatgggactgagacacggcccatactcctacgggaggcagcagtagggaatcttccacaatgggcgcaagcctgatggagcaacaccgcgtgagtgaagaagggtttcggctcgtaaagctctgttgttaaagaagaacacgtatgagattaactgttcatacgttgacggtatttaaccagaaagtcacggctaactacgtgccagcagccgcggtaatacgtaggtggcaagcgttatccggatttattgggcgtaaagagagtgcaggcggttttctaagtctgatgtgaaagccttcggcttaaccggagaagtgcatcggaaactggataacttgagtgcagaagagggtagtggaactccatgtgtagcggtggaatgcgtagatatatggaagaacaccagtggcgaaggcggctacctggtctgcaactgacgctgagactcgaaagcatgggtagcgaacaggattagataccctggtagtccatgccgtaaacgatgagtgctaggtgttggagggtttccgcccttcagtgccggagctaacgcattaagcactccgcctggggagtacgaccgcaaggttgaaactcaaaggaattgacgggggcccgcacaagcggtggagcatgtggtttaattcgaagctacgcgaagaaccttaccaggtcttgacatcttgcgccaaccctagagatagggcgtttccttcgggaacgcaatgacaggtggtgcatggtcgtcgtcagctcgtgtcgtgagatgttgggttaagtcccgcaacgagcgcaacccttgttactagttgccagcattaagttgggcactctagtgagactgccggtgacaaaccggaggaaggtggggacgacgtcagatcatcatgccccttatgacctgggctacacacgtgctacaatggacggtacaacgagtcgcgaactcgcgagggcaagcaaatctcttaaaaccgttctcagttcggactgcaggctgcaactcgcctgcacgaagtcggaatcgctagtaatcgcggatcagcatgccgcggtgaatacgttcccgggccttgtacacaccgcccgtcacaccatgagagtttgtaacacccaaagtcggtggggtaaccttttaggagccagccgcctaaggtgggacagatgattagggtgaagtcgtaacaaggtagccgtaggagaacctgcggctggatcacctcctt

SEQ ID NO: 203 - DNA, 1572 bp, artificial sequence
  >GCF_000010145.1_00182 [Lactobacillus]_fermentum
tatgagagtttgatcctggctcaggatgaacgccggcggtgtgcctaatacatgcaagtcgaacgcgttggcccaattgattgacggtgcttgcacctgattgattttggtcgccaacgagtggcggacgggtgagtaacacgtaggtaacctgcccagaagcgggggacaacatttggaaacagatgctaataccgcataacaacgttgttcgcatgaacaacgcttaaaagatggcttctcgctatcacttctggatggacctgcggtgcattagcttgttggtggggtaatggcctaccaaggcgatgatgcatagccgagttgagagactgatcggccacaatgggactgagacacggcccatactcctacgggaggcagcagtagggaatcttccacaatgggcgcaagcctgatggagcaacaccgcgtgagtgaagaagggtttcggctcgtaaagctctgttgttaaagaagaatacgtatgagagtaactgttcatacgttgacggtatttaaccagaaagtcacggctaactacgtgccagcagccgcggtaatacgtaggtggcaagcgttatccggatttattgggcgtaaagagagtgcaggcggttttctaagtctgatgtgaaagccttcggcttaaccggagaagtgcatcggaaactggataacttgagtgcagaagagggtagtggaactccatgtgtagcggtggaatgcgtagatatatggaagaacaccagtggcgaaggcggctacctggtctgcaactgacgctgagactcgaaagcatgggtagcgaacaggattagataccctggtagtccatgccgtaaacgatgagtgctaggtgttggagggtttccgcccttcagtgccggagctaacgcattaagcactccgcctggggagtacgaccgcaaggttgaaactcaaaggaattgacgggggcccgcacaagcggtggagcatgtggtttaattcgaagctacgcgaagaaccttaccaggtcttgacatcttgcgccaaccctagagatagggcgtttccttcgggaacgcaatgacaggtggtgcatggtcgtcgtcagctcgtgtcgtgagatgttgggttaagtcccgcaacgagcgcaacccttgttactagttgccagcattaagttgggcactctagtgagactgccggtgacaaaccggaggaaggtggggacgacgtcagatcatcatgccccttatgacctgggctacacacgtgctacaatggacggtacaacgagtcgcgaactcgcgagggcaagcaaatctcttaaaaccgttctcagttcggactgcaggctgcaactcgcctgcacgaagtcggaatcgctagtaatcgcggatcagcatgccgcggtgaatacgttcccgggccttgtacacaccgcccgtcacaccatgagagtttgtaacacccaaagtcggtggggtaaccttttaggagccagccgcctaaggtgggacagatgattagggtgaagtcgtaacaaggtagccgtaggagaacctgcggctggatcacctcctt

SEQ ID NO: 204 - DNA, 1572 bp, artificial sequence
  >GCF_000010145.1_00259 [Lactobacillus]_fermentum
tatgagagtttgatcctggctcaggatgaacgccggcggtgtgcctaatacatgcaagtcgaacgcgttggcccaattgattgatggtgcttgcacctgattgattttggtcgccaacgagtggcggacgggtgagtaacacgtaggtaacctgcccagaagcgggggacaacatttggaaacagatgctaataccgcataacaacgttgttcgcatgaacaacgcttaaaagatggcttctcgctatcacttctggatggacctgcggtgcattagcttgttggtggggtaatggcctaccaaggcgatgatgcatagccgagttgagagactgatcggccacaatgggactgagacacggcccatactcctacgggaggcagcagtagggaatcttccacaatgggcgcaagcctgatggagcaacaccgcgtgagtgaagaagggtttcggctcgtaaagctctgttgttaaagaagaacacgtatgagagtaactgttcatacgttgacggtatttaaccagaaagtcacggctaactacgtgccagcagccgcggtaatacgtaggtggcaagcgttatccggatttattgggcgtaaagagagtgcaggcggttttctaagtctgatgtgaaagccttcggcttaaccggagaagtgcatcggaaactggataacttgagtgcagaagagggtagtggaactccatgtgtagcggtggaatgcgtagatatatggaagaacaccagtggcgaaggcggctacctggtctgcaactgacgctgagactcgaaagcatgggtagcgaacaggattagataccctggtagtccatgccgtaaacgatgagtgctaggtgttggagggtttccgcccttcagtgccggagctaacgcattaagcactccgcctggggagtacgaccgcaaggttgaaactcaaaggaattgacgggggcccgcacaagcggtggagcatgtggtttaattcgaagctacgcgaagaaccttaccaggtcttgacatcttgcgccaaccctagagatagggcgtttccttcgggaacgcaatgacaggtggtgcatggtcgtcgtcagctcgtgtcgtgagatgttgggttaagtcccgcaacgagcgcaacccttgttactagttgccagcattaagttgggcactctagtgagactgccggtgacaaaccggaggaaggtggggacgacgtcagatcatcatgccccttatgacctgggctacacacgtgctacaatggacggtacaacgagtcgcgaactcgcgagggcaagcaaatctcttaaaaccgttctcagttcggactgcaggctgcaactcgcctgcacgaagtcggaatcgctagtaatcgcggatcagcatgccgcggtgaatacgttcccgggccttgtacacaccgcccgtcacaccatgagagtttgtaacacccaaagtcggtggggtaaccttttaggagccagccgcctaaggtgggacagatgattagggtgaagtcgtaacaaggtagccgtaggagaacctgcggctggatcacctcctt

SEQ ID NO: 205 - DNA, 1573 bp, artificial sequence
  >GCF_000010145.1_00650 [Lactobacillus]_fermentum
tatgagagtttgatcctggctcaggatgaacgccggcggtgtgcctaatacatgcaagtcgaacgcgttggcccaattgattgatggtgcttgcacctgattgattttggtcgccaacgagtggcggacgggtgagtaacacgtaggtaacctgcccagaagcgggggacaacatttggaaacagatgctaataccgcataacaacgttgttcgcatgagcaacgcttaaaagatggcttctcgctatcacttctggatggacctgcggtgcattagcttgttggtggggtaacggcctaccaaggcgatgatgcatagccgagttgagagactgatcggccacaatgggactgagacacggcccatactcctacgggaggcagcagtagggaatcttccacaatgggcgcaagcctgatggagcaacaccgcgtgagtgaagaagggtttcggctcgtaaagctctgttgttaaagaagaacacgtatgagagtaactgttcatacgttgacggtatttaaccagaaagtcacggctaactacgtgccagcagccgcggtaatacgtaggtggcaagcgttatccggatttattgggcgtaaagagagtgcaggcggttttctaagtctgatgtgaaagccttcggcttaaccggagaagtgcatcggaaactggataacttgagtgcagaagagggtagtggaactccatgtgtagcggtggaatgcgtagatatatggaagaacaccagtggcgaaggcggctacctggtctgcaactgacgctgagactcgaaagcatgggtagcgaacaggattagataccctggtagtccatgccgtaaacgatgagtgctaggtgttggagggtttccgcccttcagtgccggagctaacgcattaagcactccgcctggggagtacgaccgcaaggttgaaactcaaaggaattgacgggggcccgcacaagcggtggagcatgtggtttaattcgaagctacgcgaagaaccttaccaggtcttgacatcttgcgccaaccctagagatagggcgtttccttcgggaacgcaatgacaggtggtgcatggtcgtcgtcagctcgtgtcgtgagatgttgggttaagtcccgcaacgagcgcaacccttgttactagttgccagcattaagttgggcactctagtgagactgccggtgacaaaccggaggaaggtggggacgacgtcagatcatcatgccccttatgacctgggctacacacgtgctacaatggacggtacaacgagtcgcaaactcgcgagggcaagcaaatctcttaaaaccgttctcagttcggactgcaggctgcaactcgcctgcacgaagtcggaatcgctagtaatcgcggatcagcatgccgcggtgaatacgttcccgggccttgtacacaccgcccgtcacaccatgagagtttgtaacacccaaagtcggtggggtaaccttttaggagccagccgcctaaggtgggacagatgattagggtgaagtcgtaacaaggtagccgtaggagaacctgcggctggatcacctccttt

SEQ ID NO: 206 - DNA, 1524 bp, artificial sequence
  >GCF_000012825.1_00237 Bacteroides_dorei_group
atgaagagtttgatcctggctcaggatgaacgctagctacaggcttaacacatgcaagtcgaggggcagcatggtcttagcttgctaaggccgatggcgaccggcgcacgggtgagtaacacgtatccaacctgccgtctactcttggacagccttctgaaaggaagattaatacaagatggcatcatgagtccgcatgttcacatgattaaaggtattccggtagacgatggggatgcgttccattagatagtaggcggggtaacggcccacctagtcttcgatggataggggttctgagaggaaggtcccccacattggaactgagacacggtccaaactcctacgggaggcagcagtgaggaatattggtcaatgggcgagagcctgaaccagccaagtagcgtgaaggatgactgccctatgggttgtaaacttcttttataaaggaataaagtcgggtatggatacccgtttgcatgtactttatgaataaggatcggctaactccgtgccagcagccgcggtaatacggaggatccgagcgttatccggatttattgggtttaaagggagcgtagatggatgtttaagtcagttgtgaaagtttgcggctcaaccgtaaaattgcagttgatactggatatcttgagtgcagttgaggcaggcggaattcgtggtgtagcggtgaaatgcttagatatcacgaagaactccgattgcgaaggcagcctgctaagctgcaactgacattgaggctcgaaagtgtgggtatcaaacaggattagataccctggtagtccacacggtaaacgatgaatactcgctgtttgcgatatactgcaagcggccaagcgaaagcgttaagtattccacctggggagtacgccggcaacggtgaaactcaaaggaattgacgggggcccgcacaagcggaggaacatgtggtttaattcgatgatacgcgaggaaccttacccgggcttaaattgcagatgaattacggtgaaagccgtaagccgcaaggcatctgtgaaggtgctgcatggttgtcgtcagctcgtgccgtgaggtgtcggcttaagtgccataacgagcgcaacccttgttgtcagttactaacaggttccgctgaggactctgacaagactgccatcgtaagatgtgaggaaggtggggatgacgtcaaatcagcacggcccttacgtccggggctacacacgtgttacaatggggggtacagagggccgctaccacgcgagtggatgccaatccccaaaacctctctcagttcggactggagtctgcaacccgactccacgaagctggattcgctagtaatcgcgcatcagccacggcgcggtgaatacgttcccgggccttgtacacaccgcccgtcaagccatgggagccgggggtacctgaagtgcgtaaccgcgaggagcgccctagggtaaaactggtgactggggctaagtcgtaacaaggtagccgtaccggaaggtgcggctggaacacctcctt

SEQ ID NO: 207 - DNA, 1525 bp, artificial sequence
  >GCF_000012825.1_01671 Bacteroides_dorei_group
atgaagagtttgatcctggctcaggatgaacgctagctacaggcttaacacatgcaagtcgaggggcagcatggtcttagcttgctaaggccgatggcgaccggcgcacgggtgagtaacacgtatccaacctgccgtctactcttggacagccttctgaaaggaagattaatacaagatggcatcatgagtccgcatgttcacatgattaaaggtattccggtagacgatggggatgcgttccattagatagtaggcggggtaacggcccacctagtcttcgatggataggggttctgagaggaaggtcccccacattggaactgagacacggtccaaactcctacgggaggcagcagtgaggaatattggtcaatgggcgagagcctgaaccagccaagtagcgtgaaggatgactgccctatgggttgtaaacttcttttataaaggaataaagtcgggtatggatacccgtttgcatgtactttatgaataaggatcggctaactccgtgccagcagccgcggtaatacggaggatccgagcgttatccggatttattgggtttaaagggagcgtagatggatgtttaagtcagttgtgaaagtttgcggctcaaccgtaaaattgcagttgatactggatatcttgagtgcagttgaggcaggcggaattcgtggtgtagcggtgaaatgcttagatatcacgaagaactccgattgcgaaggcagcctgctaagctgcaactgacattgaggctcgaaagtgtgggtatcaaacaggattagataccctggtagtccacacggtaaacgatgaatactcgctgtttgcgatatacggcaagcggccaagcgaaagcgttaagtattccacctggggagtacgccggcaacggtgaaactcaaaggaattgacgggggcccgcacaagcggaggaacatgtggtttaattcgatgatacgcgaggaaccttacccgggcttaaattgcagatgaattacggtgaaagccgtaagccgcaaggcatctgtgaaggtgctgcatggttgtcgtcagctcgtgccgtgaggtgtcggcttaagtgccataacgagcgcaacccttgttgtcagttactaacaggtcatgctgaggactctgacaagactgccatcgtaagatgtgaggaaggtggggatgacgtcaaatcagcacggcccttacgtccggggctacacacgtgttacaatggggggtacagagggccgctaccacgcgagtggatgccaatccccaaaacctctctcagttcggactggagtctgcaacccgactccacgaagctggattcgctagtaatcgcgcatcagccacggcgcggtgaatacgttcccgggccttgtacacaccgcccgtcaagccatgggagccgggggtacctgaagtgcgtaaccgcgaggagcgccctagggtaaaactggtgactggggctaagtcgtaacaaggtagccgtaccggaaggtgcggctggaacacctccttt

SEQ ID NO: 208 - DNA, 1524 bp, artificial sequence
  >GCF_000012825.1_01758 Bacteroides_dorei_group
atgaagagtttgatcctagctcaggatgaacgctagctacaggcttaacacatgcaagtcgaggggcagcatggtcttagcttgctaaggccgatggcgaccggcgcacgggtgagtaacacgtatccaacctgccgtctactcttggatagccttctgaaaggaagattaatacaagatggcatcatgagtccgcatgttcacatgattaaaggtattccggtagacgatggggatgcgttccattagatagtaggcggggtaacggcccacctagtcttcgatggataggggttctgagaggaaggtcccccacattggaactgagacacggtccaaactcctacgggaggcagcagtgaggaatattggtcaatgggcgagagcctgaaccagccaagtagcgtgaaggatgactgccctatgggttgtaaacttcttttataaaggaataaagtcgggtatggatacccgtttgcatgtactttatgaataaggatcggctaactccgtgccagcagccgcggtaatacggaggatccgagcgttatccggatttattgggtttaaagggagcgtagatggatgtttaagtcagttgtgaaagtttgcggctcaaccgtaaaattgcagttgatactggatatcttgagtgcagttgaggcaggcggaattcgtggtgtagcggtgaaatgcttagatatcacgaagaactccgattgcgaaggcagcctgctaagctgcaactgacattgaggctcgaaagtgtgggtatcaaacaggattagataccctggtagtccacacggtaaacgatgaatactcgctgtttgcgatatacggcaagcggccaagcgaaagcgttaagtattccacctggggagtacgccggcaacggtgaaactcaaaggaattgacgggggcccgcacaagcggaggaacatgtggtttaattcgatgatacgcgaggaaccttacccgggcttaaattgcagatgaattacggtgaaagccgtaagccgcaaggcatctgtgaaggtgctgcatggttgtcgtcagctcgtgccgtgaggtgtcggcttaagtgccataacgagcgcaacccttgttgtcagttactaacaggtcatgctgaggactctgacaagactgccatcgtaagatgtgaggaaggtggggatgacgtcaaatcagcacggcccttacgtccggggctacacacgtgttacaatggggggtacagagggccgctaccacgcgagtggatgccaatccccaaaacctctctcagttcggactggagtctgcaacccgactccacgaagctggattcgctagtaatcgcgcatcagccacggcgcggtgaatacgttcccgggccttgtacacaccgcccgtcaagccatgggagccgggggtacctgaagtgcgtaaccgcgaggagcgccctagggtaaaactggtgactggggctaagtcgtaacaaggtagccgtaccggaaggtgcggctggaacacctcctt

SEQ ID NO: 209 - DNA, 1524 bp, artificial sequence
  >GCF_000012825.1_03671 Bacteroides_dorei_group
atgaagagtttgatcctggctcaggatgaacgctagctacaggcttaacacatgcaagtcgaggggcagcatggtcttagcttgctaaggccgatggcgaccggcgcacgggtgagtaacacgtatccaacctgccgtctactcttggacagccttctgaaaggaagattaatacaagatggcatcatgagtccgcatgttcacatgattaaaggtattccggtagacgatggggatgcgttccattagatagtaggcggggtaacggcccacctagtcttcgatggataggggttctgagaggaaggtcccccacattggaactgagacacggtccaaactcctacgggaggcagcagtgaggaatattggtcaatgggcgagagcctgaaccagccaagtagcgtgaaggatgactgccctatgggttgtaaacttcttttataaaggaataaagtcgggtatgcatacccgtttgcatgtactttatgaataaggatcggctaactccgtgccagcagccgcggtaatacggaggatccgagcgttatccggatttattgggtttaaagggagcgtagatggatgtttaagtcagttgtgaaagtttgcggctcaaccgtaaaattgcagttgatactggatatcttgagtgcagttgaggcaggcggaattcgtggtgtagcggtgaaatgcttagatatcacgaggaactccgattgcgaaggcagcctgctaagctgcaactgacattgaggctcgaaagtgtgggtatcaaacaggattagataccctggtagtccacacggtaaacgatgaatactcgctgtttgcgatatacggcaagcggccaagcgaaagcgttaagtattccacctggggagtacgccggcaacggtgaaactcaaaggaattgacgggggcccgcacaagcggaggaacatgtggtttaattcgatgatacgcgaggaaccttacccgggcttaaattgcagatgaattacggtgaaagccgtaagccgcaaggcatctgtgaaggtgctgcatggttgtcgtcagctcgtgccgtgaggtgtcggcttaagtgccataacgagcgcaacccttgttgtcagttactaacaggttctgctgaggactctgacaagactgccatcgtaagatgtgaggaaggtggggatgacgtcaaatcagcacggcccttacgtccggggctacacacgtgttacaatggggggtacagagggccgctaccacgcgagtggatgccaatcccaaaaacctctctcagttcggactggagtctgcaacccgactccacgaagctggattcgctagtaatcgcgcatcagccacggcgcggtgaatacgttcccgggccttgtacacaccgcccgtcaagccatgggagccgggggtacctgaagtgcgtaaccgcgaggagcgccctagggtaaaactggtgactggggctaagtcgtaacaaggtagccgtaccggaaggtgcggctggaacacctcctt

SEQ ID NO: 210 - DNA, 1524 bp, artificial sequence
  >GCF_000012825.1_03948 Bacteroides_dorei_group
atgaagagtttgatcctggctcaggatgaacgctagctacaggcttaacacatgcaagtcgaggggcagcatggtcttagcttgctaagactgatggcgaccggcgcacgggtgagtaacacgtatccaacctgccgtctactcttggacagccttctgaaaggaagattaatacaagatggcatcatgagtccgcatgttcacatgattaaaggtattccggtagacgatggggatgcgttccattagatagtaggcggggtaacggcccacctagtcttcgatggataggggttctgagaggaaggtcccccacattggaactgagacacggtccaaactcctacgggaggcagcagtgaggaatattggtcaatgggcgcaggcctgaaccagccaagtagcgtgaaggatgactgccctatgggttgtaaacttcttttataaaggaataaagtcgggtatggatacccgtttgcatgtactttatgaataaggatcggctaactccgtgccagcagccgcggtaatacggaggatccgagcgttatccggatttattgggtttaaagggagcgtagatggatgtttaagtcagttgtgaaagtttgcggctcaaccgtaaaattgcagttgatactggatatcttgagtgcagttgaggcaggcggaattcgtggtgtagcggtgaaatgcttagatatcacgaagaactccgattgcgaaggcagcctgctaagctgcaactgacattgaggctcgaaagtgtgggtatcaaacaggattagataccctggtagtccacacggtaaacgatgaatactcgctgtttgcgatatacggcaagcggccaagcgaaagcgttaagtattccacctggggagtacgccggcaacggtgaaactcaaaggaattgacgggggcccgcacaagcggaggaacatgtggtttaattcgatgatacgcgaggaaccttacccgggcttaaattgcagatgaattacggtgaaagccgtaagccgcaaggcatctgtgaaggtgctgcatggttgtcgtcagctcgtgccgtgaggtgtcggcttaagtgccataacgagcgcaacccttgttgtcagttactaacaggtttcgctgaggactctgacaagactgccatcgtaagatgtgaggaaggtggggatgacgtcaaatcagcacggcccttacgtccggggctacacacgtgttacaatggggggtacagagggccgctaccacgcgagtggatgccaatcccaaaaacctctctcagttcggactggagtctgcaacccgactccacgaagctggattcgctagtaatcgcgcatcagccacggcgcggtgaatacgttcccgggccttgtacacaccgcccgtcaagccatgggagccgggggtacctgaagtgcgtaaccgcgaggagcgccctagggtaaaactggtgactggggctaagtcgtaacaaggtagccgtaccggaaggtgcggctggaacacctcctt

SEQ ID NO: 211 - DNA, 1553 bp, artificial sequence
  >GCF_000017005.1_01930 Streptococcus_gordonii
aatgagagtttgatcctggctcaggacgaacgctggcggcgtgcctaatacatgcaagtagaacgcacagtttataccgtagcttgctacaccatagactgtgagttgcgaacgggtgagtaacgcgtaggtaacctgcctggtagcgggggataactattggaaacgatagctaataccgcataatattaattattgcatgataattgattgaaagatgcaactgcatcactaccagatggacctgcgttgtattagctagtaggtgaggtaacggctcacctaggcgacgatacatagccgacctgagagggtgatcggccacactgggactgagacacggcccagactcctacgggaggcagcagtagggaatcttcggcaatggacgaaagtctgaccgagcaacgccgcgtgagtgaagaaggttttcggatcgtaaagctctgttgtaagagaagaacgggtgtgagagtggaaagttcacactgtgacggtatcttaccagaaagggacggctaactacgtgccagcagccgcggtaatacgtaggtcccgagcgttgtccggatttattgggcgtaaagcgagcgcaggcggttagataagtctgaagttaaaggctgtggcttaaccatagtacgctttggaaactgtttaacttgagtgcagaaggggagagtggaattccatgtgtagcggtgaaatgcgtagatatatggaggaacaccggtggcgaaagcggctctctggtctgtaactgacgctgaggctcgaaagcgtggggagcgaacaggattagataccctggtagtccacgccgtaaacgatgagtgctaggtgttaggccctttccggggcttagtgccgcagctaacgcattaagcactccgcctggggagtacgaccgcaaggttgaaactcaaaggaattgacgggggcccgcacaagcggtggagcatgtggtttaattcgaagcaacgcgaagaaccttaccaggtcttgacatcccgatgcccgctctagagatagagttttacttcggtacatcggtgacaggtggtgcatggttgtcgtcagctcgtgtcgtgagatgttgggttaagtcccgcaacgagcgcaacccttattgttagttgccatcattcagttgggcactctagcgagactgccggtaataaaccggaggaaggtggggatgacgtcaaatcatcatgccccttatgacctgggctacacacgtgctacaatggctggtacaacgagtcgcaagtcggtgacggcaagctaatctcttaaagccagtctcagttcggattgtaggctgcaactcgcctacatgaagtcggaatcgctagtaatcgcggatcagcacgccgcggtgaatacgttcccgggccttgtacacaccgcccgtcacaccacgagagtttgtaacacccgaagtcggtgaggtaaccttttaggagccagccgcctaaggtgggatagatgattggggtgaagtcgtaacaaggtagccgtatcggaaggtgcggctggatcacctcctt

SEQ ID NO: 212 - DNA, 1509 bp, artificial sequence
  >GCF_000024225.1_01326 [Atopobium]_parvulum
atggagagttcgatcctggctcaggatgaacgctggcggcgcgcctaacacatgcaagtcgaacgattaaagcaccttcgggtgtgtataaagtggcgaacggctgagtaacacgtgggcaacctgcccctttcattgggatagccacgggaaaccgtggataataccgaatacttcgagacttccgcatggaagactcgagaaagctccggcggagagggatgggcccgcggcctgttagcttgttggtggggtaacggcctaccaaggcaatgatgggtagctgggttgagagaccgaccagccagattgggactgagacacggcccagactcctacgggaggcagcagtggggaatcttgcacaatgggcgaaagcctgatgcagcgacgccgcgtgcgggatgaaggccttcgggttgtaaaccgctttcagcagggacgaggcgaaagtgacggtacctgcagaagaagccccggctaactacgtgccagcagccgcggtaatacgtagggggcaagcgttatccggattcattgggcgtaaagcgctcgtaggcggtctgttaggtcgggagttaaatccgggggctcaacccccgctcgctctcgataccggcagacttgagtttggtaggggaaggtggaattcctagtgtagcggtggaatgcgcagatattaggaagaacaccagtggcgaaggcggccttctgggccataactgacgctgaggagcgaaagctaggggagcaaacaggattagataccctggtagtcctagccgtaaacgatggacactaggtgtgggggagtatttcttccgtgccgcagctaacgcattaagtgtcccgcctggggagtacggccgcaaggctaaaactcaaaggaattgacgggggcccgcacaagcagcggagcatgtggtttaattcgaagcaacgcgaagaaccttaccagggcttgacatttaggtgaagcggcggaaacgtcgtggccgaaaggagcctaaacaggtggtgcatggctgtcgtcagctcgtgtcgtgagatgttaggttaagtcctgcaacgagcgcaaccctcgtcgtatgttgccagcggttaggccgggcacccatacgagaccgccggcgtcaagccggaggaaggtggggacgacgtcaagtcatcatgccccttatgtcctgggctacacacgtgctacaatggccggcacaatgggctgccaacccgcgagggtgagcgaatccctaaagccggtcccagttcggattggaggctgcaacccgcctccatgaagtcggagttgctagtaatcgcggatcagcacgccgcggtgaatgcgttcccgggccttgtacacaccgcccgtcacaccacccgagtcgattgcacccgaagtcgtcggcctaaccttttaggagggagacgccgaaggtgtggttggtaaggggggtgaagtcgtaacaaggtagccgtaccggaaggtgcggctggatcacctccttt

SEQ ID NO: 213 - DNA, 1546 bp, artificial sequence
  >GCF_000145315.2_00068 Desulfovibrio_fairfieldensis
tggagagtttgattctggctcagattgaacgctggcggcgtgcttaacacatgcaagtcgaacgcgaaagagacttcggtctcgagtagagtggcgcacgggtgagtaacgcgtggataatctgccctcataatcgggataacagttggaaacggctgctaataccggatacgctctgaatgaacttttaggggaaagacggcctctgcttgcaagctgtcgtatgaggatgagtccgcgtcccattagctagttggcggggtaacggcccaccaaggcaacgatgggtagccgatctgagaggatgatcggccacactggaactgaaacacggtccagactcctacgggaggcagcagtggggaatattgcgcaatgggcgaaagcctgacgcagcgacgccgcgtgagggatgaaggttttcggatcgtaaacctctgtcagaagggaagaaagtgcgtggtgctaatcagccgcgcattgacggtaccttcaaaggaagcaccggctaactccgtgccagcagccgcggtaatacggagggtgcaagcgttaatcggaattactgggcgtaaagcgcacgtaggctgttgtgtaagtcaggggtgaaatcccacggctcaaccgtggaactgcccttgatactgcatgacttgaatccgggagagggtggcggaattccaggtgtaggagtgaaatccgtagatatctggaggaacatcagtggcgaaggcggccacctggaccggtattgacgctgaggtgcgaaagcgtggggagcaaacaggattagataccctggtagtccacgctgtaaacgatggatgctagatgtcggggagtattcttcggtgtcgtagttaacgcgttaagcatcccgcctggggagtacggtcgcaaggctgaaactcaaagaaattgacgggggcccgcacaagcggtggagtatgtggtttaattcgatgcaacgcgaagaaccttacctaggtttgacatctggggaaccctcccgaaaaggaggggtgcccttcggggagccccaagacaggtgctgcatggctgtcgtcagctcgtgtcgtgagatgttgggttaagtcccgcaacgagcgcaacccctatgcatagttgccagcaagtgaagttgggcactctatgcagactgcccgggttaaccgggaggaaggtggggacgacgtcaagtcatcatggcccttacacctagggctacacacgtactacaatggcgcgcacaaaggggagcgagaccgcgaggtggagccaatcccaaaaaacgcgtcccagtccggattgcagtctgcaactcgactgcatgaagtcggaatcgctagtaattcgagatcagcatgctcgggtgaatgcgttcccgggccttgtacacaccgcccgtcacaccacgaaagtcggttttacccgaagccggtgagccaaccatttatggaggcagccgtctacggtagggccgatgattggggtgaagtcgtaacaaggtagccgtaggggaacctgcggctggatcacctccttt

SEQ ID NO: 214 - DNA, 1538 bp, artificial sequence
  >GCF_000154225.1_01527 Schaalia_odontolytica
tcggagagtttgatcctggctcaggacgaacgctggcggcgtgcttaacacatgcaagtcgaacgctgaagcccagcttgctgggtggatgagtggcgaacgggtgagtaacacgtgagtaacctgcccccttctttgggataacgcccggaaacgggtgctaatactggatattcactgatcttcgcatgggggttggtggaaaggttttttctggtgggggatgggctcgcggcctatcagcttgttggtggggtgatggcctaccaaggctttgacgggtagccggcctgagagggtgaccggtcacattgggactgagatacggcccagactcctacgggaggcagcagtggggaatattgcacaatgggcgaaagcctgatgcagcgacgccgcgtgagggatggaggccttcgggttgtaaacctctttcgctcatggtcaagccgcaactcaaggttgtggtgagggtagtgggtaaagaagcgccggctaactacgtgccagcagccgcggtaatacgtagggcgcgagcgttgtccggaattattgggcgtaaagggcttgtaggcggttggtcgcgtctgccgtgaaatcctctggcttaactgggggcgtgcggtgggtacgggctgacttgagtgcggtaggggagactggaactcctggtgtagcggtggaatgcgcagatatcaggaagaacaccggtggcgaaggcgggtctctgggccgttactgacgctgaggagcgaaagcgtggggagcgaacaggattagataccctggtagtccacgctgtaaacgttgggcactaggtgtgggggccacccgtggtttctgcgccgtagctaacgctttaagtgccccgcctggggagtacggccgcaaggctaaaactcaaaggaattgacgggggcccgcacaagcggcggagcatgcggattaattcgatgcaacgcgaagaaccttaccaaggcttgacatgcacggcggcactgcagagatgtggtggcatttagttggtcgtgtgcaggtggtgcatggttgtcgtcagctcgtgtcgtgagatgttgggttaagtcccgcaacgagcgcaacccttgccctatgttgccagcacgtgatggtggggactcgtgggggactgccggggttaactcggaggaaggtggggatgacgtcaaatcatcatgccccttatgtcttgggcttcacgcatgctacaatggctggtacagagggttgcgatactgtgaggtggagcgaatcccttaaagccagtctcagttcggattggggtctgcaactcgaccccatgaaggtggagtcgctagtaatcgcagatcagcaacgctgcggtgaatacgttctcgggccttgtacacaccgcccgtcacgtcacgaaagttggtaacacccgaagcccatggcctaaccgctttgtgcggggggagtggtcgaaggtgggattggcgattgggacgaagtcgtaacaaggtagccgtaccggaaggtgcggctggatcacctccttt

SEQ ID NO: 215 - DNA, 1523 bp, artificial sequence
  >GCF_000158515.2_01458 Bacteroides_dorei_group
atgaagagtttgatcctggctcaggatgaacgctagctacaggcttaacacatgcaagtcgaggggcagcatggtcttagcttgctaaggccgatggcgaccggcgcacgggtgagtaacacgtatccaacctgccgtctactcttggacagccttctgaaaggaagattaatacaagatggcatcatgagtccgcatgttcacatgattaaaggtattccggtagacgatggggatgcgttccattagatagtaggcggggtaacggcccacctagtcttcgatggataggggttctgagaggaaggtcccccacattggaactgagacacggtccaaactcctacgggaggcagcagtgaggaatattggtcaatgggcgcaggcctgaaccagccaagtagcgtgaaggatgactgccctatgggttgtaaacttcttttataaaggaataaagtcgggtatgtatacccgtttgcatgtactttatgaataaggatcggctaactccgtgccagcagccgcggtaatacggaggatccgagcgttatccggatttattgggtttaaagggagcgtagatggatgtttaagtcagttgtgaaagtttgcggctcaaccgtaaaattgcagttgatactggatatcttgagtgcagttgaggcaggcggaattcgtggtgtagcggtgaaatgcttagatatcacgaagaactccgattgcgaaggcagcctgctaagctgcaactgacattgaggctcgaaagtgtgggtatcaaacaggattagataccctggtagtccacacggtaaacgatgaatactcgctgtttgcgatatacagcaagcggccaagcgaaagcgttaagtattccacctggggagtacgccggcaacggtgaaactcaaaggaattgacgggggcccgcacaagcggaggaacatgtggtttaattcgatgatacgcgaggaaccttacccgggcttaaattgcagatgaattacggtgaaagccgtaagccgcaaggcatctgtgaaggtgctgcatggttgtcgtcagctcgtgccgtgaggtgtcggcttaagtgccataacgagcgcaacccttgttgtcagttactaacaggttcgctgaggactctgacaagactgccatcgtaagatgtgaggaaggtggggatgacgtcaaatcagcacggcccttacgtccggggctacacacgtgttacaatggggggtacagagggccgctaccacgcgagtggatgccaatcccaaaaacctctctcagttcggactggagtctgcaacccgactccacgaagctggattcgctagtaatcgcgcatcagccacggcgcggtgaatacgttcccgggccttgtacacaccgcccgtcaagccatgggagccgggggtacctgaagtgcgtaaccgcgaggagcgccctagggtaaaactggtgactggggctaagtcgtaacaaggtagccgtaccggaaggtgcggctggaacacctcctt

SEQ ID NO: 216 - DNA, 1537 bp, artificial sequence
  >GCF_000163415.1_01159 Schaalia_odontolytica
tcggagagtttgatcctggctcaggacgaacgctggcggcgtgcttaacacatgcaagtcgaacgctgaagcctagcttgctgggtggatgagtggcgaacgggtgagtaacacgtgagtaacctgcccccttctttgggataacgcccggaaacgggtgctaatactggatattcactggtcttcgcatgggggttggtggaaaggtttgttctggtgggggatgggctcgcggcctatcagcttgttggtggggtgatggcctaccaaggctttgacgggtagccggcctgagagggtgaccggtcacattgggactgagatacggcccagactcctacgggaggcagcagtggggaatattgcacaatgggcgaaagcctgatgcagcgacgccgcgtgagggatggaggccttcgggttgtaaacctctttcgctcatggtcaagccgcaacattggttgtggtgagggtagtgggtaaagaagcgccggctaactacgtgccagcagccgcggtaatacgtagggcgcgagcgttgtccggaattattgggcgtaaagggcttgtaggcggttggtcgcgtctgccgtgaaatcctctggcttaactgggggcgtgcggtgggtacgggctgacttgagtgcggtaggggagactggaactcctggtgtagcggtggaatgcgcagatatcaggaagaacaccggtggcgaaggcgggtctctgggccgttactgacgctgaggagcgaaagcgtggggagcgaacaggattagataccctggtagtccacgctgtaaacgttgggcactaggtgtgggggccacccgtggtttctgcgccgtagctaacgctttaagtgccccgcctggggagtacggccgcaaggctaaaactcaaaggaattgacgggggcccgcacaagcggcggagcatgcggattaattcgatgcaacgcgaagaaccttaccaaggcttgacatgcacggcggcactgcagagatgtggtggcatttagttggtcgtgtgcaggtggtgcatggttgtcgtcagctcgtgtcgtgagatgttgggttaagtcccgcaacgagcgcaacccttgccctatgttgccagcacgtgatggtggggactcgtgggggactgccggggttaactcggaggaaggtggggatgacgtcaaatcatcatgccccttatgtcttgggcttcacgcatgctacaatggttggtacagagggttgcgaaatcgtgaggtggagcgaatcccttaaagccagtctcagttcggattggggtctgcaactcgaccccatgaaggtggagtcgctagtaatcgcagatcagcaacgctgcggtgaatacgttctcgggccttgtacacaccgcccgtcacgtcacgaaagttggtaacacccgaagcccatggcctaaccgctttgtgtggggggagtggtcgaaggtgggattggcgattgggacgaagtcgtaacaaggtagccgtaccggaaggtgcggctggatcacctccttt

SEQ ID NO: 217 - DNA, 1546 bp, artificial sequence
  >GCF_000164675.2_01630 Streptococcus_parasanguinis
taatgagagtttgatcctggctcaggatgaacgctggcggcgtgcctaatacatgcaagtagaacgctgaagcttggtgcttgcaccgagcggaggagttgcgaacgggtgagtaacgcgtaggtaacctgcctcttagcgggggataactattggaaacgatagctaataccgcataaaagtcgacattgcatgatgttgacttgaaaggtgcaaatgcatcactaagagatggacctgcgttgtattagctagttggtgaggtaacggctcaccaaggcgacgatacatagccgacctgagagggtgatcggccacactgggactgagacacggcccagactcctacgggaggcagcagtagggaatcttcggcaatggacggaagtctgaccgagcaacgccgcgtgagtgaagaaggttttcggatcgtaaagctctgttgtaagagaagaacgagtgtgagagtggaaagttcacactgtgacggtaacttaccagaaagggacggctaactacgtgccagcagccgcggtaatacgtaggtcccgagcgttatccggatttattgggcgtaaagcgagcgcaggcggttagataagtctgaagttaaaggctgtggcttaaccatagtacgctttggaaactgtttaacttgagtgcagaaggggagagtggaattccatgtgtagcggtgaaatgcgtagatatatggaggaacaccggtggcgaaagcggctctctggtctgtaactgacgctgaggctcgaaagcgtggggagcaaacaggattagataccctggtagtccacgccgtaaacgatgagtgctaggtgttgggtcctttccgggactcagtgccgcagctaacgcattaagcactccgcctggggagtacgaccgcaaggttgaaactcaaaggaattgacgggggcccgcacaagcggtggagcatgtggtttaattcgaagcaacgcgaagaaccttaccaggtcttgacatccctctgaccgctctagagatagagctttccttcgggacagaggtgacaggtggtgcatggttgtcgtcagctcgtgtcgtgagatgttgggttaagtcccgcaacgagcgcaacccctattgttagttgccatcatttagttgggcactctagcgagactgccggtaataaaccggaggaaggtggggatgacgtcaaatcatcatgccccttatgacctgggctacacacgtgctacaatggctggtacaacgagtcgcgagtcggtgacggcaagctaatctcttaaagccagtctcagttcggattgtaggctgcaactcgcctacatgaagtcggaatcgctagtaatcgcggatcagcacgccgcggtgaatacgttcccgggccttgtacacaccgcccgtcacaccacgagagtttgtaacacccgaagtcggtgaggtaaccttttggagccagccgcctaaggtgggatagatgattggggtgaagtcgtaacaaggtagccgtatcggaaggtgcggctggatcacctccttt

SEQ ID NO: 218 - DNA, 1519 bp, artificial sequence
  >GCF_000172175.1_01201 Bacteroides_intestinalis
atgaagagtttgatcctggctcaggatgaacgctagctacaggcttaacacatgcaagtcgaggggcagcatgacctagcaataggttgatggcgaccggcgcacgggtgagtaacacgtatccaacctgccgattattccgggatagcctttcgaaagaaagattaatactggatagcataacgagaaggcatcttcttgttattaaagaatttcgataatcgatggggatgcgttccattagtttgttggcggggtaacggcccaccaagacatcgatggataggggttctgagaggaaggtcccccacattggaactgagacacggtccaaactcctacgggaggcagcagtgaggaatattggtcaatggacgagagtctgaaccagccaagtagcgtgaaggatgactgccctatgggttgtaaacttcttttatatgggaataaagtgagccacgtgtggctttttgtatgtaccatacgaataaggatcggctaactccgtgccagcagccgcggtaatacggaggatccgagcgttatccggatttattgggtttaaagggagcgtaggcggattattaagtcagttgtgaaagtttgcggctcaaccgtaaaattgcagttgatactggtagtcttgagtgcagcagaggtaggcggaattcgtggtgtagcggtgaaatgcttagatatcacgaagaactccgattgcgaaggcagcttactggactgtaactgacgctgatgctcgaaagtgtgggtatcaaacaggattagataccctggtagtccacacagtaaacgatgaatactcgctgtttgcgatatacagcaagcggccaagcgaaagcattaagtattccacctggggagtacgccggcaacggtgaaactcaaaggaattgacgggggcccgcacaagcggaggaacatgtggtttaattcgatgatacgcgaggaaccttacccgggcttaaattgcaactgacggatttggaaacagatcttccttcgggcagttgtgaaggtgctgcatggttgtcgtcagctcgtgccgtgaggtgtcggcttaagtgccataacgagcgcaacccttatctttagttactaacaggtcatgctgaggactctagagagactgccgtcgtaagatgtgaggaaggtggggatgacgtcaaatcagcacggcccttacgtccggggctacacacgtgttacaatggggggtacagaaggcagctacacagcgatgtgatgctaatcccaaaagcctctctcagttcggattggagtctgcaacccgactccatgaagctggattcgctagtaatcgcgcatcagccacggcgcggtgaatacgttcccgggccttgtacacaccgcccgtcaagccatgaaagccgggggtacctgaagtacgtaaccgcaaggagcgtcctagggtaaaactggtaattggggctaagtcgtaacaaggtagccgtaccggaaggtgcggctggaacacctcctt

SEQ ID NO: 219 - DNA, 1524 bp, artificial sequence
  >GCF_000175615.1_00251 Rothia_mucilaginosa
acggagagtttgattctggctcaggacgaacgctggcggcgtgcttaacacatgcaagtcgaacgatgaagcctagcttgctaggtggattagtggcgaacgggtgagtaatacgtgagtaacctacctttaactctgggataagcctgggaaactgggtctaataccggatacgaccaatctccgcatggggtgttggtggaaagcgttatgtagtggttatagatgggctcacggcctatcagcttgttggtgaggtaacggctcaccaaggcgacgacgggtagccggcctgagagggtgaccggccacactgggactgagacacggcccagactcctacgggaggcagcagtggggaatattgcacaatgggcgcaagcctgatgcagcgacgccgcgtgagggatgacggccttcgggttgtaaacctctgttagcagggaagaagagaaattgacggtacctgcagagaaagcgccggctaactacgtgccagcagccgcggtaatacgtagggcgcgagcgttgtccggaattattgggcgtaaagagcttgtaggcggtttgtcgcgtctgctgtgaaaggccggagcttaactccgtgtattgcagtgggtacgggcagactagagtgcagtaggggagactggaactcctggtgtagcggtggaatgcgcagatatcaggaagaacaccgatggcgaaggcaggtctctgggctgtaactgacgctgagaagcgaaagcatggggagcgaacaggattagataccctggtagtccatgccgtaaacgttgggcactaggtgtgggggacattccacgttttccgcgccgtagctaacgcattaagtgccccgcctggggagtacggccgcaaggctaaaactcaaagaaattgacgggggcccgcacaagcggcggagcatgcggattaattcgatgcaacgcgaagaaccttaccaaggcttgacatatactggaccgcatcagagatggtgtttcccttcggggctggtatacaggtggtgcatggttgtcgtcagctcgtgtcgtgagatgttgggttaagtcccgcaacgagcgcaaccctcgttctatgttgccagcacgtaatggtggggactcataggagactgccggggtcaactcggaggaaggtggggatgacgtcaaatcatcatgccccttatgtcttgggcttcacgcatgctacaatggccggtacagagggttgcgatactgtgaggtggagctaatccctaaaagccggtctcagttcggattggggtctgcaactcgaccccatgaagtcggagtcgctagtaatcgcagatcagcaacgctgcggtgaatacgttcccgggccttgtacacaccgcccgtcaagtcacgaaagttggtaacacccaaagccggtggcctaaccttttggagggagccgtctaaggtgggattggcgattgggactaagtcgtaacaaggtagccgtaccggaaggtgcggctggatcacctccttt

SEQ ID NO: 220 - DNA, 1544 bp, artificial sequence
  >GCF_000180075.1_00180 Streptococcus_salivarius_group
aatgagagtttgatcctggctcaggacgaacgctggcggcgtgcctaatacatgcaagtagaacgctgaagagaggagcttgctcttcttgaatgagttgcgaacgggtgagtaacgcgtaggtaacctgccttgtagcgggggataacattggaaacgatagctaataccgcataacaatgggtgacacatgtcatttatttgaaaggggcaattgctccactacaagatggacctgcgttgtattagctagtaggtgaggtaacggctcacctaggcgacgatacatagccgacctgagagggtgatcggccacactgggactgagacacggcccagactcctacgggaggcagcagtaggaatcttcggcaatgggggcaaccctgaccgagcaacgccgcgtgagtgaagaaggttttcggatcgtaaagctctgttgtaagtcaagaacgagtgtgagagtggaaagttcacactgtgacggtagcttaaccgagaaagggacggctaactacgtgccagcagccgcggtaatacgtaggtcccgagcgttgtccggatttattgggcgtaaagcgagcgcaggcggtttgataagtctgaagttaaaggctgtggctcaaccatagttcgctttggaaactgtcaaacttgagtgcagaaggggagagtggaattccatgtgtagcggtgaaatgcgtagatatatggaggaacaccggtggcgaaagcggctctctggtctgtaactgacgctgaggctcgaaagcgtgggagcgaacaggattagataccctggtagtccacgccgtaaacgatgagtgctaggtgttggatcctttccgggattcagtgccgcagctaacgcattaagcactccgcctggggagtacgaccgcaaggttgaaactcaaaggaattgacgggggcccgcacaagcggtggagcatgtggtttaattcgaagcaacgcgaagaaccttaccaggtcttgacatcccgatgctatttctagagatagaaagttacttcggtacatcggtgacaggtggtgcatggttgtcgtcagctcgtgtcgtgagatgttgggttaagtcccgcaacgagcgcaacccctattgttagttgccatcattcagttgggcactctagcgagactgccggtaataaaccggaggaaggtggggatgacgtcaaatcatcatgccccttatgacctgggctacacacgtgctacaatggttggtacaacgagttgcgagtcggtgacggcaagctaatctcttaaagaccaatctcagttcggattgtaggctgcaactcgcctacatgaagtcggaatcgctagtaatcgcggatcagcacgccgcggtgaatacgttcccgggccttgtacacaccgcccgtcacaccacgagagtttgtaacacccgaagtcggtgaggtaaccttttggagccagccgcctaaggtgggatagatgattggggtgaagtcgtaacaaggtagccgtatcggaaggtgcggctggatcacctcctt

SEQ ID NO: 221 - DNA, 1543 bp, artificial sequence
  >GCF_000180075.1_01350 Streptococcus_salivarius_group
aatgagagtttgatcctggctcaggacgaacgctggcggcgtgcctaatacatgcaagtagaacgctgaagagaggagcttgctcttcttgaatgagttgcgaacgggtgagtaacgcgtaggtaacctgccttgtagcgggggataactattggaaacgatagctaataccgcataacaatgggtgacacatgtcatttatttgaaaggggcaattgctccactacaagatggacctgcgttgtattagctagtaggtgaggtaacggctcacctaggcgacgatacatagccgacctgagagggtgatcggccacactgggactgagacacggcccagactcctacgggaggcagcagtagggaatcttcggcaatgggggcaaccctgaccgagcaacgccgcgtgagtgaagaaggttttcggatcgtaaagctctgttgtaagtcaagaacgagtgtgagagtggaaagttcacactgtgacggtagcttaccagaaagggacggctaactacgtgccagcagccgcggtaatacgtaggtcccgagcgttgtccggatttattgggcgtaaagcgagcgcaggcggtttgataagtctgaagttaaaggctgtggctcaaccatagttcgctttggaaactgtcaaacttgagtgcagaaggggagagtggaattccatgtgtagcggtgaaatgcgtagatatatggaggaacaccggtggcgaaagcggctctctggtctgtaactgacgctgaggctcgaaagcgtggggagcgaacaggattagataccctggtagtccacgtcgtaaacgatgagtgctaggtgttggatcctttccgggattcagtgccgcagctaacgcattaagcactccgcctggggagtacgaccgcaaggttgaaactcaaaggaattgacgggggcccgcacaagcggtggagcatgtggtttaattcgaagcaacgcgaagaaccttaccaggtcttgacatcccgatgctatttctagagatagtaagttacttcggtacatcggtgacaggtggtgcatggttgtcgtcagctcgtgtcgtgagatgttgggttaagtcccgcaacgagcgcaacccctattgttagttgccatcattcagttgggcactctagcgagactgccgtaataaaccggaggaaggtggggatgacgtcaaatcatcatgccccttatgacctgggctacacacgtgctacaatggttggtacaacgagttgcgagtcggtgacggcaagctaatctcttaaagccaatctcagttcggattgtaggctgcaactcgcctacatgaagtcggaatcgctagtaatcgcggatcagcacgccgcggtgaatacgttcccgggccttgtacacaccgcccgtcacaccacgagagtttgtaacacccgaagtcggtgaggtaaccttttggagccagccgcctaaggtggggtagatgattggggtgaagtcgtaacaaggtagccgtatcggaaggtgcggctggatcacctcctt

SEQ ID NO: 222 - DNA, 1542 bp, artificial sequence
  >GCF_000180075.1_01715 Streptococcus_salivarius_group
aatgagagtttgatcctggctcaggacgaacgctggcggcgtgcctaatacatgcaagtagaacgctgaagagaggagcttgctcttcttgaatgagttgcgaacgggtgagtaacgcgtaggtaacctgccttgtagcgggggataactattggaaacgatagctaataccgcataacaatggtgacacatgtcattatttgaaaggggcaattgctccactacaagatggacctgcgttgtattagctagtaggtgaggtaacggctcacctaggcgacgatacatagccgacctgagagggtgatcggccacactgggactgagacacggcccagactcctacgggaggcagcagtagggaatcttcggcaatgggggcaaccctgaccgagcaacgccgcgtgagtgaagaaggttttcggatcgtaaagctctgttgtaagtcaagaacgagtgtgagagtggaaagttcacactgtgacggtagcttaccagaaagggacggctaactacgtgccagcagccgcggtaatacgtaggtcccgagcgttgtccggatttattgggcgtaaagcgagcgcaggcggtttgataagtctgaagttaaaggctgtggctcaaccatagttcgctttggaaactgtcaaacttgagtgcagaaggggagagtggaattccatgtgtagcggtgaaatgcgtagatatatggaggaacaccggtggcgaaagcggctctctggtctgtaactgacgctgaggctcgaaagcgtggggagcgaacaggattagataccctggtagtccacgccgtaaacgatgagtgctaggtgttggatcctttccgggattcagtgccgcagctaacgcattaagcactccgcctggggagtacgaccgcaaggttgaaactcaaaggaattgacgggggcccgcacaagcggtggagcatgtggtttaattcgaagcaacgcgaagaaccttaccaggtcttgacatcccgatgctatttctagagatagaaagttacttcggtacatcggtgacaggtggtgcatggttgtcgtcagctcgtgtcgtgagatgttgggttaagtcccgcaacgagcgcaacccctattgttagttgccatcattcagttgggcactctagcgagactgccggtaataaaccggaggaaggtggggatgacgtcaaatcatcatgccccttatgacctgggctacacacgtgctacaatggttggtacaacgagttgcgagtcggtgacggcaagctaatctcttaaagccaatctcagttcggattgtaggctgcaactcgcctacatgaagtcggaatcgctagtaatcgcggatcagcacgccgcggtgaatacgttcccgggccttgtacacaccgcccgtcacaccacgagagtttgtaacacccgaagtcggtgaggtaaccttttggagccagccgcctaaggtgggatagatgattggggtgaagtcgtaacaaggtagccgtatcggaaggtgcggctggatcacctcctt

SEQ ID NO: 223 - DNA, 1524 bp, artificial sequence
  >GCF_000186105.1_04707 Bacteroides_dorei_group
atgaagagtttgatcctggctcaggatgaacgctagctacaggcttaacacatgcaagtcgaggggcagcatggtcttagcttgctaaggccgatggcgaccggcgcacgggtgagtaacacgtatccaacctgccgtctactcttggacagccttctgaaaggaagattaatacaagatggcatcatgagtccgcatgttcacatgattaaaggtattccggtagacgatggggatgcgttccattagatagtaggcggggtaacggcccacctagtcttcgatggataggggttctgagaggaaggtcccccacattggaactgagacacggtccaaactcctacgggaggcagcagtgaggaatattggtcaatgggcgcaggcctgaaccagccaagtagcgtgaaggatgactgccctatgggttgtaaacttcttttataaaggaataaagtcgggtatgtatacccgtttgcatgtactttatgaataaggatcggctaactccgtgccagcagccgcggtaatacggaggatccgagcgttatccggatttattgggtttaaagggagcgtagatggatgtttaagtcagttgtgaaagtttgcggctcaaccgtaaaattgcagttgatactggatatcttgagtgcagttgaggcaggcggaattcgtggtgtagcggtgaaatgcttagatatcacgaagaactccgattgcgaaggcagcctgctaagctgcaactgacattgaggctcgaaagtgtgggtatcaaacaggattagataccctggtagtccacacggtaaacgatgaatactcgctgtttgcgatatacagcaagcggccaagcgaaagcgttaagtattccacctggggagtacgccggcaacggtgaaactcaaaggaattgacgggggcccgcacaagcggaggaacatgtggtttaattcgatgatacgcgaggaaccttacccgggcttaaattgcagatgaattacggtgaaagccgtaagccgcaaggcatctgtgaaggtgctgcatggttgtcgtcagctcgtgccgtgaggtgtcggcttaagtgccataacgagcgcaacccttgttgtcagttactaacaggttccgctgaggactctgacaagactgccatcgtaagatgtgaggaaggtggggatgacgtcaaatcagcacggcccttacgtccggggctacacacgtgttacaatggggggtacagagggccgctaccacgcgagtggatgccaatcccaaaaacctctctcagttcggactggagtctgcaacccgactccacgaagctggattcgctagtaatcgcgcatcagccacggcgcggtgaatacgttcccgggccttgtacacaccgcccgtcaagccatgggagccgggggtacctgaagtgcgtaaccgcgaggagcgccctagggtaaaactggtgactggggctaagtcgtaacaaggtagccgtaccggaaggtgcggctggaacacctcctt

SEQ ID NO: 224 - DNA, 1546 bp, artificial sequence
  >GCF_000187505.1_02032 Streptococcus_parasanguinis
taatgagagtttgatcctggctcaggatgaacgctggcggcgtgcctaatacatgcaagtagaacgctgaagcttggtgcttgcaccgagcggatgagttgcgaacgggtgagtaacgcgtaggtaacctgcctcttagcgggggataactattggaaacgatagctaataccgcataaaagtcgatatcgcatgatgttgatttgaaaggtgcaaatgcatcactaagagatggacctgcgttgtattagctagttggtgaggtaacggctcaccaaggcgacgatacatagccgacctgagagggtgatcggccacactgggactgagacacggcccagactcctacgggaggcagcagtagggaatcttcggcaatgggggcaaccctgaccgagcaacgccgcgtgagtgaagaaggttttcggatcgtaaagctctgttgtaagagaagaacgagtgtgagagtggaaagttcacactgtgacggtaacttaccagaaagggacggctaactacgtgccagcagccgcggtaatacgtaggtcccgagcgttatccggatttattgggcgtaaagcgagcgcaggcggttagataagtctgaagttaaaggctgtggcttaaccatagtacgctttggaaactgtttaacttgagtgcagaaggggagagtggaattccatgtgtagcggtgaaatgcgtagatatatggaggaacaccggtggcgaaagcggctctctggtctgtaactgacgctgaggctcgaaagcgtggggagcaaacaggattagataccctggtagtccacgccgtaaacgatgagtgctaggtgttgggtcctttccgggactcagtgccgcagctaacgcattaagcactccgcctggggagtacgaccgcaaggttgaaactcaaaggaattgacgggggcccgcacaagcggtggagcatgtggtttaattcgaagcaacgcgaagaaccttaccaggtcttgacatccctctgaccgctctagagatagagttttccttcgggacagaggtgacaggtggtgcatggttgtcgtcagctcgtgtcgtgagatgttgggttaagtcccgcaacgagcgcaacccctattgttagttgccatcattgagttgggcactctagcgagactgccggtaataaaccggaggaaggtggggatgacgtcaaatcatcatgccccttatgacctgggctacacacgtgctacaatggctggtacaacgagtcgcgagtcggtgacggcaagctaatctcttaaagccagtctcagttcggattgtaggctgcaactcgcctacatgaagtcggaatcgctagtaatcgcggatcagcacgtcgcggtgaatacgttcccgggccttgtacacaccgcccgtcacaccacgagagtttgtaacacccgaagtcggtgaggtaaccgtaaggagccagccgcctaaggtgggatagatgattggggtgaagtcgtaacaaggtagccgtatcggaaggtgcggctggatcacctccttt

SEQ ID NO: 225 - DNA, 1542 bp, artificial sequence
  >GCF_000187585.1_01631 Streptococcus_infantis_group
aatgagagtttgatcctggctcaggatgaacgctggcggcgtgcctaatacatgcaagtagaacgctgaaggaggagcttgcttctctggatgagttgcgaacgggtgagtaacgcgtaggtaacctgcctggtagcgggggataactattggaaacgatagctaataccgcataagagcagttgttgcatgacagctgtttaaaaggtgcaattgcaccactaccagatggacctgcgttgtattagctagttggtgaggtaacggctcaccaaggcgacgatacatagccgacctgagagggtgatcggccacactgggactgagacacggcccagactcctacgggaggcagcagtagggaatcttcggcaatgggggcaaccctgaccgagcaacgccgcgtgagtgaagaaggttttcggatcgtaaagctctgttgtaagagaagaacgagtgtgagagtggaaagttcacgctgtgacggtatcttaccagaaagggacggctaactacgtgccagcagccgcggtaatacgtaggtcccgagcgttatccggatttattgggcgtaaagcgagcgcaggcggttagataagtctgaagttaaaggctgtggcttaaccatagtacgctttggaaactgtttaacttgagtgcaagaggggagagtggaattccatgtgtagcggtgaaatgcgtagatatatggaggaacaccggtggcgaaagcggctctctggcttgtaactgacgctgaggctcgaaagcgtggggagcaaacaggattagataccctggtagtccacgccgtaaacgatgagtgctaggtgttagaccctttccggggtttagtgccgcagctaacgcattaagcactccgcctggggagtacgaccgcaaggttgaaactcaaaggaattgacgggggcccgcacaagcggtggagcatgtggtttaattcgaagcaacgcgaagaaccttaccaggtcttgacatcccgatgccatttctagagataggaagttacttcggtacatcggtgacaggtggtgcatggttgtcgtcagctcgtgtcgtgagatgttgggttaagtcccgcaacgagcgcaacccctattgttagttgccatcattcagttgggcactctagcgagactgccggtaataaaccggaggaaggtggggatgacgtcaaatcatcatgccccttatgacctgggctacacacgtgctacaatggctggtacaacgagtcgcgagtcggtgacggcaagctaatctcttaaagccagtctcagttcggattgtaggctgcaactcgcctacatgaagtcggaatcgctagtaatcgcggatcagcacgccgcggtgaatacgttcccgggccttgtacacaccgcccgtcacaccacgagagtttgtaacacccgaagtcggtgaggtaaccatttggagccagccgcctaaggtgggatagatgattggggtgaagtcgtaacaaggtagccgtatcggaaggtgcggctggatcacctcctt

SEQ ID NO: 226 - DNA, 1544 bp, artificial sequence
  >GCF_000188295.1_01808 Streptococcus_salivarius_group
aatgagagtttgatcctggctcaggacgaacgctggcggcgtgcctaatacatgcaagtagaacgctgaagagaggagcttgctcttcttggatgagttgcgaacgggtgagtaacgcgtaggtaacctgccttgtagcgggggataactattggaaacgatagctaataccgcataacaataggtgacacatgtcatttatttgaaaggggcaattgctccactacaagatggacctgcgttgtattagctagtaggtgaggtaacggctcacctaggcgacgatacatagccgacctgagagggtgatcggccacactgggactgagacacggcccagactcctacgggaggcagcagtagggaatcttcggcaatgggggcaaccctgaccgagcaacgccgcgtgagtgaagaaggttttcggatcgtaaagctctgttgtaagtcaagaacgagtgtgagagtggaaagttcacactgtgacggtagcttaccagaaagggacggctaactacgtgccagcagccgcggtaatacgtaggtcccgagcgttgtccggatttattgggcgtaaagcgagcgcaggcggtttgataagtctgaagttaaaggctgtggctcaaccatagttcgctttggaaactgtcaaacttgagtgcagaaggggagagtggaattccatgtgtagcggtgaaatgcgtagatatatggaggaacaccggtggcgaaagcggctctctggtctgtaactgacgctgaggctcgaaagcgtggggagcgaacaggattagataccctggtagtccacgccgtaaacgatgagtgctaggtgttggatcctttccgggattcagtgccgcagctaacgcattaagcactccgcctggggagtacgaccgcaaggttgaaactcaaaggaattgacgggggcccgcacaagcggtggagcatgtggtttaattcgaagcaacgcgaagaaccttaccaggtcttgacatcccgatgctatttctagagatagaaagttacttcggtacatcggtgacaggtggtgcatggttgtcgtcagctcgtgtcgtgagatgttgggttaagtcccgcaacgagcgcaacccctattgttagttgccatcattcagttgggcactctagcgagactgccggtaataaaccggaggaaggtggggatgacgtcaaatcatcatgccccttatgacctgggctacacacgtgctacaatggttggtacaacgagttgcgagtcggtgacggcaagctaatctcttaaagccaatctcagttcggattgtaggctgcaactcgcctacatgaagtcggaatcgctagtaatcgcggatcagcacgccgcggtgaatacgttcccgggccttgtacacaccgcccgtcacaccacgagagtttgtaacacccgaagtcggtgaggtaaccttttggagccagccgcctaaggtgggatagatgattggggtgaagtcgtaacaaggtagccgtatcggaaggtgcggctggatcacctcctt

SEQ ID NO: 227 - DNA, 1546 bp, artificial sequence
  >GCF_000215385.1_00266 Streptococcus_infantis_group
aatgagagtttgatcctggctcaggatgaacgctggcggcgtgcctaatacatgcaagtagaacgctgaagcttggtgcttgcaccgagcggatgagttgcgaacgggtgagtaacgcgtaggtaacctgcctggtagcgggggataactattggaaacgatagctaataccgcatgacaacagttattgcatgataactgtttaaaaggggcaattgctccactaccagatggacctgcgttgtattagctagttggtgaggtaacggctcaccaaggcgacgatacatagccgacctgagagggtgatcggccacactgggactgagacacggcccagactcctacgggaggcagcagtagggaatcttcggcaatggacggaagtctgaccgagcaacgccgcgtgagtgaagaaggttttcggatcgtaaagctctgttgtaagagaagaacgagtgtgagagtggaaagttcacactgtgacggtatcttaccagaaagggacggctaactacgtgccagcagccgcggtaatacgtaggtcccgagcgttatccggatttattgggcgtaaagcgagcgcaggcggttagataagtctgaagttaaaggctgtggcttaaccatagtacgctttggaaactgtttaacttgagtgcaagaggggaagagtggaattccatgtgtagcggtgtaaatgcgtagatatatggaggaacaccggtggcgaaagcggctctctggcttgtaactgacgctgaggctcgaaagcgtggggagcaaacaggattagataccctggtagtccacgccgtaaacgatgagtgctaggtgttagaccctttccggggtttagtgccgtagctaacgcattaagcactccgcctggggagtacgatcgcaaggttgaaactcaaaggaattgacgggggcccgcacaagcggtggagcatgtggtttaattcgaagcaacgcgaagaaccttaccaggtcttgacatccctctgaccgctctggagatagagttttccttcgggacagaggtgacaggtggtgcatggttgtcgtcagctcgtgtcgtgagatgttgggttaagtcccgcaacgagcgcaacccctattgttagttgccatcattcagttgggcactctagcgagactgccggtaataaaccggaggaaggtggggatgacgtcaaatcatcatgccccttatgacctgggctacacacgtgctacaatggctggtacaacgagtcgcaagtcggtgacggcaagctaatctcttaaagccagtctcagttcggattgtaggctgcaactcgcctacatgaagtcggaatcgctagtaatcgcggatcagcacgccgcggtgaatacgttcccgggccttgtacacaccgcccgtcacaccacgagagtttgtaacacccgaagtcggtgaggtaaccatttggagccagccgcctaaggtgggatagatgattggggtgaagtcgtaacaaggtagccgtatcggaaggtgcggctggatcacctcctt

SEQ ID NO: 228 - DNA, 1543 bp, artificial sequence
  >GCF_000215385.1_00351 Streptococcus_infantis_group
aatgagagtttgatcctggctcaggatgaacgctggcggcgtgcctaatacatgcaagtagaacgctgaagcttggtgcttgcaccgagcggatgagttgcgaacgggtgagtaacgcgtaggtaacctgcctggtagcgggggataactattggaaacgatagctaataccgcatgacaacagttattgcatgataactgttaaaaggggcaattgctccactaccagatggacctgcgttgtattagctagttggtgaggtaacggctcaccaaggcgacgatacatagccgacctgagagggtgatcggccacactgggactgagacacggcccagactcctacgggaggcagcagtagggaatcttcggcaatggacggaagtctgaccgagcaacgccgcgtgagtgaagaaggttttcggatcgtaaagctctgttgtaagagaagaacgagtgtgagagtggaaagttcacactgtgacggtatcttaccagaaagggacggctaactacgtgccagcagccgcggtaatacgtaggtcccgagcgttatccggatttattgggcgtaaagcgagcgcaggcggttagataagtctgaagttaaaggctgtggcttaaccatagtacgctttggaaactgtttaacttgagtgcaagaggggagagtggaattccatgtgtagcggtgtaatgcgtagatatatggaggaacaccggtggcgaaagcggctctctggcttgtaactgacgctgaggctcgaaagcgtggggagcaaacaggattagataccctggtagtccacgccgtaaacgatgagtgctaggtgttagaccctttccggggtttagtgccgtagctaacgcattaagcactccgcctggggagtacgaccgcaaggttgaaactcaaaggaattgacgggggcccgcacaagcggtggagcatgtggtttaattcgaagcaacgcgaagaaccttaccaggtcttgacatccctctgaccgctctagagatagagttttccttcgggacagaggtgacaggtggtgcatggttgtcgtcagctcgtgtcgtgagatgttgggttaagtcccgcaacgagcgcaacccctattgttagttgccatcattcagttgggcactctagcgagactgccggtaataaaccggaggaaggtggggatgacgtcaaatcatcatgccccttatgacctgggctacacacgtgctacaatggctggtacaacgagtcgcaagtcggtgacggcaagctaatctcttaaagccagtctcagttcggattgtaggctgcaactcgcctacatgaagtcggaatcgctagtaatcgcggatcagcacgccgcggtgaatacgttcccgggccttgtacacaccgcccgtcacaccgcgagagtttgtaacacccgaagtcggtgaggtaaccatttggagccagccgcctaaggtgggatagatgattggggtgaagtcgtaacaaggtagccgtatcggaaggtgcggctggatcacctcctt

SEQ ID NO: 229 - DNA, 1543 bp, artificial sequence
  >GCF_000215385.1_00848 Streptococcus_infantis_group
aatgagagtttgatcctggctcaggatgaacgctggcggcgtgcctaatacatgcaagtagaacgctgaagcttggtgcttgcaccgagcggatgagttgcgaacgggtgagtaacgcgtaggtaacctgcctggtagcgggggataactattggaaacgatagctaataccgcatgacaacagttattgcatgataactgtttaaaaggggcaattgctccactaccagatggacctgcgttgtattagctagttggtgaggtaacggctcaccaaggcgacgatacatagccgacctgagagggtgatcggccacactgggactgagacacggcccagactcctacgggaggcagcagtagggaatcttcggcaatggacggaagtctgaccgagcaacgccgcgtgagtgaagaaggttttcggatcgtaaagctctgttgtaagagaagaacgagtgtgagagtggaaagttcacactgtgacggtatcttaccagaaagggacggctaactacgtgccagcagccgcggtaatacgtaggtcccgagcgttatccggattattgggcgtaaagcgagcgcaggcggttagataagtctgaagttaaaggctgtggcttaaccatagtacgctttggaaactgtttaacttgagtgcaagaggggagagtggaattccatgtgtagcggtgaaatgcgtagatatatggaggaacaccggtggcgaaagcggctctctggcttgtaactgacgctgaggctcgaaagcgtggggagcaaacaggattagataccctggtagtccacgccgtaaacgatgagtgctaggtgttagaccctttccggggtttagtgccgtagctaacgcattaagcactccgcctggggagtacgaccgcaaggttgaaactcaaaggaattgacgggggcccgcacaagcggtggagcatgtggtttaattcgaagcaacgcgaagaaccttaccaggtcttgacatccctctgaccgctctagagatagagttttccttcgggacagaggtgacaggtggtgcatggttgtcgtcagctcgtgtcgtgagatgttgggttaagtcccgcaacgagcgcaacccctattgttagttgccatcattcagttgggcactctagcgagactgccggtaataaaccggaggaaggtggggatgacgtcaaatcatcatgccccttatgacctgggctacacacgtgctacaatggctggtacaacgagtcgcaagtcggtgacggcaagctaatctcttaaagccagtctcagttcggattgtaggctgcaactcgcctacatgaagtcggaatcgctagtaatcgcggatcagcacgccgcggtgaatacgttcccgggccttgtacacaccgcccgtcacaccacgagagtttgtaacacccgaagtcggtgaggtaaccatttggagccagccgcctaaggtgggatagatgattggggtgaagtcgtaacaaggtagccgtatcggaaggtgcggctggatcaccacctt

SEQ ID NO: 230 - DNA, 1544 bp, artificial sequence
  >GCF_000215385.1_01685 Streptococcus_infantis_group
aatgagagtttgatcctggctcaggatgaacgctggcggcgtgcctaatacatgcaagtagaacgctgaagcttggtgcttgcaccgagcggatgagttgcgaacgggtgagtaacgcgtaggtaacctgcctggtagcgggggataactattggaaacgatagctaataccgcatgacaacagttattgcatgataactgtttaaaaggggcaattgctccactaccagatggacctgcgttgtattagctagttggtgaggtaacggctcaccaaggcgacgatacatagccgacctgagagggtgatcggccacactgggactgagacacggcccagactcctacgggaggcagcagtagggaatcttcggcaatggacggaagtctgaccgagcaacgccgcgtgagtgaagaaggttttcggatcgtaaagctctgttgtaagagaagaacgagtgtgagagtggaaagttcacactgtgacggtatcttaccagaaagggacggctaactacgtgccagcagccgcggtaatacgtaggtcccgagcgttatccggatttattgggcgtaaagcgagcgcaggcggttagataagtctgaagttaaaggctgtggcttaaccatagtacgctttggaaactgtttaacttgagtgcaagaggggagagtggaattccatgtgtagcggtgaaatgcgtagatatatggaggaacaccggtggcgaaagcggctctctggcttgtaactgacgctgaggctcgaaagcgtggggagcaaacaggattagataccctggtagtccacgccgtaaacgatgagtgctaggtgttagaccctttccggggtttagtgccgtagctaacgcattaagcactccgcctggggagtacgaccgcaaggttgaaactcaaaggaattgacgggggcccgcacaagcggtggagcatgtggtttaattcgaagcaacgcgaagaaccttaccaggtcttgacatccctctgaccgctctagagatagagttttccttcgggacagaggtgacaggtggtgcatggttgtcgtcagctcgtgtcgtgagatgttgggttaagtcccgcaacgagcgcaacccctattgttagttgccatcattcagttgggcactctagcgagactgccggtaataaaccggaggaaggtggggatgacgtcaaatcatcatgccccttatgacctgggctacacacgtgctacaatggctggtacaacgagtcgcaagtcggtgacggcaagctaatctcttaaagccagtctcagttcggattgtaggctgcaactcgcctacatgaagtcggaatcgctagtaatcgcggatcagcacgccgcggtgaatacgttcccgggccttgtacacaccgcccgtcacaccacgagagtttgtaacacccgaagtcggtgaggtaaccatttggagccagccgcctaaggtgggatagatgattggggtgaagtcgtaacaaggtagccgtatcggaaggtgcggctggatcacctcctt

SEQ ID NO: 231 - DNA, 1541 bp, artificial sequence
  >GCF_000220065.1_00775 Streptococcus_gordonii
aatgagagtttgatcctggctcaggacgaacgctggcggcgtgcctaatacatgcaagtagaacgctgaaggaggagcttgctcttctggaagagttgcgaacgggtgagtaacgcgtaggtaacctgcctggtagcgggggataactattggaaacgatagctaataccgcataagattgaaaatcgcatgataattgattaaaagatgcaattgcatcactaccagatggacctgcgttgtattagctagtaggtgaggtaacggctcacctaggcgacgatacatagccgacctgagagggtgatcggccacactgggactgagacacggcccagactcctacgggaggcagcagtagggaatcttcggcaatgggggcaaccctgaccgagcaacgccgcgtgagtgaagaaggttttcggatcgtaaagctctgttgtaagagaagaacgagtgtgagagtggaaagttcacactgtgacggtatcttaccagaaagggacggctaactacgtgccagcagccgcggtaatacgtaggtcccgagcgttgtccggatttattgggcgtaaagcgagcgcaggcggttagataagtctgaagttaaaggctgtggcttaaccatagtacgctttggaaactgtttaacttgagtgcagaaggggagagtggaattccatgtgtagcggtgaaatgcgtagatatatggaggaacaccggtggcgaaagcggctctctggtctgtaactgacgctgaggctcgaaagcgtggggagcgaacaggattagataccctggtagtccacgccgtaaacgatgagtgctaggtgttaggccctttccggggcttagtgccggagctaacgcattaagcactccgcctggggagtacgaccgcaaggttgaaactcaaaggaattgacgggggcccgcacaagcggtggagcatgtggtttaattcgaagcaacgcgaagaaccttaccaggtcttgacatcccgatgcccgctctagagatagagttttacttcggtacatcggtgacaggtggtgcatggttgtcgtcagctcgtgtcgtgagatgttgggttaagtcccgcaacgagcgcaacccctattgttagttgccatcattaagttgggcactctagcgagactgccggtaataaaccggaggaaggtggggatgacgtcaaatcatcatgccccttatgacctgggctacacacgtgctacaatggctggtacaacgagtcgcaagtcggtgacgacaagctaatctcttaaagccagtctcagttcggattgtaggctgcaactcgcctacatgaagtcggaatcgctagtaatcgcggatcagcacgccgcggtgaatacgttcccgggccttgtacacaccgcccgtcacaccacgagagtttgtaacacccgaagtcggtgaggtaaccttttaggagccagccgcctaagggatagatgattggggtgaagtcgtaacaaggtagccgtatcggaaggtgcggctggatcacctccttt

SEQ ID NO: 232 - DNA, 1544 bp, artificial sequence
  >GCF_000220065.1_01205 Streptococcus_gordonii
aatgagagtttgatcctggctcaggacgaacgctggcggcgtgcctaatacatgcaagtagaacgctgaaggaggagcttgctcttctggaagagttgcgaacgggtgagtaacgcgtaggtaacctgcctggtagcgggggataactattggaaacgatagctaataccgcataagattgaaaatcgcatgataattgattaaaagatgcaattgcatcactaccagatggacctgcgttgtattagctagtaggtgaggtaacggctcacctaggcgacgatacatagccgacctgagagggtgatcggccacactgggactgagacacggcccagactcctacgggaggcagcagtagggaatcttcggcaatgggggcaaccctgaccgagcaacgccgcgtgagtgaagaaggttttcggatcgtaaagctctgttgtaagagaagaacgagtgtgagagtggaaagttcacactgtgacggtatcttaccagaaagggacggctaactacgtgccagcagccgcggtaatacgtaggtcccgagcgttgtccggatttattgggcgtaaagcgagcgcaggcggttagataagtctgaagttaaaggctgtggcttaaccatagtacgctttggaaactgtttaacttgagtgcagaaggggagagtggaattccatgtgtagcggtgaaatgcgtagatatatggaggaacaccggtggcgaaagcggctctctggtctgtaactgacgctgaggctcgaaagcgtggggagcgaacaggattagataccctggtagtccacgccgtaaacgatgagtgctaggtgttaggccctttccggggcttagtgccggagctaacgcattaagcactccgcctggggagtacgaccgcaaggttgaactcgaaaggaattgactggggcccacacaagcggtggatcatgtggttttaattcaagcaacgacgaagaccttaccagggcctgacctcccgatgcccgctcaaaatgaaaaagttttacttccgtaacaccgatgaaaggtggtgcatggttgtcgtcagctcgtgtcgtgagatgttgggttaagtcccgcaacgagcgcaacccctattgttagttgccatcattaagttgggcactctagcgagactgccggtaataaaccggaggaaggtggggatgacgtcaaatcatcatgccccttatgacctggggctacacacgtgctacaatggctggtacaacgagtcgcaagtcggtgacgacaagctaatctcttaaagccagtctcagttcggattgtaggctgcaactcgcctacatgaagtcggaatcgctagtaatcgcggatcagcacgccgcggtgaatacgttcccgggccttgtacacaccgcccgtcacaccacgagagtttgtaacacccgaagtcggtgaggtaaccttttaggagccagccgcctaagggatagatgattggggtgaagtcgtaacaaggtagccgtatcggaaggtgcggctggatcacctccttt

SEQ ID NO: 233 - DNA, 1544 bp, artificial sequence
  >GCF_000220065.1_01324 Streptococcus_gordonii
aatgagagtttgatcctggctcaggacgaacgctggcggcgtgcctaatacatgcaagtagaacgctgaaggaggagcttgctcttctggaagagttgcgaacgggtgagtaacgcgtaggtaacctgcctggtagcgggggataactattggaaacgatagctaataccgcataagattgaaaatcgcatgataattgattaaaagatgcaattgcatcactaccagatggacctgcgttgtattagctagtaggtgaggtaacggctcacctaggcgacgatacatagccgacctgagagggtgatcggccacactgggactgagacacggcccagactcctacgggaggcagcagtagggaatcttcggcaatgggggcaaccctgaccgagcaacgccgcgtgagtgaagaaggttttcggatcgtaaagctctgttgtaagagaagaacgagtgtgagagtggaaagttcacactgtgacggtatcttaccagaaagggacggctaactacgtgccagcagccgcggtaatacgtaggtcccgagcgttgtccggatttattgggcgtaaagcgagcgcaggcggttagataagtctgaagttaaaggctgtggcttaaccatagtacgctttggaaactgtttaacttgagtgcagaaggggagagtggaattccatgtgtagcggtgaaatgcgtagatatatggaggaacaccggtggcgaaagcggctctctggtctgtaactgacgctgaggctcgaaagcgtggggagcgaacaggattagataccctggtagtccacgccgtaaacgatgagtgctaggtgttaggccctttccggggcttagtgccggagctaacgcattaagcactccgcctggggagtacgaccgcaaggttgaaactcaaaggaattgacgggggcccgcacaagcggtggagcatgtggtttaattcgaagcaacgcgaagaaccttaccaggtcttgacatcccgatgcccgctctagagatagagttttacttcggtacatcggtgacaggtggtgcatggttgtcgtcagctcgtgtcgtgagatgttgggttaagtcccgcaacgagcgcaacccctattgttagttgccatcattaagttgggcactctagcgagactgccggtaataaaccggaggaaggtggggatgacgtcaaatcatcatgccccttatgacctgggctacacacgtgctacaatggctggtacaacgagtcgcaagtcggtgacgacaagctaatctcttaaagccagtctcagttcggattgtaggctgcaactcgcctacatgaagtcggaatcgctagtaatcgcggatcagcacgccgcggtgaatacgttcccgggccttgtacacaccgcccgtcacaccacgagagtttgtaacacccgaagtcggtgaggtaaccttttaggagccagccgcctaaggtgggatagatgattggggtgaagtcgtaacaaggtagccgtatcggaaggtgcggctggatcacctccttt

SEQ ID NO: 234 - DNA, 1542 bp, artificial sequence
  >GCF_000222725.1_00886 Streptococcus_parasanguinis
aatgagagtttgatcctggctcaggatgaacgctggcggcgtgcctaatacatgcaagtagaacgctgaaggaggagcttgctcttctggaagagttgcgaacgggtgagtaacgcgtaggtaacctgcctcttagcgggggataactattggaaacgatagctaataccgcataaaagtcgacattgcatgatgttgacttgaaaggtgcaattgcatcactaagagatggacctgcgttgtattagctagttggtgaggtaacggctcaccaaggcgacgatacatagccgacctgagagggtgatcggccacactgggactgagacacggcccagactcctacgggaggcagcagtagggaatcttcggcaatgggggcaaccctgaccgagcaacgccgcgtgagtgaagaaggttttcggatcgtaaagctctgttgtaagagaagaacgagtgtgagagtggaaagttcacgctgtgacggtatcttaccagaaagggacggctaactacgtgccagcagccgcggtaatacgtaggtcccgagcgttatccggatttattgggcgtaaagcgagcgcaggcggttagataagtctgaagttaaaggctgtggcttaaccatagtacgctttggaaactgtttaacttgagtgcagaaggggagagtggaattccatgtgtagcggtgaaatgcgtagatatatggaggaacaccggtggcgaaagcggctctctggtctgtaactgacgctgaggctcgaaagcgtggggagcaaacaggattagataccctggtagtccacgccgtaaacgatgagtgctaggtgttgggtcctttccgggactcagtgccgcagctaacgcattaagcactccgcctggggagtacgaccgcaaggttgaaactcaaaggaattgacgggggcccgcacaagcggtggagcatgtggtttaattcgaagcaacgcgaagaaccttaccaggtcttgacatccctctgaccgctctagagatagagttttccttcgggacagaggtgacaggtggtgcatggttgtcgtcagctcgtgtcgtgagatgttgggttaagtcccgcaacgagcgcaacccctattgttagttgccatcattgagttgggcactctagcgagactgccggtaataaaccggaggaaggtggggatgacgtcaaatcatcatgccccttatgacctgggctacacacgtgctacaatggctggtacaacgagtcgcgagtcggtgacggcaagctaatctcttaaagccagtctcagttcggattgtaggctgcaactcgcctacatgaagtcggaatcgctagtaatcgcggatcagcacgccgcggtgaatacgttcccgggccttgtacacaccgcccgtcacaccacgagagtttgtaacacccgaagtcggtgaggtaaccatttggagccagccgcctaaggtgggatagatgattggggtgaagtcgtaacaaggtagccgtatcggaaggtgcggctggatcacctcctt

SEQ ID NO: 235 - DNA, 1543 bp, artificial sequence
  >GCF_000222725.1_00976 Streptococcus_parasanguinis
taatgagagtttgatcctggctcaggatgaacgctggcggcgtgcctaatacatgcaagtagaacgctgaaggaggagcttgctcttctggaagagttgcgaacgggtgagtaacgcgtaggtaacctgcctcttagcgggggataactattggaaacgatagctaataccgcataaaagtcgacattgcatgatgttgacttgaaaggtgcaactgcatcactaagagatggacctgcgttgtattagctagttggtgaggtaacggctcaccaaggcgacgatacatagccgacctgagagggtgatcggccacactgggactgagacacggcccagactcctacgggaggcagcagtagggaatcttcggcaatgggggcaaccctgaccgagcaacgccgcgtgagtgaagaaggttttcggatcgtaaagctctgttgtaagagaagaacgagtgtgagagtggaaagttcacgctgtgacggtatcttaccagaaagggacggctaactacgtgccagcagccgcggtaatacgtaggtcccgagcgttatccggatttattgggcgtaaagcgagcgcaggcggttagataagtctgaagttaaaggctgtggcttaaccatagtacgctttggaaactgtttaacttgagtgcagaaggggagagtggaattccatgtgtagcggtgaaatgcgtagatatatggaggaacaccggtggcgaaagcggctctctggtctgtaactgacgctgaggctcgaaagcgtggggagcaaacaggattagataccctggtagtccacgccgtaaacgatgagtgctaggtgttgggtcctttccgggactcagtgccgcagctaacgcattaagcactccgcctggggagtacgaccgcaaggttgaaactcaaaggaattgacgggggcccgcacaagcggtggagcatgtggtttaattcgaagcaacgcgaagaaccttaccaggtcttgacatccctctgaccgctctagagatagagttttccttcgggacagaggtgacaggtggtgcatggttgtcgtcagctcgtgtcgtgagatgttgggttaagtcccgcaacgagcgcaacccctattgttagttgccatcattgagttgggcactctagcgagactgccggtaataaaccggaggaaggtggggatgacgtcaaatcatcatgccccttatgacctgggctacacacgtgctacaatggctggtacaacgagtcgcgagtcggtgacggcaagctaatctcttaaagccagtctcagttcggattgtaggctgcaactcgcctacatgaagtcggaatcgctagtaatcgcggatcagcacgccgcggtgaatacgttcccgggccttgtacacaccgcccgtcacaccacgagagtttgtaacacccgaagtcggtgaggtaaccatttggagccagccgcctaaggtgggatagatgattggggtgaagtcgtaacaaggtagccgtatcggaaggtgcggctggatcacctcctt

SEQ ID NO: 236 - DNA, 1543 bp, artificial sequence
  >GCF_000222725.1_01548 Streptococcus_parasanguinis
aatgagagtttgatcctggctcaggatgaacgctggcggcgtgcctaatacatgcaagtagaacgctgaaggaggagcttgctcttctggaagagttgcgaacgggtgagtaacgcgtaggtaacctgcctcttagcgggggataactattggaaacgatagctaataccgcataaaagtcgacattgcatgatgttgacttgaaaggtgcaattgcatcactaagagatggacctgcgttgtattagctagttggtgaggtaacggctcaccaaggcgacgatacatagccgacctgagagggtgatcggccacactgggactgagacacggcccagactcctacgggaggcagcagtagggaatcttcggcaatgggggcaaccctgaccgagcaacgccgcgtgagtgaagaaggttttcggatcgtaaagctctgttgtaagagaagaacgagtgtgagagtggaaagttcacgctgtgacggtatcttaccagaaagggacggctaactacgtgccagcagccgcggtaatacgtaggtcccgagcgttatccggatttattgggcgtaaagcgagcgcaggcggttagataagtctgaagttaaaggctgtggcttaaccatagtacgctttggaaactgtttaacttgagtgcagaaggggagagtggaattccatgtgtagcggtgaaatgcgtagatatatggaggaacaccggtggcgaaagcggctctctggtctgtaactgacgctgaggctcgaaagcgtggggagcaaacaggattagataccctggtagtccacgccgtaaacgatgagtgctaggtgttgggtcctttccgggactcagtgccgcagctaacgcattaagcactccgcctggggagtacgaccgcaaggttgaaactcaaaggaattgacgggggcccgcacaagcggtggagcatgtggtttaattcgaagcaacgcgaagaaccttaccaggtcttgacatccctctgaccgctctagagatagagttttccttcgggacagaggtgacaggtggtgcatggttgtcgtcagctcgtgtcgtgagatgttgggttaagtcccgcaacgagcgcaacccctattgttagttgccatcattgagttgggcactctagcgagactgccggtaataaaccggaggaaggtggggatgacgtcaattcatcatgccccttatgacctgggctacacacgtgctacaatggctggtacaacgagtcgcgagtcggtgacggcaagctaatctcttaaagccagtctcagttcggattgtaggctgcaactcgcctacatgaagtcggaatcgctagtaatcgcggatcagcacgccgcggtgaatacgttcccgggccttgtacacaccgcccgtcacaccacgagagtttgtaacacccgaagtcggtgaggtaaccatttggagccagaccgcctaaggtgggatagatgattggggtgaagtcgtaacaaggtagccgtatcggaagtgcggactggatcacctcttt

SEQ ID NO: 237 - DNA, 1544 bp, artificial sequence
  >GCF_000222745.1_01577 Streptococcus_australis
aatgagagtttgatcctggctcaggatgaacgctggcggcgtgcctaatacatgcaagtagaacgctgaaggaaggagcttgctctttctggatgagttgcgaacgggtgagtaacgcgtaggtaacctgcctggtagcgggggataactattggaaacgatagctaataccgcataacagtagatgttgcatgatatctgcttgaaaggggcaattgctcactaccagatggacctgcgttgtattagctagttggtgaggtaacggctcaccaaggcgacgatacatagccgacctgagagggtgatcggccacactgggactgagacacggcccagactcctacgggaggcagcagtagggaatcttcggcaatggacggaagtctgaccgagcaacgccgcgtgagtgaagaaggttttcggatcgtaaagctctgttgtaagagaagaacgagtgtgagagtggaaagttcacactgtgacggtatcttaccagaaagggacggctaactacgtgccagcagccgcggtaatacgtaggtcccgagcgttatccggatttattgggcgtaaagcgagcgcaggcggttagataagtctgaagttaaaggctgtggcttaaccatagtacgctttggaaactgtttaacttgagtgcagaaggggagagtggaattccatgtgtagcggtgaaatgcgtagatatatggaggaacaccggtggcgaaagcggctctctggtctgtaactgacgctgaggctcgaaagcgtggggagcaaacaggattagataccctggtagtccacgccgtaaacgatgagtgctaggtgttgggtcctttccgggactcagtgccgtagctaacgcattaagcactccgcctggggagtacgaccgcaaggttgaaactcaaaggaattgacgggggcccgcacaagcggtggagcatgtggtttaattcgaagcaacgcgaagaaccttaccaggtcttgacatccctctgatcgctctagagatagagttttccttcgggacagaggtgacaggtggtgcatggttgtcgtcagctcgtgtcgtgagatgttgggttaagtcccgcaacgagcgcaacccctattgttagttgccatcattcagttgggcactctagcgagactgccggtaataaaccggaggaaggtggggatgacgtcaaatcatcatgccccttatgacctgggctacacacgtgctacaatggctggtacaacgagtcgcaagtcggtgacggcaagctaatctcttaaagccagtctcagttcggattgtaggctgcaactcgcctacatgaagtcggaatcgctagtaatcgcggatcagcacgccgcggtgaatacgttcccgggccttgtacacaccgcccgtcacaccacgagagtttgtaacacccgaagtcggtgaggtaaccttttaggagccagccgcctaaggtgggatagatgattggggtgaagtcgtaacaaggtagccgtatcggaaggtgcggctggatcacctcctt

SEQ ID NO: 238 - DNA, 1545 bp, artificial sequence
  >GCF_000222745.1_01657 Streptococcus_australis
aatgagagtttgatcctggctcaggatgaacgctggcggcgtgcctaatacatgcaagtagaacgctgaaggaaggagcttgctctttctggatgagttgcgaacgggtgagtaacgcgtaggtaacctgcctggtagcgggggataactattggaaacgatagctaataccgcataacagtagatgttgcatgatatctgcttgaaaggggcaattgctccactaccagatggacctgcgttgtattagctagttggtgaggtaacggctcaccaaggcgacgatacatagccgacctgagagggtgatcggccacactgggactgagacacggcccagactcctacgggaggcagcagtagggaatcttcggcaatggacggaagtctgaccgagcaacgccgcgtgagtgaggaaggttttcggatcgtaaagctctgttgtaagagaagaacgagtgtgagagtggaaagttcacactgtgacggtatcttaccagaaagggacggctaactacgtgccagcagccgcggtaatacgtaggtcccgagcgttatccggatttattgggcgtaaagcgagcgcaggcggttagataagtctgaagttaaaggctgtggcttaaccatagtacgctttggaaactgtttaacttgagtgcagaaggggagagtggaattccatgtgtagcggtgaaatgcgtagatatatggaggaacaccggtggcgaaagcggctctctggtctgtaactgacgctgaggctcgaaagcgtggggagcaaacaggattagataccctggtagtccacgccgtaaacgatgagtgctaggtgttgggtcctttccgggactcagtgccgtagctaacgcattaagcactccgcctggggagtacgaccgcaaggttgaaactcaaaggaattgacgggggcccgcacaagcggtggagcatgtggtttaattcgaagcaacgcgaagaaccttaccaggtcttgacatccctctgatcgctctagagatagagttttccttcgggacagaggtgacaggtggtgcatggttgtcgtcagctcgtgtcgtgagatgttgggttaagtcccgcaacgagcgcaacccctattgttagttgccatcattcagttgggcactctagcgagactgccggtaataaaccggaggaaggtggggatgacgtcaaatcatcatgccccttatgacctgggctacacacgtgctacaatggctggtacaacgagtcgcaagtcggtgacggcaagctaatctcttaaagccagtctcagttcggattgtaggctgcaactcgcctacatgaagtcggaatcgctagtaatcgcggatcagcacgccgcggtgaatacgttcccgggccttgtacacaccgcccgtcacaccacgagagtttgtaacacccgaagtcggtgaggtaaccttttaggagccagccgcctaaggtgggatagatgattggggtgaagtcgtaacaaggtagccgtatcggaaggtgcggctggatcacctcctt

SEQ ID NO: 239 - DNA, 1545 bp, artificial sequence
  >GCF_000223255.1_00292 Streptococcus_infantis_group
aatgagagtttgatcctggctcaggacgaacgctggcggcgtgcctaatacatgcaagtagaacgctgaagcttggtgcttgcaccgagcggatgagttgcgaacgggtgagtaacgcgtaggtaacctgcctggtagcgggggataactattggaaacgatagctaataccgcataacagtagatatcgcatgatatgtgcttgaaaggtgcaattgcatcactaccagatggacctgcgttgtattagctagttggtgaggtaacggctcaccaaggcaacgatacatagccgacctgagagggtgatcggccacactgggactgagacacggcccagactcctacgggaggcagcagtagggaatcttcggcaatggacggaagtctgaccgagcaacgccgcgtgagtgaagaaggttttcggatcgtaaagctctgttgtaagagaagaacgagtgtgagagtggaaagttcacactgtgacggtatcttaccagaaagggacggctaactacgtgccagcagccgcggtaatacgtaggtcccgagcgttgtccggatttattgggcgtaaagcgagcgcaggcggttagataagtctgaagttaaaggctgtggcttaaccatagtacgctttggaaactgtttaacttgagtgcaagaggggagagtggaattccatgtgtagcggtgaaatgcgtagatatatggaggaacaccggtggcgaaagcggctctctggcttgtaactgacgctgaggctcgaaagcgtggggagcaaacaggattagataccctggtagtccacgccgtaaacgatgagtgctaggtgttagaccctttccggggtttagtgccgtagctaacgcattaagcactccgcctggggagtacgaccgcaaggttgaaactcaaaggaattgacgggggcccgcacaagcggtggagcatgtggtttaattcgaagcaacgcgaagaaccttaccaggtcttgacatccctctgaccgctctagagatagagttttccttcgggacagaggtgacaggtggtgcatggttgtcgtcagctcgtgtcgtgagatgttgggttaagtcccgcaacgagcgcaacccctattgttagttgccatcattcagttgggcactctagcgagactgccggtaataaaccggaggaaggtggggatgacgtcaaatcatcatgccccttatgacctgggctacacacgtgctacaatggttggtacaacgagtcgcaagtcggtgacggcaagctaatctcttaaagccaatctcagttcggattgtaggctgcaactcgcctacatgaagtcggaatcgctagtaatcgcggatcagcacgccgcggtgaatacgttcccgggccttgtacacaccgcccgtcacaccacgagagtttgtaacacccgaagtcggtgaggtaaccttttaggagccagccgcctaaggtgggatagatgattggggtgaagtcgtaacaaggtagccgtatcggaaggtgcggctggatcacctcctt

SEQ ID NO: 240 - DNA, 1545 bp, artificial sequence
  >GCF_000223255.1_01634 Streptococcus_infantis_group
aatgagagtttgatcctggctcaggacgaacgctggcggcgtgcctaatacatgcaagtagaacgctgaagcttggtgcttgcaccgagcggatgagttgcgaacgggtgagtaacgcgtaggtaacctgcctggtagcgggggataactattggaaacgatagctaataccgcataacagtagatatcgcatgatatgtgcttgaaaggtgcaattgcatcactaccagatggacctgcgttgtattagctagttggtgaggtaacggctcaccaaggcaacgatacatagccgacctgagagggtgatcggccacactgggactgagacacggcccagactcctacgggaggcagcagtagggaatcttcggcaatggacggaagtctgaccgagcaacgccgcgtgagtgaagaaggttttcggatcgtaaagctctgttgtaagagaagaacgagtgtgagagtggaaagttcacactgtgacggtatcttaccagaaagggacggctaactacgtgccagcagccgcggtaatacgtaggtcccgagcgttgtccggatttattgggcgtaaagcgagcgcaggcggttagataagtctgaagttaaaggctgtggcttaaccatagtacgctttggaaactgtttaacttgagtgcaagaggggagagtggaattccatgtgtagcggtgaaatgcgtagatatatggaggaacaccggtggcgaaagcggctctctggcttgtaactgacgctgaggctcgaaagcgtggggagcaaacaggattagataccctggtagtccacgccgtaaacgatgagtgctaggtgttagaccctttccggggtttagtgccgtagctaacgcattaagcactccgcctggggagtacgaccgcaaggttgaaactcaaaggaattgacgggggcccgcacaagcggtggagcatgtggtttaattcgaagcaacgcgaagaaccttaccaggtcttgacatccctctgaccgctctagagatagagttttccttcgggacagaggtgacaggtggtgcatggttgtcgtcagctcgtgtcgtgagatgttgggttaagtcccgcaacgagcgcaacccctattgttagttgccatcattcagttgggcactctagcgagactgccggtaataaaccggaggaaggtggggatgacgtcaaatcatcatgccccttatgacctgggctacacacgtgctacaatggttggtacaacgagtcgcaagccggtgacggcaagctaatctcttaaagccaatctcagttcggattgtaggctgcaactcgcctacaggaagtcggaatcgctagtaatcgcggatcagcacgccgcggtgaatacgttcccgggccttgtacacaccgcccgtcacaccacgagagtttgtaacacccgaagtcggtgaggtaaccttttaggagccagccgcctaaggtgggatagatgattggggtgaagtcgtaacaaggtagccgtatcggaaggtgcggctggatcacctcctt

SEQ ID NO: 241 - DNA, 1545 bp, artificial sequence
  >GCF_000223335.1_00016 Streptococcus_infantis_group
aatgagagtttgatcctggctcaggacgaacgctggcggcgtgcctaatacatgcaagtagaacgctgaaggaaggagcttgctctttccggatgagttgcgaacgggtgagtaacgcgtaggtaacctgcctggtagcgggggataactattggaaacgatagctaataccgcataacagtagatatcgcatgatagctgcttgaaaggtgcaaatgcaccactaccagatggacctgcgttgtattagctagttggtgaggtaacggctcaccaaggcaacgatacatagccgacctgagagggtgatcggccacactgggactgagacacggcccagactcctacgggaggcagcagtagggaatcttcggcaatggacggaagtctgaccgagcaacgccgcgtgagtgaagaaggttttcggatcgtaaagctctgttgtaagagaagaacgagtgtgagagtggaaagttcacactgtgacggtatcttaccagaaagggacggctaactacgtgccagcagccgcggtaatacgtaggtcccgagcgttgtccggatttattgggcgtaaagcgagcgcaggcggttagataagtctgaagttaaaggctgtggcttaaccatagtacgctttggaaactgtttaacttgagtgcaagaggggagagtggaattccatgtgtagcggtgaaatgcgtagatatatggaggaacaccggtggcgaaagcggctctctggcttgtaactgacgctgaggctcgaaagcgtggggagcaaacaggattagataccctggtagtccacgccgtaaacgatgagtgctaggtgttagaccctttccggggtttagtgccgtagctaacgcattaagcactccgcctggggagtacgaccgcaaggttgaaactcaaaggaattgacgggggcccgcacaagcggtggagcatgtggtttaattcgaagcaacgcgaagaaccttaccaggtcttgacatccctctgaccgctctagagatagagttttccttcgggacagaggtgacaggtggtgcatggttgtcgtcagctcgtgtcgtgagatgttgggttaagtcccgcaacgagcgcaacccctattgttagttgccatcattgagttgggcactctagcgagactgccggtaataaaccggaggaaggtggggatgacgtcaaatcatcatgccccttatgacctgggctacacacgtgctacaatggttggtacaacgagtcgcaagccggtgacggcaagctaatctcttaaagccaatctcagttcggattgtaggctgcaactcgcctacatgaagtcggaatcgctagtaatcgcggatcagcacgccgcggtgaatacgttcccgggccttgtacacaccgcccgtcacaccacgagagtttgtaacacccgaagtcggtgaggtaaccttttaggagccagccgcctaaggtgggatagatgattggggtgaagtcgtaacaaggtagccgtatcggaaggtgcggctggatcacctcctt

SEQ ID NO: 242 - DNA, 1545 bp, artificial sequence
  >GCF_000223335.1_00652 Streptococcus_infantis_group
aatgagagtttgatcctggctcaggacgaacgctggcggcgtgcctaatacatgcaagtagaacgctgaaggagggagcttgctctttccggatgagttgcgaacgggtgagtaacgcgtaggtaacctgcctggtagcgggggataactattggaaacgatagctaataccgcataacagtagatatcgcatgatagctgcttgaaaggtgcaattgcaccactaccagatggacctgcgttgtattagctagttggtgaggtaacggctcaccaaggcaacgatacatagccgacctgagagggtgatcggccacactgggactgagacacggcccagactcctacgggaggcagcagtagggaatcttcggcaatggacggaagtctgaccgagcaacgccgcgtgagtgaagaaggttttcggatcgtaaagctctgttgtaagagaagaacgagtgtgagagtggaaagttcacactgtgacggtatcttaccagaaagggacggctaactacgtgccagcagccgcggtaatacgtaggtcccgagcgttgtccggatttattgggcgtaaagcgagcgcaggcggttagataagtctgaagttaaaggctgtggcttaaccatagtacgctttggaaactgtttaacttgagtgcaagaggggagagtggaattccatgtgtagcggtgaaatgcgtagatatatggaggaacaccggtggcgaaagcggctctctggcttgtaactgacgctgaggctcgaaagcgtggggagcaaacaggattagataccctggtagtccacgccgtaaacgatgagtgctaggtgttagaccctttccggggtttagtgccgtagctaacgcattaagcactccgcctggggagtacgaccgcaaggttgaaactcaaaggaattgacgggggcccgcacaagcggtggagcatgtggtttaattcgaagcaacgcgaagaaccttaccaggtcttgacatccctctgaccgctctagagatagagttttccttcgggacagaggtgacaggtggtgcatggttgtcgtcagctcgtgtcgtgagatgttgggttaagtcccgcaacgagcgcaacccctattgttagttgccatcattgagttgggcactctagcgagactgccggtaataaaccggaggaaggtggggatgacgtcaaatcatcatgccccttatgacctgggctacacacgtgctacaatggttggtacaacgagtcgcaagccggtgacggcaagctaatctcttaaagccaatctcagttcggattgtaggctgcaactcgcctacatgaagtcggaatcgctagtaatcgcggatcagcacgccgcggtgaatacgttcccgggccttgtacacaccgcccgtcacaccacgagagtttgtaacacccgaagtcggtgaggtaaccttttaggagccagccgcctaaggtgggatagatgattggggtgaagtcgtaacaaggtagccgtatcggaaggtgcggctggatcacctcctt

SEQ ID NO: 243 - DNA, 1545 bp, artificial sequence
  >GCF_000223335.1_00947 Streptococcus_infantis_group
aatgagagtttgatcctggctcaggacgaacgctggcggcgtgcctaatacatgcaagtagaacgctgaaggaaggagcttgctctttccggatgagttgcgaacgggtgagtaacgcgtaggtaacctgcctggtagcgggggataactattggaaacgatagctaataccgcataacagtagatatcgcatgatagctgcttgaaaggtgcaattgcaccactaccagatggacctgcgttgtattagctagttggtgaggtaacggctcaccaaggcaacgatacatagccgacctgagagggtgatcggccacactgggactgagacacggcccagactcctacgggaggcagcagtagggaatcttcggcaatggacggaagtctgaccgagcaacgccgcgtgagtgaagaaggttttcggatcgtaaagctctgttgtaagagaagaacgagtgtgagagtggaaagttcacactgtgacggtatcttaccagaaagggacggctaactacgtgccagcagccgcggtaatacgtaggtcccgagcgttgtccggatttattgggcgtaaagcgagcgcaggcggttagataagtctgaagttaaaggctgtggcttaaccatagtacgctttggaaactgtttaacttgagtgcaagaggggagagtggaattccatgtgtagcggtgaaatgcgtagatatatggaggaacaccggtggcgaaagcggctctctggcttgtaactgacgctgaggctcgaaagcgtggggagcaaacaggattagataccctggtagtccacgccgtaaacgatgagtgctaggtgttagaccctttccggggtttagtgccgtagctaacgcattaagcactccgcctggggagtacgaccgcaaggttgaaactcaaaggaattgacgggggcccgcacaagcggtggagcatgtggtttaattcgaagcaacgcgaagaaccttaccaggtcttgacatccctctgaccgctctagagatagagttttccttcgggacagaggtgacaggtggtgcatggttgtcgtcagctcgtgtcgtgagatgttgggttaagtcccgcaacgagcgcaacccctattgttagttgccatcattgagttgggcactctagcgagactgccggtaataaaccggaggaaggtggggatgacgtcaagtcatcatgccccttatgacctgggctacacacgtgctacaatggttggtacaacgagtcgcaagccggtgacggcaagctaatctcttaaagccaatctcagttcggattgtaggctgcaactcgcctacatgaagtcggaatcgctagtaatcgcggatcagcacgccgcggtgaatacgttcccgggccttgtacacaccgcccgtcacaccacgagagtttgtaacacccgaagtcggtgaggtaaccttttaggagccagccgcctaaggtgggatagatgattggggtgaagtcgtaacaaggtagccgtatcggaaggtgcggctggatcacctcctt

SEQ ID NO: 244 - DNA, 1544 bp, artificial sequence
  >GCF_000223335.1_01047 Streptococcus_infantis_group
aatgagagtttgatcctggctcaggacgaacgctggcggcgtgcctaatacatgcaagtagaacgctgaaggaaggagcttgctctttccggatgagttgcgaacgggtgagtaacgcgtaggtaacctgcctggtagcgggggataactattggaaacgatagctaataccgcataacagtagatatcgcatgatagctgcttgaaaggtgcaattgcaccactaccagatggacctgcgttgtattagctagttggtgaggtaacggctcaccaaggcaacgatacatagccgacctgagagggtgatcggccacactgggactgagacacggcccagactcctacgggaggcagcagtagggaatcttcggcaatggacggaagtctgaccgagcaacgccgcgtgagtgaagaaggttttcggatcgtaaagctctgttgtaagagaagaacgagtgtgagagtggaaagttcacactgtgacggtatcttaccagaaagggacggctaactacgtgccagcagccgcggtaatacgtaggtcccgagcgttgtccggatttattgggcgtaaagcgagcgcaggcggttagataagtctgaagttaaaggctgtggcttaaccatagtacgctttggaaactgttaacttgagtgcaagaggggagagtggaattccatgtgtagcggtgaaatgcgtagatatatggaggaacaccggtggcgaaagcggctctctggcttgtaactgacgctgaggctcgaaagcgtggggagcaaacaggattagataccctggtagtccacgccgtaaacgatgagtgctaggtgttagaccctttccggggtttagtgccgtagctaacgcattaagcactccgcctggggagtacgaccgcaaggttgaaactcaaaggaattgacgggggcccgcacaagcggtggagcatgtggtttaattcgaagcaacgcgaagaaccttaccaggtcttgacatccctctgaccgctctagagatagagttttccttcgggacagaggtgacaggtggtgcatggttgtcgtcagctcgtgtcgtgagatgttgggttaagtcccgcaacgagcgcaacccctattgttagttgccatcattgagttgggcactctagcgagactgccggtaataaaccggaggaaggtggggatgacgtcaaatcatcatgccccttatgacctgggctacacacgtgctacaatggttggtacaacgagtcgcaagccggtgacggcaagctaatctcttaaagccaatctcagttcggattgtaggctgcaactcgcctacatgaagtcggaatcgctagtaatcgcggatcagcacgccgcggtgaatacgttcccgggccttgtacacaccgcccgtcacaccacgagagtttgtaacacccgaagtcggtgaggtaaccttttaggagccagccgcctaaggtgggatagatgattggggtgaagtcgtaacaaggtagccgtatcggaaggtgcggctggatcacctcctt

SEQ ID NO: 245 - DNA, 1546 bp, artificial sequence
  >GCF_000224635.1_03323 Desulfovibrio_fairfieldensis
tggagagtttgattctggctcagattgaacgctggcggcgtgcttaacacatgcaagtcgaacgcgaaagaggcttcggtctcgagtagagtggcgcacgggtgagtaacgcgtggataatctgccctcataatcgggataacagttggaaacggctgctaataccggatacgctctgaatgaacttttaggggaaagacggcctctgcttgcaagctgtcgtatgaggatgagtccgcgtcccattagctggttggcggggtaacggcccaccaaggcaacgatgggtagccgatctgagaggatgatcggccacactggaactgaaacacggtccagactcctacgggaggcagcagtggggaatattgcgcaatgggcgaaagcctgacgcagcgacgccgcgtgagggatgaaggttttcggatcgtaaacctctgtcagaagggaagaaagtgcgtggtgctaatcagccgcgcattgacggtaccttcaaaggaagcaccggctaactccgtgccagcagccgcggtaatacggagggtgcaagcgttaatcggaattactgggcgtaaagcgcacgtaggctgttgtgtaagtcaggggtgaaatcccacggctcaaccgtggaactgcccttgatactgcatgacttgaatccgggagagggtggcggaattccaggtgtaggagtgaaatccgtagatatctggaggaacatcagtggcgaaggcggccacctggaccggtattgacgctgaggtgcgaaagcgtggggagcaaacaggattagataccctggtagtccacgctgtaaacgatggatgctagatgtcggggagtattcttcggtgtcgtagttaacgcgttaagcatcccgcctggggagtacggtcgcaaggctgaaactcaaagaaattgacgggggcccgcacaagcggtggagtatgtggtttaattcgatgcaacgcgaagaaccttacctaggtttgacatctggggaaccctcccgaaaaggaggggtgcccttcggggagccccaagacaggtgctgcatggctgtcgtcagctcgtgtcgtgagatgttgggttaagtcccgcaacgagcgcaacccctatgcatagttgccagcaagtgaagttgggcactctatgcagactgcccgggttaaccgggaggaaggtggggacgacgtcaagtcatcatggcccttacacctagggctacacacgtactacaatggcgcgcacaaaggggagcgagaccgcgaggtggagccaatcccaaaaaacgcgtcccagtccggattgcagtctgcaactcgactgcatgaagtcggaatcgctagtaattcgagatcagcatgctcgggtgaatgcgttcccgggccttgtacacaccgcccgtcacaccacgaaagtcggttttacccgaagccggtgagccaaccatttatggaggcagccgtctacggtagggccgatgattggggtgaagtcgtaacaaggtagccgtaggggaacctgcggctggatcacctccttt

SEQ ID NO: 246 - DNA, 1526 bp, artificial sequence
  >GCF_000231235.1_01837 Rothia_mucilaginosa
acggagagtttgattctggctcaggacgaacgctggcggcgtgcttaacacatgcaagtcgaacgatgaagcctagcttgctaggtggattagtggcgaacgggtgagtaatacgtgagtaacctacctttaactctgggataagcctgggaaactgggtctaataccggatacgaccaatctccgcatggggtgttggtggaaagcgttatgtagtggttatagatgggctcacggcctatcagcttgttggtgaggtaacggctcaccaaggcgacgacgggtagccggcctgagagggtgaccggccacactgggactgagacacggcccagactcctacgggaggcagcagtggggaatattgcacaatgggcgcaagcctgatgcagcgacgccgcgtgagggatgacggccttcgggttgtaaacctctgttagcagggaagaagagaaattgacggtacctgcagagaaagcgccggctaactacgtgccagcagccgcggtaatacgtagggcgcgagcgttgtccggaattattgggcgtaaagagcttgtaggcggtttgtcgcgtctgctgtgaaaggccggggcttaactccgtgtattgcagtgggtacgggcagactagagtgcagtaggggagactggaattcctggtgtagcggtggaatgcgcagatatcaggaggaacaccgatggcgaaggcaggtctctgggctgtaactgacgctgagaagcgaaagcatggggagcgaacaggattagataccctggtagtccatgccgtaaacgttgggcactaggtgtgggggacattccacgttttccgcgccgtagctaacgcattaagtgccccgcctggggagtacggccgcaaggctaaaactcaaagaaattgacgggggcccgcacaagcggcggagcatgcggattaattcgatgcaacgcgaagaaccttaccaaggcttgacatatactggaccgcatcagagatggtgtttcccttcggggctggtatacaggtggtgcatggttgtcgtcagctcgtgtcgtgagatgttgggttaagtcccgcaacgagcgcaaccctcgttctatgttgccagcacgttatggtggggactcataggagactgccggggtcaactcggaggaaggtggggatgacgtcaaatcatcatgccccttatgtcttgggcttcacgcatgctacaatggccggtacagagggttgcgatactgtgaggtggagctaatccctaaaagccggtctcagttcggattggggtctgcaactcgaccccatgaagtcggagtcgctagtaatcgcagatcagcaacgctgcggtgaatacgttcccgggccttgtacacaccgcccgtcaagtcacgaaagttggtaacacccaaagccggtggcctaacccttcggggagggagccgtctaaggtgggattggcgattgggactaagtcgtaacaaggtagccgtaccggaaggtgcggctggatcacctccttt

SEQ ID NO: 247 - DNA, 1534 bp, artificial sequence
  >GCF_000239695.1_01902 Actinomyces_graevenitzii
tttggagagtttgatcctggctcaggacgaacgctggcggcgtgcttaacacatgcaagtcgaacgaaaataccaagcttgcttggttgattagtggcgaacgggtgagtaacacgtgagtaacctgccccttactttcctggataactgctcgaaagggtagctaatacgggatattctggccttcctgcatgggttggtttggaaaggttgtttttctggtaagggatgggctcgcggcctatcagcttgttggtggggtgatggcctaccaaggctttgacgggtagccggcctgagagggtggacggtcacactgggactgagatacggcccagactcctacgggaggcagcagtggggaatattgcacaatgggcgcaagcctgatgcagcgacgccgcgtgagggatgaaggccttcgggttgtaaacctctttcgtcagggaacaaggcactgcttttggtggtgttgagggtacctggataagaagcgccggctaactacgtgccagcagccgcggtaatacgtagggcgcaagcgttgtccggaattattgggcgtaaagagctcgtaggcggctggtcgcgtctgtcgtgaaaacttccggctcaaccgggggcttgcggtgggtacgggccggctagagtgcggtaggggtaactggaactcctggtgtagcggtggaatgcgcagatatcaggaagaacaccgatggcgaaggcaggttactgggccgttactgacgctgaggagcgaaagcgtggggagcgaacaggattagataccctggtagtccacgctgtaaacgttgggcactaggtgtgaggctcctttccgggggttttgcgccgtagctaacgcattaagtgccccgcctggggagtacggccgcaaggctaaaactcaaaggaattgacgggggcccgcacaagcggcggagcatgcggattaattcgatgcaacgcgaagaaccttaccaaggcttgacatgttaaccgtggctctagagatagggtttacccttttgggtggttttcacaggtggtgcatggttgtcgtcagctcgtgtcgtgagatgttgggttaagtcccgcaacgagcgcaacccttgtcccgtgttgccagcacgttgtggtggggactcgcgggagactgccggggtcaactcggaggaaggtggggatgacgtcaaatcatcatgccccttatgtcttgggcttcacgcatgctacaatggctggtacagagggttgcgatactgtgaggtggagctaatcccttaaagctggtctcagttcggattggtgtctgcaactcgacaccatgaaggtggagtcgctagtaatcgcagatcagcaacgctgcggtgaatacgttctcgggccttgtacacaccgcccgtcacgtcacgaaagttggcaacaccccaagcccgtggctctacggggagcggttaaaggtggggctagcgattgggacgaagtcgtaacaaggtagccgtaccggaaggtgcggctggatcacctcctt

SEQ ID NO: 248 - DNA, 1545 bp, artificial sequence
  >GCF_000260695.1_01189 Streptococcus_parasanguinis
aatgagagtttgatcctggctcaggatgaacgctggcggcgtgcctaatacatgcaagtagaacgctgaagcttggtgcttgcaccgagcggaggagttgcgaacgggtgagtaacgcgtaggtaacctgcctcttagcgggggataactattggaaacgatagctaataccgcataaaagtcgacattgcatgatgttgatttgaaaggtgcaaatgcatcactaagagatggacctgcgttgtattagctagttggtgaggtaacggctcaccaaggcgacgatacatagccgacctgagagggtgatcggccacactgggactgagacacggcccagactcctacgggaggcagcagtagggaatcttcggcaatggacggaagtctgaccgagcaacgccgcgtgagtgaagaaggttttcggatcgtaaagctctgttgtaagagaagaacgagtgtgagagtggaaagttcacactgtgacggtaacttaccagaaagggacggctaactacgtgccagcagccgcggtaatacgtaggtcccgagcgttatccggatttattgggcgtaaagcgagcgcaggcggttagataagtctgaagttaaaggctgtggcttaaccatagtacgctttggaaactgtttaacttgagtgcagaaggggagagtggaattccatgtgtagcggtgaaatgcgtagatatatggaggaacaccggtggcgaaagcggctctctggtctgtaactgacgctgaggctcgaaagcgtggggagcaaacaggattagataccctggtagtccacgccgtaaacgatgagtgctaggtgttgggtcctttccgggactcagtgccgcagctaacgcattaagcactccgcctggggagtacgaccgcaaggttgaaactcaaaggaattgacgggggcccgcacaagcggtggagcatgtggtttaattcgaagcaacgcgaagaaccttaccaggtcttgacatccctctgaccgctctagagatagagttttccttcgggacagaggtgacaggtggtgcatggttgtcgtcagctcgtgtcgtgagatgttgggttaagtcccgcaacgagcgcaacccctattgttagttgccatcatttagttgggcactctagcgagactgccggtaataaaccggaggaaggtggggatgacgtcaaatcatcatgccccttatgacctgggctacacacgtgctacaatggctggtacaacgagtcgcgagtcggtgacggcaagctaatctcttaaagccagtctcagttcggattgtaggctgcaactcgcctacatgaagtcggaatcgctagtaatcgcggatcagcacgccgcggtgaatacgttcccgggccttgtacacaccgcccgtcacaccacgagagtttgtaacacccgaagtcggtgaggtaaccttttaggagccagccgcctaaggtgggatagatgattggggtgaagtcgtaacaaggtagccgtatcggaaggtgcggctggatcacctcctt

SEQ ID NO: 249 - DNA, 1524 bp, artificial sequence
  >GCF_000273295.1_01365 Bacteroides_dorei_group
atgaagagtttgatcctggctcaggatgaacgctagctacaggcttaacacatgcaagtcgaggggcagcatggtcttagcttgctaaggccgatggcgaccggcgcacgggtgagtaacacgtatccaacctgccgtctactcttggacagccttctgaaaggaagattaatacaagatggcatcatgagttcacatgttcacatgattaaaggtattccggtagacgatggggatgcgttccattagatagtaggcggggtaacggcccacctagtcttcgatggataggggttctgagaggaaggtcccccacattggaactgagacacggtccaaactcctacgggaggcagcagtgaggaatattggtcaatgggcgagagcctgaaccagccaagtagcgtgaaggatgactgccctatgggttgtaaacttcttttataaaggaataaagtcgggtatggatacccgtttgcatgtactttatgaataaggatcggctaactccgtgccagcagccgcggtaatacggaggatccgagcgttatccggatttattgggtttaaagggagcgtagatggatgtttaagtcagttgtgaaagtttgcggctcaaccgtaaaattgcagttgatactggatatcttgagtgcagttgaggcaggcggaattcgtggtgtagcggtgaaatgcttagatatcacgaagaactccgattgcgaaggcagcctgctaagctgcaactgacattgaggctcgaaagtgtgggtatcaaacaggattagataccctggtagtccacacggtaaacgatgaatactcgctgtttgcgatatacggcaagcggccaagcgaaagcgttaagtattccacctggggagtacgccggcaacggtgaaactcaaaggaattgacgggggcccgcacaagcggaggaacatgtggtttaattcgatgatacgcgaggaaccttacccgggcttaaattgcagatgaattacggtgaaagccgtaagccgcaaggcatctgtgaaggtgctgcatggttgtcgtcagctcgtgccgtgaggtgtcggcttaagtgccataacgagcgcaacccttgttgtcagttactaacaggttctgctgaggactctgacaagactgccatcgtaagatgtgaggaaggtggggatgacgtcaaatcagcacggcccttacgtccggggctacacacgtgttacaatggggggtacagagggccgctaccacgcgagtggatgccaatcccaaaaacctctctcagttcggactggagtctgcaacccgactccacgaagctggattcgctagtaatcgcgcatcagccacggcgcggtgaatacgttcccgggccttgtacacaccgcccgtcaagccatgggagccgggggtacctgaagtgcgtaaccgcgaggagcgccctagggtaaaactggtgactggggctaagtcgtaacaaggtagccgtaccggaaggtgcggctggaacacctcctt

SEQ ID NO: 250 - DNA, 1524 bp, artificial sequence
  >GCF_000273295.1_02805 Bacteroides_dorei_group
atgaagagtttgatcctggctcaggatgaacgctagctacaggcttaacacatgcaagtcgaggggcagcatggtcttagcttgctaaggccgatggcgaccggcgcacgggtgagtaacacgtatccaacctgccgtctactcttggacagccttctgaaaggaagattaatacaagatggcatcatgagtccgcatgttcacatgattaaaggtattccggtaggcgatggggatgcgttccattagatagtaggcggggtaacggcccacctagtcttcgatggataggggttctgagaggaaggtcccccacattggaactgagacacggtccaaactcctacgggaggcagcagtgaggaatattggtcaatgggcgagagcctgaaccagccaagtagcgtgaaggatgactgccctatgggttgtaaacttcttttataaaggaataaagtcgggtatgtatacccgtttgcatgtactttatgaataaggatcggctaactccgtgccagcagccgcggtaatacggaggatccgagcgttatccggatttattgggtttaaagggagcgtagatggatgtttaagtcagttgtgaaagtttgcggctcaaccgtaaaattgcagttgatactggatatcttgagtgcagttgaggcaggcggaattcgtggtgtagcggtgaaatgcttagatatcacgaagaactccgattgcgaaggcagcctgctaagctgcaactgacattgaggctcgaaagtgtgggtatcaaacaggattagataccctggtagtccacacggtaaacgatgaatactcgctgtttgcgatatacagcaagcggccaagcgaaagcgttaagtattccacctggggagtacgccggcaacggtgaaactcaaaggaattgacgggggcccgcacaagcggaggaacatgtggtttaattcgatgatacgcgaggaaccttacccgggcttaaattgcagatgaattacggtgaaagccgtaagccgcaaggcatctgtgaaggtgctgcatggttgtcgtcagctcgtgccgtgaggtgtcggcttaagtgccataacgagcgcaacccttgttgtcagttactaacaggttctgctgaggactctgacaagactgccatcgtaagatgtgaggaaggtggggatgacgtcaaatcagcacggcccttacgtccggggctacacacgtgttacaatggggggtacagagggccgctaccacgcgagtggatgccaatcccaaaaacctctctcagttcggactggagtctgcaacccgactccacgaagctggattcgctagtaatcgcgcatcagccacggcgcggtgaatacgttcccgggccttgtacacaccgcccgtcaagccatgggagccgggggtacctgaagtgcgtaaccgcgaggagcgccctagggtaaaactggtgactggggctaagtcgtaacaaggtagccgtaccggaaggtgcggctggaacacctcctt

SEQ ID NO: 251 - DNA, 1524 bp, artificial sequence
  >GCF_000273295.1_03454 Bacteroides_dorei_group
atgaagagtttgatcctggctcaggatgaacgctagctacaggcttaacacatgcaagtcgaggggcagcatggtcttagcttgctaaggccgatggcgaccggcgcacgggtgagtaacacgtatccaacctgccgtctactcttggacagccttctgaaaggaagattaatacaagatggcatcatgagtccgcatgttcacatgattaaaggtattccggtagacgatggggatgcgttccattagatagtaggcggggtaacggcccacctagtcttcgatggataggggttctgagaggaaggtcccccacattggaactgagacacggtccaaactcctacgggaggcagcagtgaggaatattggtcaatgggcgcaggcctgaaccagccaagtagcgtgaaggatgactgccctatgggttgtaaacttcttttataaaggaataaagtcgggtatgcatacccgtttgcatgtactttatgaataaggatcggctaactccgtgccagcagccgcggtaatacggaggatccgagcgttatccggatttattgggtttaaagggagcgtagatggatgtttaagtcagttgtgaaagtttgcggctcaaccgtaaaattgcagttgatactggatatcttgagtgcagttgaggcaggcggaattcgtggtgtagcggtgaaatgcttagatatcacgaagaactccgattgcgaaggcagcctgctaagctgcaactgacattgaggctcgaaagtgtgggtatcaaacaggattagataccctggtagtccacacggtaaacgatgaatactcgctgtttgcgatatacagcaagcggccaagcgaaagcgttaagtattccacctggggagtacgccggcaacggtgaaactcaaaggaattgacgggggcccgcacaagcggaggaacatgtggtttaattcgatgatacgcgaggaaccttacccgggcttaaattgcagatgaattacggtgaaagccgtaagccgcaaggcatctgtgaaggtgctgcatggttgtcgtcagctcgtgccgtgaggtgtcggcttaagtgccataacgagcgcaacccttgttgtcagttactaacaggttccgctgaggactctgacaagactgccatcgtaagatgtgaggaaggtggggatgacgtcaaatcagcacggcccttacgtccggggctacacacgtgttacaatggggggtacagagggtcgctaccacgcgagtggatgccaatccccaaaacctctctcagttcggactggagtctgcaacccgactccacgaagctggattcgctagtaatcgcgcatcagccacggcgcggtgaatacgttcccgggccttgtacacaccgcccgtcaagccatgggagccgggggtacctgaagtgcgtaaccgcgaggagcgccctagggtaaaactggtgactggggctaagtcgtaacaaggtagccgtaccggaaggtgcggctggaacacctcctt

SEQ ID NO: 252 - DNA, 1524 bp, artificial sequence
  >GCF_000273295.1_03696 Bacteroides_dorei_group
atgaagagtttgatcctggctcaggatgaacgctagctacaggcttaacacatgcaagtcgaggggcagcatggtcttagcttgctaaggccgatggcgaccggcgcacgggtgagtaacacgtatccaacctgccgtctactcttggacagccttctgaaaggaagattaatacaagatggcatcatgagtccgcatgttcacatgattaaaggtattccggtagacgatggggatgcgttccattagatagtaggcggggtaacggcccacctagtcttcgatggataggggttctgagaggaaggtcccccacattggaactgagacacggtccaaactcctacgggaggcagcagtgaggaatattggtcaatgggcgagagcctgaaccagccaagtagcgtgaaggatgactgccctatgggttgtaaacttcttttataaaggaataaagtcgggtatggatacccgtttgcatgtactttatgaataaggatcggctaactccgtgccagcagccgcggtaatacggaggatccgagcgttatccggatttattgggtttaaagggagcgtagatggatgtttaagtcagttgtgaaagtttgcggctcaaccgtaaaattgcagttgatactggatatcttgagtgcagttgaggcaggcggaattcgtggtgtagcggtgaaatgcttagatatcacgaagaactccgattgcgaaggcagcctgctaagctgcaactgacattgaggctcgaaagtgtgggtatcaaacaggattagataccctggtagtccacacggtaaacgatgaatactcgctgtttgcgatatacagcaagcggccaagcgaaagcgttaagtattccacctggggagtacgccggcaacggtgaaactcaaaggaattgacgggggcccgcacaagcggaggaacatgtggtttaattcgatgatacgcgaggaaccttacccgggcttaaattgcagatgaattacggtgaaagccgtaagccgcaaggcatctgtgaaggtgctgcatggttgtcgtcagctcgtgccgtgaggtgtcggcttaagtgccataacgagcgcaacccttgttgtcagttactaacaggttctgctgaggactctgacaagactgccatcgtaagatgtgaggaaggtggggatgacgtcaaatcagcacggcccttacgtccggggctacacacgtgttacaatggggggtacagagggccgctaccacgcgagtggatgccaatcccaaaaacctctctcagttcggactggagtctgcaacccgactccacgaagctggattcgctagtaatcgcgcatcagccacggcgcggtgaatacgttcccgggccttgtacacaccgcccgtcaagccatgggagccgggggtacctgaagtgcgtaaccgcgaggagcgccctagggtaaaactggtgactggggctaagtcgtaacaaggtagccgtaccggaaggtgcggctggaacacctcctt

SEQ ID NO: 253 - DNA, 1544 bp, artificial sequence
  >GCF_000279535.1_00470 Streptococcus_infantis_group
aatgagagtttgatcctggctcaggacgaacgctggcggcgtgcctaatacatgcaagtagaacgctgaaggaggagcttgctctttccggatgagttgcgaacgggtgagtaacgcgtaggtaacctgcctggtagcgggggataactattggaaacgatagctaataccgcataacagtagatatcgcatgatagctgcttgaaaggtgcaattgcaccactaccagatggacctgcgttgtattagctagttggtgaggtaacggctcaccaaggccacgatacatagccgacctgagagggtgatcggccacactgggactgagacacggcccagactcctacgggaggcagcagtagggaatcttcggcaatggacggaagtctgaccgagcaacgccgcgtgagtgaggaaggttttcggatcgtaaagctctgttgtaagagaagaacgagtgtgagagtggaaagttcacactgtgacggtatcttaccagaaagggacggctaactacgtgccagcagccgcggtaatacgtaggtcccgagcgttgtccggatttattgggcgtaaagcgagcgcaggcggttagataagtctgaagttaaaggctgtggcttaaccatagtacgctttggaaactgtttaacttgagtgcaagaggggagagtggaattccatgtgtagcggtgaaatgcgtagatatatggaggaacaccggtggcgaaagcggctctctggcttgtaactgacgctgaggctcgaaagcgtggggagcaaacaggattagataccctggtagtccacgccgtaaacgatgagtgctaggtgttagaccctttccggggtttagtgccgtagctaacgcattaagcactccgcctggggagtacgaccgcaaggttgaaactcaaaggaattgacgggggcccgcacaagcggtggagcatgtggtttaattcgaagcaacgcgaagaaccttaccaggtcttgacatccctctgaccgctctagagatagagttttccttcgggacagaggtgacaggtggtgcatggttgtcgtcagctcgtgtcgtgagatgttgggttaagtcccgcaacgagcgcaacccctattgttagttgccatcattcagttgggcactctagcgagactgccggtaataaaccggaggaaggtggggatgacgtcaaatcatcatgccccttatgacctgggctacacacgtgctacaatggttggtacaacgagtcgcaagccggtgacggcaagctaatctcttaaagccaatctcagttcggattgtaggctgcaactcgcctacatgaagtcggaatcgctagtaatcgcggatcagcacgccgcggtgaatacgttcccgggccttgtacacaccgcccgtcacaccacgagagtttgtaacacccgaagtcggtgaggtaaccttttaggagccagccgcctaaggtgggatagatgattggggtgaagtcgtaacaaggtagccgtatcggaaggtgcggctggatcacctcctt

SEQ ID NO: 254 - DNA, 1541 bp, artificial sequence
  >GCF_000279535.1_00629 Streptococcus_infantis_group
aatgagagtttgatcctggctcaggacgaacgctggcggcgtgcctaatacatgcaagtagaacgctgaaggaggagcttgctcttcggatgagttgcgaacgggtgagtaacgcgtaggtaacctgcctggtagcgggggataactattggaaacgatagctaataccgcataaagtagatatcgcatgatagctgcttgaaaggtgcaattgcaccactaccagatggacctgcgttgtattagctagttggtgaggtaacggctcaccaaggcaacgatacatagccgacctgagagggtgatcggccacactgggactgagacacggcccagactcctacgggaggcagcagtagggaatcttcggcaatggacggaagtctgaccgagcaacgccgcgtgagtgaagaaggttttcggatcgtaaagctctgttgtaagagaagaacgagtgtgagagtggaaagttcacactgtgacggtatcttaccagaaagggacggctaactacgtgccagcagccgcggtaatacgtaggtcccgagcgttgtccggatttattgggcgtaaagcgagcgcaggcggttagataagtctgaagttaaaggctgtggcttaaccatagtacgctttggaaactgtttaacttgagtgcaagaggggagagtggaattccatgtgtagcggtgaaatgcgtagatatatggaggaacaccggtggcgaaagcggctctctggcttgtaactgacgctgaggctcgaaagcgtggggagcaaacaggattagataccctggtagtccacgccgtaaacgatgagtgctaggtgttagaccctttccggggtttagtgccgtagctaacgcattaagcactccgcctggggagtacgaccgcaaggttgaaactcaaaggaattgacgggggcccgcacaagcggtggagcatgtggtttaattcgaagcaacgcgaagaaccttaccaggtcttgacatccctctgaccgctctagagatagagttttccttcgggacagaggtgacaggtggtgcatggttgtcgtcagctcgtgtcgtgagatgttgggttaagtcccgcaacgagcgcaacccctattgttagttgccatcattcagttgggcactctagcgagactgccggtaataaaccggaggaaggtggggatgacgtcaaatcatcatgccccttatgacctgggctacacacgtgctacaatggttggtacaacgagtcgcaagccggtgacggcaagctaatctcttaaagccaatctcagttcggattgtaggctgcaactcgcctacatgaagtcggaatcgctagtaatcgcggatcagcacgccgcggtgaatacgttcccgggccttgtacacaccgcccgtcacaccacgagagtttgtaacacccgaagtcggtgaggtaaccttttaggagccagccgcctaaggtgggatagatgattggggtgaagtcgtaacaaggtagccgtatcggaaggtgcggctggatcacctcctt

SEQ ID NO: 255 - DNA, 1537 bp, artificial sequence
  >GCF_000282935.1_00552 Schaalia_odontolytica
tcggagagtttgatcctggctcaggacgaacgctggcggcgtgcttaacacatgcaagtcgaacgctgaagcccagcttgctgggtggatgagtggcgaacgggtgagtaacacgtgagtaacctgcccccttctttgggataacgcccggaaacgggtgctaatactggatattcactgatcttcgcatgggggttggtggaaaggttttttctggtgggggatgggctcgcggcctatcagcttgttggtggggtgatggcctaccaaggctttgacgggtagccggcctgagagggtgaccggtcacattgggactgagatacggcccagactcctacgggaggcagcagtggggaatattgcacaatgggcgaaagcctgatgcagcgacgccgcgtgagggatgacggccttcgggttgtaaacctctttcgctcatggtcaagccgcaactttgggttgtggtgagggtagtgggtaaagaagcgccggctaactacgtgccagcagccgcggtaatacgtagggcgcgagcgttgtccggaattattgggcgtaaagggcttgtaggcggttggtcgcgtctgccgtgaaatcctctggcttaactgggggcgtgcggtgggtacgggctgacttgagtgcggtaggggagactggaactcctggtgtagcggtggaatgcgcagatatcaggaagaacaccggtggcgaaggcgggtctctgggccgttactgacgctgaggagcgaaagcgtggggagcgaacaggattagataccctggtagtccacgctgtaaacgttgggcactaggtgtgggggccacccgtggtttctgcgccgtagctaacgctttaagtgccccgcctggggagtacggccgcaaggctaaaactcaaaggaattgacgggggcccgcacaagcggcggagcatgcggattaattcgatgcaacgcgaagaaccttaccaaggcttgacatgcacggcgacactgcagagatgtggtggcatttagttggtcgtgtgcaggtggtgcatggttgtcgtcagctcgtgtcgtgagatgttgggttaagtcccgcaacgagcgcaacccttgccctatgttgccagcacgtgatggtggggactcgtgggggactgccggggttaactcggaggaaggtggggatgacgtcaaatcatcatgccccttatgtcttgggcttcacgcatgctacaatggttggtacagagggttgcgaaatcgtgaggtggagcgaatcccttaaagccagtctcagttcggattggggtctgcaactcgaccccatgaaggtggagtcgctagtaatcgcagatcagcaacgctgcggtgaatacgttctcgggccttgtacacaccgcccgtcacgtcacgaaagttggtaacacccgaagcccatggcctaaccgcgtttgcggggggagtggtcgaaggtgggattggcgattgggacgaagtcgtaacaaggtagccgtaccggaaggtgcggctggatcacctccttt

SEQ ID NO: 256 - DNA, 1538 bp, artificial sequence
  >GCF_000283035.1_01227 Schaalia_sp2
tcggagagtttgatcctggctcaggacgaacgctggcggcgtgcttaacacatgcaagtcgaacgctgaagcccagcttttgttgggtggatgagtggcgaacgggtgagtaacacgtgagtaacctgccctcttctttgggataacgcccggaaacgggtgctaatactggatattcactggccttcgcatgggggttggtggaaaggttttttctggtgggggatgggctcgcggcctatcagcttgttggtggggtgatggcctaccaaggctttgacgggtagccggcctgagagggtgaccggtcacattgggactgagatacggcccagactcctacgggaggcagcagtggggaatattgcacaatgggcgaaagcctgatgcagcgacgccgcgtgagggatggaggccttcgggttgtaaacctctttcgctcatggtcaagccgcaactgtgggttgtggtgagggtagtgggtaaagaagcgccggctaactacgtgccagcagccgcggtaatacgtagggcgcgagcgttgtccggaattattgggcgtaaagggcttgtaggcggttggtcgcgtctgccgtgaaatcctctggcttaactgggggcgtgcggtgggtacgggctgacttgagtgcggtaggggagactggaactcctggtgtagcggtggaatgcgcagatatcaggaagaacaccggtggcgaaggcgggtctctgggccgttactgacgctgaggagcgaaagcgtggggagcgaacaggattagataccctggtagtccacgctgtaaacgttgggcactaggtgtgggggccacccgtggtttctgcgccgtagctaacgctttaagtgccccgcctggggagtacggccgcaaggctaaaactcaaaggaattgacgggggcccgcacaagcggcggagcatgcggattaattcgatgcaacgcgaagaaccttaccaaggcttgacatgcacggcggcactgcagagatgtggtggcatttagttggtcgtgtgcaggtggtgcatggttgtcgtcagctcgtgtcgtgagatgttgggttaagtcccgcaacgagcgcaacccttgccctatgttgccagcacgtgatggtggggactcgtgggggactgccggggttaactcggaggaaggtggggatgacgtcaaatcatcatgccccttatgtcttgggcttcacgcatgctacaatggttggtacagagggttgcgatatcgtgaggtggagcgaatcccttaaagccagtctcagttcggattggggtctgcaactcgaccccatgaaggtggagtcgctagtaatcgcagatcagcaacgctgcggtgaatacgttctcgggccttgtacacaccgcccgtcacgtcacgaaagttggtaacacccgaagcccatggcctaaccacgtttgtggggggagtggtcgaaggtgggattggcgattgggacgaagtcgtaacaaggtagccgtaccggaaggtgcggctggatcacctcctt

SEQ ID NO: 257 - DNA, 1546 bp, artificial sequence
  >GCF_000314795.2_01258 Streptococcus_parasanguinis
taatgagagtttgatcctggctcaggatgaacgctggcggcgtgcctaatacatgcaagtagaacgctgaagcttggtgcttgcaccgagcggatgagttgcgaacgggtgagtaacgcgtaggtaacctgcctggtagcgggggataactattggaaacgatagctaataccgcataacagtagatattgcatgatatctgcttgaaaggggcaattgctccactaccagatggacctgcgttgtattagctagttggtgaggtaacggctcaccaaggcgacgatacatagccgacctgagagggtgatcggccacactgggactgagacacggcccagactcctacgggaggcagcagtagggaatcttcggcaatggacggaagtctgaccgagcaacgccgcgtgagtgaagaaggttttcggatcgtaaagctctgttgtaagagaagaacgagtgtgagagtggaaagttcacactgtgacggtaacttaccagaaagggacggctaactacgtgccagcagccgcggtaatacgtaggtcccgagcgttatccggatttattgggcgtaaagcgagcgcaggcggttagataagtctgaagttaaaggctgtggcttaaccatagtacgctttggaaactgtttaacttgagtgcagaaggggagagtggaattccatgtgtagcggtgaaatgcgtagatatatggaggaacaccggtggcgaaagcggctctctggtctgtaactgacgctgaggctcgaaagcgtggggagcaaacaggattagataccctggtagtccacgccgtaaacgatgagtgctaggtgttgggtcctttccgggactcagtgccgcagctaacgcattaagcactccgcctggggagtacgaccgcaaggttgaaactcaaaggaattgacgggggcccgcacaagcggtggagcatgtggtttaattcgaagcaacgcgaagaaccttaccaggtcttgacatccctctgaccgctctagagatagagttttccttcgggacagaggtgacaggtggtgcatggttgtcgtcagctcgtgtcgtgagatgttgggttaagtcccgcaacgagcgcaacccctattgttagttgccatcattgagttgggcactctagcgagactgccggtaataaaccggaggaaggtggggatgacgtcaaatcatcatgccccttatgacctgggctacacacgtgctacaatggctgggacaacgagtcgcaagtcggtgacggcaagctaatctcttaaagccagtctcagttcggattgtaggctgcaactcgcctacatgaagtcggaatcgctagtaatcgcggatcagcacgccgcggtgaatacgttcccgggccttgtacacaccgcccgtcacaccacgagagtttgtaacacccgaagtcggtgaggtaaccttttaggagccagccgcctaaggtgggatagatgattggggtgaagtcgtaacaaggtagccgtatcggaaggggcggctgggtcaactcctt

SEQ ID NO: 258 - DNA, 1547 bp, artificial sequence
  >GCF_000314795.2_01789 Streptococcus_parasanguinis
taatgagagtttgatcctggctcaggatgaacgctggcggcgtgcctaatacatgcaagtagaacgctgaagcttggtgcttgcaccgagcggatgagttgcgaacgggtgagtaacgcgtaggtaacctgcctggtagcgggggataactattggaaacgatagctaataccgcataacagtagatattgcatgatatctgcttgaaaggggcaattgctccactaccagatggacctgcgttgtattagctagttggtgaggtaacggctcaccaaggcgacgatacatagccgacctgagagggtgatcggccacactgggactgagacacggcccagactcctacgggaggcagcagtagggaatcttcggcaatggacggaagtctgaccgagcaacgccgcgtgagtgaagaaggttttcggatcgtaaagctctgttgtaagagaagaacgagtgtgagagtggaaagttcacactgtgacggtaacttaccagaaagggacggctaactacgtgccagcagccgcggtaatacgtaggtcccgagcgttatccggatttattgggcgtaaagcgagcgcaggcggttagataagtctgaagttaaaggctgtggcttaaccatagtacgctttggaaactgtttaacttgagtgcagaaggggagagtggaattccatgtgtagcggtgaaatgcgtagatatatggaggaacaccggtggcgaaagcggctctctggtctgtaactgacgctgaggctcgaaagcgtggggagcaaacaggattagataccctggtagtccacgccgtaaacgatgagtgctaggtgttgggtcctttccgggactcagtgccgcagctaacgcattaagcactccgcctggggagtacgaccgcaaggttgaaactcaaaggaattgacgggggcccgcacaagcggtggagcatgtggtttaattcgaagcaacgcgaagaaccttaccaggtcttgacatccctctgaccgctctagagatagagttttccttcgggacagaggtgacaggtggtgcatggttgtcgtcagctcgtgtcgtgagatgttgggttaagtcccgcaacgagcgcaacccctattgttagttgccatcattgagttgggcactctagcgagactgccggtaataaaccggaggaaggtggggatgacgtcaaatcatcatgccccttatgacctgggctacacacgtgctacaatggctgggacaacgagtcgcaagtcggtgacggcaagctaatctcttaaagccagtctcagttcggattgtaggctgcaactcgcctacatgaagtcggaatcgctagtaatcgcggatcagcacgccgcggtgaatacgttcccgggccttgtacacaccgcccgtcacaccacgagagtttgtaacacccgaagtcggtgaggtaaccttttaggagccagccgcctaaggtgggatagatgattggggtgaagtcgtaacaaggtagccgtatcggaaggtgcggctggatcacctccttt

SEQ ID NO: 259 - DNA, 1336 bp, artificial sequence
  >GCF_000318135.1_00026 Corynebacterium_durum
gcgaacgggtgagtaacacgtgggtgatctgccccgcactgtgggataagcctgggaaactgggtctaataccacatacgaccatggcgtaggggtcatggtggaaagcttttgcggtgtgggatgagcccgcggcctatcagcttgttggtggggtaatggcctaccaaggcggcgacgggtagccggcctgagagggtggacggccacattgggactgagacacggcccagactcctacgggaggcagcagtggggaatattgcacaatgggcgcaagcctgatgcagcgacgccgcgtgggggatgacggccttcgggttgtaaactcctttcgcccgggacgaagcccacctggtgggtgacggtaccgtggagaagaagcaccggctaactacgtgccagcagccgcggtaatacgtagggtgcaagcgttgtccggatttactgggcgtaaagagctcgtaggtggtgtgtcgcgtcgtctgtgaaattccggggcttaactccgggcgtgcaggcgatacgggcacgactagagtgctgtaggggtaactggaattcctggtgtagcggtgaaatgcgcagatatcaggaggaacaccgatggcgaaggcaggttactgggcagttactgacgctgaggagcgaaagcatggggagcgaacaggattagataccctggtagtccatgctgtaaacggtgggcgctaggtgtgggctgtgtgtttgcagtctgtgccgtagctaacgcattaagcgccccgcctggggagtacggccgcaaggctaaaactcaaaggaattgacgggggcccgcacaagcggcggagcatgtggattaattcgatgcaacgcgaagaaccttacctgggtttgacatgcaccagatcggcgtagagatacgtcttcccttgtggttggtgcacaggtggtgcatggttgtcgtcagctcgtgtcgtgagatgttgggttaagtcccgcaacgagcgcaacccttgtcttatgttgccagcacatttttggtggggactcatgagaaactgccggggtcaactcggaggaaggtggggatgacgtcaaatcatcatgccctttatacccagggcttcacacatgctacaatggtcggtacaacgggttgcgacactgtgaagtgaagctaatctcttaaagccggcctcagttcggattggggtctgcaactcgaccccatgaagtcggagtcgctagtaatcgcagatcagcaacgctgcggtgaatacgttcccgggccttgtacacaccgcccgtcacgtcatgaaagttggtaacacccgaagcccatggcctaacc

SEQ ID NO: 260 - DNA, 1524 bp, artificial sequence
  >GCF_000403235.1_01185 Bacteroides_dorei_group
atgaagagtttgatcctggctcaggatgaacgctagctacaggcttaacacatgcaagtcgaggggcagcatggtcttagcttgctaaggccaatggcgaccggcgcacgggtgagtaacacgtatccaacctgccgtctactcttggacagccttctgaaaggaagattaatacaagatggcatcatgagtccacatgttcacatgattaaaggtattccggtagacgatggggatgcgttccattagatagtaggcggggtaacggcccacctagtcttcgatggataggggttctgagaggaaggtcccccacattggaactgagacacggtccaaactcctacgggaggcagcagtgaggaatattggtcaatgggcgagagcctgaaccagccaagtagcgtgaaggatgactgccctatgggttgtaaacttcttttataaaggaataaagtcgggtatgcatacccgtttgcatgtactttatgaataaggatcggctaactccgtgccagcagccgcggtaatacggaggatccgagcgttatccggatttattgggtttaaagggagcgtagatggatgtttaagtcagttgtgaaagtttgcggctcaaccgtaaaattgcagttgatactggatatcttgagtgcagttgaggcaggcggaattcgtggtgtagcggtgaaatgcttagatatcacgaagaactccgattgcgaaggcagcctgctaagctgcaactgacattgaggctcgaaagtgtgggtatcaaacaggattagataccctggtagtccacacggtaaacgatgaatactcgctgtttgcgatatacggcaagcggccaagcgaaagcgttaagtattccacctggggagtacgccggcaacggtgaaactcaaaggaattgacgggggcccgcacaagcggaggaacatgtggtttaattcgatgatacgcgaggaaccttacccgggcttaaattgcagatgaattacggtgaaagccgtaagccgcaaggcatctgtgaaggtgctgcatggttgtcgtcagctcgtgccgtgaggtgtcggcttaagtgccataacgagcgcaacccttgttgtcagttactaacaggtcatgctgaggactctgacaagactgccatcgtaagatgtgaggaaggtggggatgacgtcaaatcagcacggcccttacgtccggggctacacacgtgttacaatggggggtacagagggtcgctaccacgcgagtggatgccaatccccaaaacctctctcagttcggactggagtctgcaacccgactccacgaagctggattcgctagtaatcgcgcatcagccacggcgcggtgaatacgttcccgggccttgtacacaccgcccgtcaagccatgggagccgggggtacctgaagtgcgtaaccgcgaggagcgccctagggtaaaactggtgactggggctaagtcgtaacaaggtagccgtaccggaaggtgcggctggaacacctcctt

SEQ ID NO: 261 - DNA, 1524 bp, artificial sequence
  >GCF_000403235.1_01286 Bacteroides_dorei_group
atgaagagtttgatcctggctcaggatgaacgctagctacaggcttaacacatgcaagtcgaggggcagcatggtcttagcttgctaaggccgatggcgaccggcgcacgggtgagtaacacgtatccaacctgccgtctactcttggacagccttctgaaaggaagattaatacaagatggcatcatgagttcacatgttcacatgattaaaggtattccggtagacgatggggatgcgttccattagatagtaggcggggtaacggcccacctagtcttcgatggataggggttctgagaggaaggtcccccacattggaactgagacacggtccaaactcctacgggaggcagcagtgaggaatattggtcaatgggcgagagcctgaaccagccaagtagcgtgaaggatgactgccctatgggttgtaaacttcttttataaaggaataaagtcgggtatgcatacccgtttgcatgtactttatgaataaggatcggctaactccgtgccagcagccgcggtaatacggaggatccgagcgttatccggatttattgggtttaaagggagcgtagatggatgtttaagtcagttgtgaaagtttgcggctcaaccgtaaaattgcagttgatactggatatcttgagtgcagttgaggcaggcggaattcgtggtgtagcggtgaaatgcttagatatcacgaagaactccgattgcgaaggcagcctgctaagctgcaactgacattgaggctcgaaagtgtgggtatcaaacaggattagataccctggtagtccacacggtaaacgatgaatactcgctgtttgcgatatacggcaagcggccaagcgaaagcgttaagtattccacctggggagtacgccggcaacggtgaaactcaaaggaattgacgggggcccgcacaagcggaggaacatgtggtttaattcgatgatacgcgaggaaccttacccgggcttaaattgcagatgaattacggtgaaagccgtaagccgcaaggcatctgtgaaggtgctgcatggttgtcgtcagctcgtgccgtgaggtgtcggcttaagtgccataacgagcgcaacccttgttgtcagttactaacaggttccgctgaggactctgacaagactgccatcgtaagatgtgaggaaggtggggatgacgtcaaatcagcacggcccttacgtccggggctacacacgtgttacaatggggggtacagagggccgctaccacgcgagtggatgccaatcccaaaaacctctctcagttcggactggagtctgcaacccgactccacgaagctggattcgctagtaatcgcgcatcagccacggcgcggtgaatacgttcccgggtcttgtacacaccgcccgtcaagccatgggagccgggggtacctgaagtgcgtaaccgcgaggagcgccctagggtaaaactggtgactggggctaagtcgtaacaaggtagccgtaccggaaggtgcggctggaacacctcctt

SEQ ID NO: 262 - DNA, 1524 bp, artificial sequence
  >GCF_000403235.1_01724 Bacteroides_dorei_group
atgaagagtttgatcctggctcaggatgaacgctagctacaggcttaacacatgcaagtcgaggggcagcatggtcttagcttgctaaggccgatggcgaccggcgcacgggtgagtaacacgtatccaacctgccgtctactcttgggcagccttctgaaaggaagattaatacaagatggcatcatgagttcacatgttcacatgattaaaggtattccggtagacgatggggatgcgttccattagatagtaggcggggtaacggcccacctagtcttcgatggataggggttctgagaggaaggtcccccacattggaactgagacacggtccaaactcctacgggaggcagcagtgaggaatattggtcaatgggcgagagcctgaaccagccaagtagcgtgaaggatgactgccctatgggttgtaaacttcttttataaaggaataaagtcgggtatgcatacccgtttgcatgtactttatgaataaggatcggctaactccgtgccagcagccgcggtaatacggaggatccgagcgttatccggatttattgggtttaaagggagcgtagatggatgtttaagtcagttgtgaaagtttgcggctcaaccgtaaaattgcagttgatactggatatcttgagtgcagttgaggcaggcggaattcgtggtgtagcggtgaaatgcttagatatcacgaagaactccgattgcgaaggcagcctgctaagctgcaactgacattgaggctcgaaagtgtgggtatcaaacaggattagataccctggtagtccacacggtaaacgatgaatactcgctgtttgcgatatacggcaagcggccaagcgaaagcgttaagtattccacctggggagtacgccggcaacggtgaaactcaaaggaattgacgggggcccgcacaagcggaggaacatgtggtttaattcgatgatacgcgaggaaccttacccgggcttaaattgcagatgaattacggtgaaagccgtaagccgcaaggcatctgtgaaggtgctgcatggttgtcgtcagctcgtgccgtgaggtgtcggcttaagtgccataacgagcgcaacccttgttgtcagttactaacaggttctgctgaggactctgacaagactgccatcgtaagatgtgaggaaggtggggatgacgtcaaatcagcacggcccttacgtccggggctacacacgtgttacaatggggggtacagagggccgctaccacgcgagtggatgccaatccccaaaacctctctcagttcggactggagtctgcaacccgactccacgaagctggattcgctagtaatcgcgcatcagccacggcgcggtgaatacgttcccgggtcttgtacacaccgcccgtcaagccatgggagccgggggtacctgaagtgcgtaaccgcgaggagcgccctagggtaaaactggtgactggggctaagtcgtaacaaggtagccgtaccggaaggtgcggctggaacacctcctt

SEQ ID NO: 263 - DNA, 1536 bp, artificial sequence
  >GCF_000411415.1_00003 Schaalia_odontolytica
tcggagagtttgatcctggctcaggacgaacgctggcggcgtgcttaacacatgcaagtcgaacgctgaagcccagcttgctgggtggatgagtggcgaacgggtgagtaacacgtgagtaacctgcccccttctttgggataacgcccggaaacgggtgctaatactggatattcactgatcttcgcatgggggttggtggaaaggttttttctggtgggggatgggctcgcggcctatcagcttgttggtggggtgatggcctaccaaggctttgacgggtagccggcctgagagggtgaccggtcacattgggactgagatacggcccagactcctacgggaggcagcagtggggaatattgcacaatgggcgaaagcctgatgcagcgacgccgcgtgagggatgacggccttcgggttgtaaacctctttcgctcatggtcaagccgcagctttgggttgtggtgagggtagtgggtaaagaagcgccggctaactacgtgccagcagccgcggtaatacgtagggcgcgagcgttgtccggaattattgggcgtaaagggcttgtaggcggttggtcgcgtctgccgtgaaatcctctggcttaactgggggcgtgcggtgggtacgggctgacttgagtgcggtaggggagactggaactcctggtgtagcggtggaatgcgcagatatcaggaagaacaccggtggcgaaggcgggtctctgggccgttactgacgctgaggagcgaaagcgtggggagcgaacaggattagataccctggtagtccacgctgtaaacgttgggcactaggtgtgggggccacccgtggtttctgcgccgtagctaacgctttaagtgccccgcctggggagtacggccgcaaggctaaaactcaaaggaattgacgggggcccgcacaagcggcggagcatgcggattaattcgatgcaacgcgaagaaccttaccaaggcttgacatgcacggcgacactgcagagatgtggtggcatttagttggtcgtgtgcaggtggtgcatggttgtcgtcagctcgtgtcgtgagatgttgggttaagtcccgcaacgagcgcaacccttgccctatgttgccagcacgtgatggtggggactcgtgggggactgccggggttaactcggaggaaggtggggatgacgtcaaatcatcatgccccttatgtcttgggcttcacgcatgctacaatggttggtacagagggttgcgatactgtgaggtggagcgaatcccttaaagccagtctcagttcggattggggtctgcaactcgaccccatgaaggtggagtcgctagtaatcgcagatcagcaacgctgcggtgaatacgttctcgggccttgtacacaccgcccgtcacgtcacgaaagttggtaacacccgaagcccatggcctaaccgtttttgcggggggagtggtcgaaggtgggattggcgattgggacgaagtcgtaacaaggtagccgtaccggaaggtgcggctggatcacctcctt

SEQ ID NO: 264 - DNA, 1542 bp, artificial sequence
  >GCF_000411475.1_01678 Streptococcus_infantis_group
aatgagagtttgatcctggctcaggatgaacgctggcggcgtgcctaatacatgcaagtagaacgctgaaggaggagcttgctcttctggatgagttgcgaacgggtgagtaacgcgtaggtaacctgcctggtagcgggggataactattggaaacgatagctaataccgcatgacaacagttattgcatgataactgtttaaaaggggcaattgctccactaccagatggacctgcgttgtattagctagttggtgaggtaacggctcaccaaggcgacgatacatagccgacctgagagggtgatcggccacactgggactgagacacggcccagactcctacgggaggcagcagtagggaatcttcggcaatggacggaagtctgaccgagcaacgccgcgtgagtgaagaaggttttcggatcgtaaagctctgttgtaagagaagaacgagtgtgagagtggaaagttcacactgtgacggtatcttaccagaaagggacggctaactacgtgccagcagccgcggtaatacgtaggtcccgagcgttatccggatttattgggcgtaaagcgagcgcaggcggttagataagtctgaagttaaaggctgtggcttaaccatagtacgctttggaaactgtttaacttgagtgcaagaggggagagtggaattccatgtgtagcggtgaaatgcgtagatatatggaggaacaccggtggcgaaagcggctctctggcttgtaactgacgctgaggctcgaaagcgtggggagcaaacaggattagataccctggtagtccacgccgtaaacgatgagtgctaggtgttagaccctttccggggtttagtgccgtagctaacgcattaagcactccgcctggggagtacgaccgcaaggttgaaactcaaaggaattgacgggggcccgcacaagcggtggagcatgtggtttaattcgaagcaacgcgaagaaccttaccaggtcttgacatccctctgaccgctctagagatagagttttccttcgggacagaggtgacaggtggtgcatggttgtcgtcagctcgtgtcgtgagatgttgggttaagtcccgcaacgagcgcaacccctattgttagttgccatcattcagttgggcactctagcgagactgccggtaataaaccggaggaaggtggggatgacgtcaaatcatcatgccccttatgacctgggctacacacgtgctacaatggctggtacaacgagtcgcaagtcggtgacggcaagctaatctcttaaagccagtctcagttcggattgtaggctgcaactcgcctacatgaagtcggaatcgctagtaatcgcggatcagcacgccgcggtgaatacgttcccgggccttgtacacaccgcccgtcacaccacgagagtttgtaacacccgaagtcggtgaggtaaccatttggagccagccgcctaaggtgggatagatgattggggtgaagtcgtaacaaggtagccgtatcggaaggtgcggctggatcacctcctt

SEQ ID NO: 265 - DNA, 1536 bp, artificial sequence
  >GCF_000466185.1_01136 Actinomyces_graevenitzii
tttggagagtttgatcctggctcaggacgaacgctggcggcgtgcttaacacatgcaagtcgaacgaaaataccaagcttgcttggttgattagtggcgaacgggtgagtaacacgtgagtaacctgccccttactttcctggataactgctcgaaagggtagctaatacgggatattctgaccatcctgcatgggttggtttggaaaggttgtttttctggtaagggatgggctcgcggcctatcagcttgttggtggggtgatggcctaccaaggctttgacgggtagccggcctgagagggtggacggtcacactgggactgagatacggcccagactcctacgggaggcagcagtggggaatattgcacaatgggcgcaagcctgatgcagcgacgccgcgtgagggatgaaggccttcgggttgtaaacctctttcgtcagggaacaaggcactgcttttttggtggtgttgagggtacctggataagaagcgccggctaactacgtgccagcagccgcggtaatacgtagggcgcaagcgttgtccggaattattgggcgtaaagagctcgtaggcggctggtcgcgtctgtcgtgaaaacttccggctcaaccgggggcttgcggtgggtacgggccggctagagtgcggtaggggtaactggaactcctggtgtagcggtggaatgcgcagatatcaggaagaacaccgatggcgaaggcaggttactgggccgttactgacgctgaggagcgaaagcgtggggagcgaacaggattagataccctggtagtccacgccgtaaacgttgggcactaggtgtgaggctcctttccgggggttttgcgccgtagctaacgcattaagtgccccgcctggggagtacggccgcaaggctaaaactcaaaggaattgacgggggcccgcacaagcggcggagcatgcggattaattcgatgcaacgcgaagaaccttaccaaggcttgacatgttaaccgtggctctagagatagggtttacccttttgggtggttttcacaggtggtgcatggttgtcgtcagctcgtgtcgtgagatgttgggttaagtcccgcaacgagcgcaacccttgtcccgtgttgccagcacgttgtggtggggactcgcgggagactgccggggtcaactcggaggaaggtggggatgacgtcaaatcatcatgccccttatgtcttgggcttcacgcatgctacaatggccggtacagagggttgcgatactgtgaggtggagctaatcccttaaagctggtctcagttcggattggtgtctgcaactcgacaccatgaaggtggagtcgctagtaatcgcagatcagcaacgctgcggtgaatacgttctcgggccttgtacacaccgcccgtcacgtcacgaaagttggcaacaccccaagcccgtggctctacggggagcggttaaaggtggggctagcgattgggacgaagtcgtaacaaggtagccgtaccggaaggtgcggctggatcacctcctt

SEQ ID NO: 266 - DNA, 1539 bp, artificial sequence
  >GCF_000466265.1_00404 Schaalia_sp2
tcggagagtttgatcctggctcaggacgaacgctggcggcgtgcttaacacatgcaagtcgaacgctgaagacctggcttttgttgggttggatgagtggcgaacgggtgagtaacacgtgagtaacctgcccccttctttgggataacgcccggaaacgggtgctaatactggatattcactggccttcgcatgggggttggtggaaaggttttttctggtgggggatgggctcgcggcctatcagcttgttggtggggtgatggcctaccaaggctttgacgggtagccggcctgagagggtgaccggtcacattgggactgagatacggcccagactcctacgggaggcagcagtggggaatattgcacaatgggcgaaagcctgatgcagcgacgccgcgtgagggatggaggccttcgggttgtaaacctctttcgctcatggtcaagccgcaacttgggttgtggtgagggtagtgggtaaagaagcgccggctaactacgtgccagcagccgcggtaatacgtagggcgcgagcgttgtccggaattattgggcgtaaagggcttgtaggcggttggtcgcgtctgccgtgaaatcctctggcttaactgggggcgtgcggtgggtacgggctgacttgagtgcggtaggggagactggaactcctggtgtagcggtggaatgcgcagatatcaggaagaacaccggtggcgaaggcgggtctctgggccgttactgacgctgaggagcgaaagcgtggggagcgaacaggattagataccctggtagtccacgctgtaaacgttgggcactaggtgtgggggccacccgtggtttctgcgccgtagctaacgctttaagtgccccgcctggggagtacggccgcaaggctaaaactcaaaggaattgacgggggcccgcacaagcggcggagcatgcggattaattcgatgcaacgcgaagaaccttaccaaggcttgacatgcacggcggcactgcagagatgtggtggcatttagttggtcgtgtgcaggtggtgcatggttgtcgtcagctcgtgtcgtgagatgttgggttaagtcccgcaacgagcgcaacccttgccctatgttgccagcacgtgatggtggggactcgtgggggactgccggggttaactcggaggaaggtggggatgacgtcaaatcatcatgccccttatgtcttgggcttcacgcatgctacaatggttggtacagagggttgcgaaatcgtgaggtggagcgaatcccttaaagccagtctcagttcggattggggtctgcaactcgaccccatgaaggtggagtcgctagtaatcgcagatcagcaacgctgcggtgaatacgttctcgggccttgtacacaccgcccgtcacgtcacgaaagttggtaacacccgaagcccatggcctaaccacgttggtggggggagtggtcgaaggtgggattggcgattgggacgaagtcgtaacaaggtagccgtaccggaaggtgcggctggatcacctcctt

SEQ ID NO: 267 - DNA, 1573 bp, artificial sequence
  >GCF_000472265.1_00128 [Lactobacillus]_fermentum
  misc_feature (494)..(494): n is a, c, g, or t
tatgagagtttgatcctggctcaggatgaacgccggcggtgtgcctaatacatgcaagtcgaacgcgttggcccgattgattgatggtgcttgcacctgattgattttggtcgccaacgagtggcggacgggtgagtaacacgtaggtaacctgcccagaagcgggggacaacatttggaaacagatgctaataccgcataacaacgttgttcgcatgaacaacgcttaaaagatggcttctcgctatcacttctggatggacctgcggtgcattagcttgttggtggggtaacggcctaccaaggcgatgatgcatagccgagttgagagactgatcggccacaatgggactgagacacggcccatactcctacgggaggcagcagtagggaatcttccacaatgggcgcaagcctgatggagcaacaccgcgtgagtgaagaagggtttcggctcgtaaagctctgttgttaaagaagaacacgtatgagantaactgttcatacgttgacggtatttaaccagaaagtcacggctaactacgtgccagcagccgcggtaatacgtaggtggcaagcgttatccggatttattgggcgtaaagagagtgcaggcggttttctaagtctgatgtgaaagccttcggcttaaccggagaagtgcatcggaaactggataacttgagtgcagaagagggtagtggaactccatgtgtagcggtggaatgcgtagatatatggaagaacaccagtggcgaaggcggctacctggtctgcaactgacgctgagactcgaaagcatgggtagcgaacaggattagataccctggtagtccatgccgtaaacgatgagtgctaggtgttggagggtttccgcccttcagtgccggagctaacgcattaagcactccgcctggggagtacgaccgcaaggttgaaactcaaaggaattgacgggggcccgcacaagcggtggagcatgtggtttaattcgaagctacgcgaagaaccttaccaggtcttgacatcttgcgccaaccctagagatagggcgtttccttcgggaacgcaatgacaggtggtgcatggtcgtcgtcagctcgtgtcgtgagatgttgggttaagtcccgcaacgagcgcaacccttgttactagttgccagcattaagttgggcactctagtgagactgccggtgacaaaccggaggaaggtggggacgacgtcagatcatcatgccccttatgacctgggctacacacgtgctacaatggacggtacaacgagtcgcgaactcgcgagggcaagcaaatctcttaaaaccgttctcagttcggactgcaggctgcaactcgcctgcacgaagtcggaatcgctagtaatcgcggatcagcatgccgcggtgaatacgttcccgggccttgtacacaccgcccgtcacaccatgagagtttgtaacacccaaagtcggtggggtaaccttttaggagccagccgcctaaggtgggacagatgattagggtgaagtcgtaacaaggtagccgtaggagaacctgcggctggatcacctccttt

SEQ ID NO: 268 - DNA, 1573 bp, artificial sequence
  >GCF_000472265.1_00152 [Lactobacillus]_fermentum
  misc_feature (483)..(483): n is a, c, g, or t
tatgagagtttgatcctggctcaggatgaacgccggcggtgtgcctaatacatgcaagtcgaacgcgttggcccaattgattgacggtgcttgcacctgattgattttggtcgccaacgagtggcggacgggtgagtaacacgtaggtaacctgcccagaagcgggggacaacatttggaaacagatgctaataccgcataacaacgttgttcgcatgaacaacgcttaaaagatggcttctcgctatcacttctggatggacctgcggtgcattagcttgttggtggggtaatggcctaccaaggcgatgatgcatagccgagttgagagactgatcggccacaatgggactgagacacggcccatactcctacgggaggcagcagtagggaatcttccacaatgggcgcaagcctgatggagcaacaccgcgtgagtgaagaagggtttcggctcgtaaagctctgttgttaaagaagaanacgtatgagagtaactgttcatacgttgacggtatttaaccagaaagtcacggctaactacgtgccagcagccgcggtaatacgtaggtggcaagcgttatccggatttattgggcgtaaagagagtgcaggcggttttctaagtctgatgtgaaagccttcggcttaaccggagaagtgcatcggaaactggataacttgagtgcagaagagggtagtggaactccatgtgtagcggtggaatgcgtagatatatggaagaacaccagtggcgaaggcggctacctggtctgcaactgacgctgagactcgaaagcatgggtagcgaacaggattagataccctggtagtccatgccgtaaacgatgagtgctaggtgttggagggtttccgcccttcagtgccggagctaacgcattaagcactccgcctggggagtacgaccgcaaggttgaaactcaaaggaattgacgggggcccgcacaagcggtggagcatgtggtttaattcgaagctacgcgaagaaccttaccaggtcttgacatcttgcgccaaccctagagatagggcgtttccttcgggaacgcaatgacaggtggtgcatggtcgtcgtcagctcgtgtcgtgagatgttgggttaagtcccgcaacgagcgcaacccttgttactagttgccagcattaagttgggcactctagtgagactgccggtgacaaaccggaggaaggtggggacgacgtcagatcatcatgccccttatgacctgggctacacacgtgctacaatggacggtacaacgagtcgcgaactcgcgagggcaagcaaatctcttaaaaccgttctcagttcggactgcaggctgcaactcgcctgcacgaagtcggaatcgctagtaatcgcggatcagcatgccgcggtgaatacgttcccgggccttgtacacaccgcccgtcacaccatgagagtttgtaacacccaaagtcggtggggtaaccttttaggagccagccgcctaaggtgggacagatgattagggtgaagtcgtaacaaggtagccgtaggagaacctgcggctggatcacctccttt

SEQ ID NO: 269 - DNA, 1573 bp, artificial sequence
  >GCF_000472265.1_00549 [Lactobacillus]_fermentum
  misc_feature (220)..(220): n is a, c, g, or t
tatgagagtttgatcctggctcaggatgaacgccggcggtgtgcctaatacatgcaagtcgaacgcgttggcccaattgattgatggtgcttgcacctgattgattttggtcgccaacgagtggcggacgggtgagtaacacgtaggtaacctgcccagaagcgggggacaacatttggaaacagatgctaataccgcataacaacgttgttcgcatgancaacgcttaaaagatggcttctcgctatcacttctggatggacctgcggtgcattagcttgttggtggggtaacggcctaccaaggcgatgatgcatagccgagttgagagactgatcggccacaatgggactgagacacggcccatactcctacgggaggcagcagtagggaatcttccacaatgggcgcaagcctgatggagcaacaccgcgtgagtgaagaagggtttcggctcgtaaagctctgttgttaaagaagaacacgtatgagagtaactgttcatacgttgacggtatttaaccagaaagtcacggctaactacgtgccagcagccgcggtaatacgtaggtggcaagcgttatccggatttattgggcgtaaagagagtgcaggcggttttctaagtctgatgtgaaagccttcggcttaaccggagaagtgcatcggaaactggataacttgagtgcagaagagggtagtggaactccatgtgtagcggtggaatgcgtagatatatggaagaacaccagtggcgaaggcggctacctggtctgcaactgacgctgagactcgaaagcatgggtagcgaacaggattagataccctggtagtccatgccgtaaacgatgagtgctaggtgttggagggtttccgcccttcagtgccggagctaacgcattaagcactccgcctggggagtacgaccgcaaggttgaaactcaaaggaattgacgggggcccgcacaagcggtggagcatgtggtttaattcgaagctacgcgaagaaccttaccaggtcttgacatcttgcgccaaccctagagatagggcgtttccttcgggaacgcaatgacaggtggtgcatggtcgtcgtcagctcgtgtcgtgagatgttgggttaagtcccgcaacgagcgcaacccttgttactagttgccagcattaagttgggcactctagtgagactgccggtgacaaaccggaggaaggtggggacgacgtcagatcatcatgccccttatgacctgggctacacacgtgctacaatggacggtacaacgagtcgcaaactcgcgagggcaagcaaatctcttaaaaccgttctcagttcggactgcaggctgcaactcgcctgcacgaagtcggaatcgctagtaatcgcggatcagcatgccgcggtgaatacgttcccgggccttgtacacaccgcccgtcacaccatgagagtttgtaacacccaaagtcggtggggtaaccttttaggagccagccgcctaaggtgggacagatgattagggtgaagtcgtaacaaggtagccgtaggagaacctgcggctggatcacctccttt

SEQ ID NO: 270 - DNA, 1545 bp, artificial sequence
  >GCF_000479315.1_00332 Streptococcus_australis
aatgagagtttgatcctggctcaggatgaacgctggcggcgtgcctaatacatgcaagtagaacgctgaagcttggtgcttgcaccgagcggatgagttgcgaacgggtgagtaacgcgtaggtaacctgcctggtagcgggggataactattggaaacgatagctaataccgcataacagtagatattgcatgatatctgcttgaaaggtgcaaatgcatcactaccagatggacctgcgttgtattagctagttggtgaggtaacggctcaccaaggcgacgatacatagccgacctgagagggtgatcggccacactgggactgagacacggcccagactcctacgggaggcagcagtagggaatcttcggcaatggggggaaccctgaccgagcaacgccgcgtgagtgaagaaggttttcggatcgtaaagctctgttgtaagagaagaacgagtgtgagagtggaaagttcacactgtgacggtatcttaccagaaagggacggctaactacgtgccagcagccgcggtaatacgtaggtcccgagcgttatccggatttattgggcgtaaagcgagcgcaggcggttagataagtctgaagttaaaggctgtggcttaaccatagtacgctttggaaactgtttaacttgagtgcagaaggggagagtggaattccatgtgtagcggtgaaatgcgtagatatatggaggaacaccggtggcgaaagcggctctctggtctgtaactgacgctgaggctcgaaagcgtggggagcaaacaggattagataccctggtagtccacgccgtaaacgatgagtgctaggtgttgggtcctttccgggactcagtgccgcagctaacgcattaagcactccgcctggggagtacgaccgcaaggttgaaactcaaaggaattgacgggggcccgcacaagcggtggagcatgtggtttaattcgaagcaacgcgaagaaccttaccaggtcttgacatccctctgaccgctctagagatagagttttccttcgggacagaggtgacaggtggtgcatggttgtcgtcagctcgtgtcgtgagatgttgggttaagtcccgcaacgagcgcaacccctattgttagttgccatcatttagttgggcactctagcgagactgccggtaataaaccggaggaaggtggggatgacgtcaaatcatcatgccccttatgacctgggctacacacgtgctacaatggctggtacaacgagtcgcaagtcggtgacggcaagctaatctcttaaagccagtctcagttcggattgtaggctgcaactcgcctacatgaagtcggaatcgctagtaatcgcggatcagcacgccgcggtgaatacgttcccgggccttgtacacaccgcccgtcacaccacgagagtttgtaacacccgaagtcggtgaggtaaccttttaggagccagccgcctaaggtgggatagatgattggggtgaagtcgtaacaaggtagccgtatcggaaggtgcggctggatcacctcctt

SEQ ID NO: 271 - DNA, 1545 bp, artificial sequence
  >GCF_000479315.1_01966 Streptococcus_australis
aatgagagtttgatcctggctcaggatgaacgctggcggcgtgcctaatacatgcaagtagaacgctgaaggaaggagcttgctctttccggatgagttgcgaacgggtgagtaacgcgtaggtaacctgcctggtagcgggggataactattggaaacgatagctaataccgcataacagtagatattgcatgatatctgcttgaaaggtgcaaatgcatcactaccagatggacctgcgttgtattagctagttggtgaggtaacggctcaccaaggcgacgatacatagccgacctgagagggtgatcggccacactgggactgagacacggcccagactcctacgggaggcagcagtagggaatcttcggcaatggggggaaccctgaccgagcaacgccgcgtgagtgaagaaggttttcggatcgtaaagctctgttgtaagagaagaacgagtgtgagagtggaaagttcacactgtgacggtatcttaccagaaagggacggctaactacgtgccagcagccgcggtaatacgtaggtcccgagcgctatccggatttattgggcgtaaagcgagcgcaggcggttagataagtctgaagttaaaggctgtggcttaaccatagtacgctttggaaactgtttaacttgagtgcagaaggggagagtggaattccatgtgtagcggtgaaatgcgtagatatatggaggaacaccggtggcgaaagcggctctctggtctgtaactgacgctgaggctcgaaagcgtggggagcaaacaggattagataccctggtagtccacgccgtaaacgatgagtgctaggtgttgggtcctttccgggactcagtgccgcagctaacgcattaagcactccgcctggggagtacgaccgcaaggttgaaactcaaaggaattgacgggggcccgcacaagcggtggagcatgtggtttaattcgaagcaacgcgaagaaccttaccaggtcttgacatccctctgaccgctctagagatagagttttccttcgggacagaggtgacaggtggtgcatggttgtcgtcagctcgtgtcgtgagatgttgggttaagtcccgcaacgagcgcaacccctattgttagttgccatcatttagttgggcactctagcgagactgccggtaataaaccggaggaaggtggggatgacgtcaaatcatcatgccccttatgacctgggctacacacgtgctacaatggctggtacaacgagtcgcaagtcggtgacggcaagctaatctcttaaagccagtctcagttcggattgtaggctgcaactcgcctacatgaagtcggaatcgctagtaatcgcggatcagcacgccgcggtgaatacgttcccgggccttgtacacaccgcccgtcacaccacgagagtttgtaacacccgaagtcggtgaggtaaccttttaggagccagccgcctaaggtgggatagatgattggggtgaagtcgtaacaaggtagccgtatcggaaggtgcggctggatcacctcctt

SEQ ID NO: 272 - DNA, 1545 bp, artificial sequence
  >GCF_000479335.1_01452 Streptococcus_australis
aatgagagtttgatcctggctcaggatgaacgctggcggcgtgcctaatacatgcaagtagaacgctgaagcttggtgcttgcaccgagcggatgagttgcgaacgggtgagtaacgcgtaggtaacctgcctggtagcgggggataactattggaaacgatagctaataccgcataacagtagatattgcatgatatctgcttgaaagatgcaattgcatcactaccagatggacctgcgttgtattagctagttggtgaggtaacggctcaccaaggcgacgatacatagccgacctgagagggtgatcggccacactgggactgagacacggcccagactcctacgggaggcagcagtagggaatcttcggcaatggggggaaccctgaccgagcaacgccgcgtgagtgaagaaggttttcggatcgtaaagctctgttgtaagagaagaacgagtgtgagagtggaaagttcacactgtgacggtatcttaccagaaagggacggctaactacgtgccagcagccgcggtaatacgtaggtcccgagcgttatccggatttattgggcgtaaagcgagcgcaggcggttagataagtctgaagttaaaggctgtggcttaaccatagtacgctttggaaactgtttaacttgagtgcagaaggggagagtggaattccatgtgtagcggtgaaatgcgtagatatatggaggaacaccggtggcgaaagcggctctctggtctgtaactgacgctgaggctcgaaagcgtggggagcaaacaggattagataccctggtagtccacgccgtaaacgatgagtgctaggtgttgggtcctttccgggactcagtgccgcagctaacgcattaagcactccgcctggggagtacgaccgcaaggttgaaactcaaaggaattgacgggggcccgcacaagcggtggagcatgtggtttaattcgaagcaacgcgaagaaccttaccaggtcttgacatccctctgaccgctctagagatagagttttccttcgggacagaggtgacaggtggtgcatggttgtcgtcagctcgtgtcgtgagatgttgggttaagtcccgcaacgagcgcaacccctattgttagttgccatcatttagttgggcactctagcgagactgccggtaataaaccggaggaaggtggggatgacgtcaaatcatcatgccccttatgacctgggctacacacgtgctacaatggctggtacaacgagtcgcaagtcggtgacggcaagctaatctcttaaagccagtctcagttcggattgtaggctgcaactcgcctacatgaagtcggaatcgctagtaatcgcggatcagcacgccgcggtgaatacgttcccgggccttgtacacaccgcccgtcacaccacgagagtttgtaacacccgaagtcggtgaggtaaccttttaggagccagccgcctaaggtgggatagatgattggggtgaagtcgtaacaaggtagccgtatcggaaggtgcggctggatcacctcctt

SEQ ID NO: 273 - DNA, 1544 bp, artificial sequence
  >GCF_000507765.1_02012 Streptococcus_parasanguinis
aatgagagtttgatcctggctcaggatgaacgctggcggcgtgcctaatacatgcaagtagaacgctgaagcttggtgcttgcaccgagcggatgagttgcgaacgggtgagtaacgcgtaggtaacctgcctcttagcgggggataactattggaaacgatagctaataccgcataaaagtcgatatcgcatgatattgatttgaaaggtgcaattgcatcactaagagatggacctgcgttgtattagctagttggtgaggtaacggctcaccaaggcgacgatacatagccgacctgagagggtgatcggccacactgggactgagacacggcccagactcctacgggaggcagcagtagggaatcttcggcaatggacggaagtctgaccgagcaacgccgcgtgagtgaagaaggttttcggatcgtaaagctctgttgtaagagaagaacgagtgtgagagtggaaagttcacactgtgacggtaacttaccagaaagggacggctaactacgtgccagcagccgcggtaatacgtaggtcccgagcgttatccggatttattgggcgtaaagcgagcgcaggcggttagataagtctgaagttaaaggctgtggcttaaccatagtacgctttggaaactgtttaacttgagtgcagaaggggagagtggaattccatgtgtagcggtgaaatgcgtagatatatggaggaacaccggtggcgaaagcggctctctggtctgtaactgacgctgaggctcgaaagcgtggggagcaaacaggattagataccctggtagtccacgccgtaaacgatgagtgctaggtgttgggtcctttccgggactcagtgccgcagctaacgcattaagcactccgcctggggagtacgaccgcaaggttgaaactcaaaggaattgacgggggcccgcacaagcggtggagcatgtggtttaattcgaagcaacgcgaagaaccttaccaggtcttgacatccctctgaccgctctagagatagagttttccttcgggacagaggtgacaggtggtgcatggttgtcgtcagctcgtgtcgtgagatgttgggttaagtcccgcaacgagcgcaacccctattgttagttgccatcattcagttgggcactctagcgagactgccggtaataaaccggaggaaggtggggatgacgtcaaatcatcatgccccttatgacctgggctacacacgtgctacaatggctggtacaacgagtcgcgagtcggtgacggcaagctaatctcttaaagccagtctcagttcggattgtaggctgcaactcgcctacatgaagtcggaatcgctagtaatcgcggatcagcacgccgcggtgaatacgttcccgggccttgtacacaccgcccgtcacaccacgagagtttgtaacacccgaagtcggtgaggtaaccatttggagccagccgcctaaggtgggatagatgattggggtgaagtcgtaacaaggtagccgtatcggaaggtgcggctggatcacctcctt

SEQ ID NO: 274 - DNA, 1528 bp, artificial sequence
  >GCF_000507805.1_02190 [Ruminococcus]_gnavus
aacgagagtttgatcctggctcaggatgaacgctggcggcgtgcttaacacatgcaagtcgagcgaagcacttttgcggatttcttcggattgaagcaattgtgactgagcggcggacgggtgagtaacgcgtgggtaacctgcctcatacagggggataacagttggaaacggctgctaataccgcataagcgcacagtaccgcatggtaccgtgtgaaaaactccggtggtatgagatggacccgcgtctgattagctagttggtggggtaacggcctaccaaggcgacgatcagtagccgacctgagagggtgaccggccacattgggactgagacacggcccaaactcctacgggaggcagcagtggggaatattgcacaatgggggaaaccctgatgcagcgacgccgcgtgagcgatgaagtatttcggtatgtaaagctctatcagcagggaagaaaatgacggtacctgactaagaagccccggctaactacgtgccagcagccgcggtaatacgtagggggcaagcgttatccggatttactgggtgtaaagggagcgtagacggcatggcaagccagatgtgaaagcccggggctcaaccccgggactgcatttggaactgtcaggctagagtgtcggagaggaaagcggaattcctagtgtagcggtgaaatgcgtagatattaggaggaacaccagtggcgaaggcggctttctggacgatgactgacgttgaggctcgaaagcgtggggagcaaacaggattagataccctggtagtccacgccgtaaacgatgaatactaggtgtcgggtggcaaagccattcggtgccgcagcaaacgcaataagtattccacctggggagtacgttcgcaagaatgaaactcaaaggaattgacggggacccgcacaagcggtggagcatgtggtttaattcgaagcaacgcgaagaaccttacctggtcttgacatccccctgaccgctctttaatcggagctttccttcgggacaggggagacaggtggtgcatggttgtcgtcagctcgtgtcgtgagatgttgggttaagtcccgcaacgagcgcaacccctatctttagtagccagcatttcggatgggcactctagagagactgccagggataacctggaggaaggtggggatgacgtcaaatcatcatgccccttatgaccagggctacacacgtgctacaatggcgtaaacaaagggaagcgagcccgcgagggggagcaaatcccaaaaataacgtctcagttcggattgtagtctgcaactcgactacatgaagctggaatcgctagtaatcgcgaatcagaatgtcgcggtgaatacgttcccgggtcttgtacacaccgcccgtcacaccatgggagtcagtaacgcccgaagtcagtgacccaaccgcaaggagggagctgccgaaggtgggaccgataactggggtgaagtcgtaacaaggtagccgtatcggaaggtgcggctggatcacctccttt

SEQ ID NO: 275 - DNA, 1528 bp, artificial sequence
  >GCF_000507805.1_02808 [Ruminococcus]_gnavus
aacgagagtttgatcctggctcaggatgaacgctggcggcgtgcttaacacatgcaagtcgagcgaagcaccttgacggatttcttcggattgaagccttggtgactgagcggcggacgggtgagtaacgcgtgggtaacctgcctcatacagggggataacagttggaaacggctgctaataccgcataagcgcacagtaccgcatggtacggtgtgaaaaactccggtggtatgagatggacccgcgtctgattaggtagttggtggggtaacggcctaccaagccgacgatcagtagccgacctgagagggtgaccggccacattgggactgagacacggcccaaactcctacgggaggcagcagtggggaatattgcacaatgggggaaaccctgatgcagcgacgccgcgtgagcgatgaagtatttcggtatgtaaagctctatcagcagggaagaaaatgacggtacctgactaagaagccccggctaactacgtgccagcagccgcggtaatacgtagggggcaagcgttatccggatttactgggtgtaaagggagcgtagacggcatggcaagccagatgtgaaagcccggggctcaaccccgggactgcatttggaactgtcaggctagagtgtcggagaggaaagcggaattcctagtgtagcggtgaaatgcgtagatattaggaggaacaccagtggcgaaggcggctttctggacgatgactgacgttgaggctcgaaagcgtggggagcaaacaggattagataccctggtagtccacgccgtaaacgatgaatactaggtgtcgggtggcaaagccattcggtgccgcagcaaacgcaataagtattccacctggggagtacgttcgcaagaatgaaactcaaaggaattgacggggacccgcacaagcggtggagcatgtggtttaattcgaagcaacgcgaagaaccttacctggtcttgacatccccctgaccgctctttaatcggagctttccttcgggacagaggagacaggtggtgcatggttgtcgtcagctcgtgtcgtgagatgttgggttaagtcccgcaacgagcgcaacccctatctttagtagccagcattttggatgggcactctagagagactgccagggataacctggaggaaggtggggatgacgtcaaatcatcatgccccttatgatcagggctacacacgtgctacaatggcgtaaacaaagggaagcgagcccgcgagggggagcaaatcccaaaaataacgtctcagttcggattgtagtctgcaactcgactacatgaagctggaatcgctagtaatcgcgaatcagaatgtcgcggtgaatacgttcccgggtcttgtacacaccgcccgtcacaccatgggagtcagtaacgcccgaagtcagtgacccaaccgcaaggagggagctgccgaaggtgggaccgataactggggtgaagtcgtaacaaggtagccgtatcggaaggtgcggctggatcacctccttt

SEQ ID NO: 276 - DNA, 1242 bp, artificial sequence
  >GCF_000507805.1_02871 [Ruminococcus]_gnavus
  misc_feature (1)..(1): n is a, c, g, or t
ncgacgatcagtagccgacctgagagggtgaccggccacattgggactgagacacggcccaaactcctacgggaggcagcagtggggaatattgcacaatgggggaaaccctgatgcagcgacgccgcgtgagcgatgaagtatttcggtatgtaaagctctatcagcagggaagaaaatgacggtacctgactaagaagccccggctaactacgtgccagcagccgcggtaatacgtagggggcaagcgttatccggatttactgggtgtaaagggagcgtagacggcatggcaagccagatgtgaaagcccggggctcaaccccgggactgcatttggaactgtcaggctagagtgtcggagaggaaagcggaattcctagtgtagcggtgaaatgcgtagatattaggaggaacaccagtggcgaaggcggctttctggacgatgactgacgttgaggctcgaaagcgtggggagcaaacaggattagataccctggtagtccacgccgtaaacgatgaatactaggtgtcgggtggcaaagccattcggtgccgcagcaaacgcaataagtattccacctggggagtacgttcgcaagaatgaaactcaaaggaattgacggggacccgcacaagcggtggagcatgtggtttaattcgaagcaacgcgaagaaccttacctggtcttgacatccctctgaccgctctttaatcggaactttccttcgggacagaggagacaggtggtgcatggttgtcgtcagctcgtgtcgtgagatgttgggttaagtcccgcaacgagcgcaacccctatctttagtagccagcattttggatgggcactctagagagactgccagggataacctggaggaaggtggggatgacgtcaaatcatcatgccccttatgaccagggctacacacgtgctacaatggcgtaaacaaagggaagcgagcccgcgagggggagcaaatcccaaaaataacgtctcagttcggattgtagtctgcaactcgactacatgaagctggaatcgctagtaatcgcgaatcagaatgtcgcggtgaatacgttcccgggtcttgtacacaccgcccgtcacaccatgggagtcagtaacgcccgaagtcagtgacccaaccgcaaggagggagctgccgaaggtgggaccgataactggggtgaagtcgtaacaaggtagccgtatcggaaggtgcggctggatcacctccttt

SEQ ID NO: 277 - DNA, 1544 bp, artificial sequence
  >GCF_000525585.1_01497 Streptococcus_salivarius_group
aatgagagtttgatcctggctcaggacgaacgctggcggcgtgcctaatacatgcaagtagaacgctgaagagaggagcttgctcttcttggatgagttgcgaacgggtgagtaacgcgtaggtaacctgccttgtagcgggggataactattggaaacgatagctaataccgcataacaatggatgacacatgtcatttatttgaaaggggcaattgctccactacaagatggacctgcgttgtattagctagtaggtgaggtaacggctcacctaggcgacgatacatagccgacctgagagggtgatcggccacactgggactgagacacggcccagactcctacgggaggcagcagtagggaatcttcggcaatgggggcaaccctgaccgagcaacgccgcgtgagtgaagaaggttttcggatcgtaaagctctgttgtaagtcaagaacgagtgtgagagtggaaagttcacactgtgacggtagcttaccagaaagggacggctaactacgtgccagcagccgcggtaatacgtaggtcccgagcgttgtccggatttattgggcgtaaagcgagcgcaggcggtttgataagtctgaagttaaaggctgtggctcaaccatagttcgctttggaaactgtcaaacttgagtgcagaaggggagagtggaattccatgtgtagcggtgaaatgcgtagatatatggaggaacaccggtggcgaaagcggctctctggtctgtaactgacgctgaggctcgaaagcgtggggagcgaacaggattagataccctggtagtccacgccgtaaacgatgagtgctaggtgttggatcctttccgggattcagtgccgcagctaacgcattaagcactccgcctggggagtacgaccgcaaggttgaaactcaaaggaattgacgggggcccgcacaagcggtggagcatgtggtttaattcgaagcaacgcgaagaaccttaccaggtcttgacatcccgatgctatttctagagatagaaagttacttcggtacatcggtgacaggtggtgcatggttgtcgtcagctcgtgtcgtgagatgttgggttaagtcccgcaacgagcgcaacccctattgttagttgccatcattcagttgggcactctagcgagactgccggtaataaaccggaggaaggtggggatgacgtcaaatcatcatgccccttatgacctgggctacacacgtgctacaatggttggtacaacgagttgcgagtcggtgacggcaagctaatctcttaaagccaatctcagttcggattgtaggctgcaactcgcctacatgaagtcggaatcgctagtaatcgcggatcagcacgccgcggtgaatacgttcccgggccttgtacacaccgcccgtcacaccacgagagtttgtaacacccgaagtcggtgaggtaaccttttggagccagccgcctaaggtgggatagatgattggggtgaagtcgtaacaaggtagccgtatcggaaggtgcggctggatcacctcctt

SEQ ID NO: 278 - DNA, 1528 bp, artificial sequence
  >GCF_000526735.1_01289 [Ruminococcus]_gnavus
aacgagagtttgatcctggctcaggatgaacgctggcggcgtgcttaacacatgcaagtcgagcgaagcgctttggcggatttcttcggattgaagccttggtgactgagcggcggacgggtgagtaacgcgtgggtaacctgcctcatacagggggataacagttggaaacgactgctaataccgcataagcgcacagtaccgcatggtacggtgtgaaaaactccggtggtatgagatggacccgcgtctgattaggtagttggtggggtaacggcctaccaagccgacgatcagtagccgacctgagagggtgaccggccacattgggactgagacacggcccaaactcctacgggaggcagcagtggggaatattgcacaatgggggaaaccctgatgcagcgacgccgcgtgagcgatgaagtatttcggtatgtaaagctctatcagcagggaagaaaatgacggtacctgactaagaagccccggctaactacgtgccagcagccgcggtaatacgtagggggcaagcgttatccggatttactgggtgtaaagggagcgtagacggcatggcaagccagatgtgaaagcccggggctcaaccccgggactgcatttggaactgtcaggctagagtgtcggagaggtaagcggaattcctagtgtagcggtgaaatgcgtagatattaggaggaacaccagtggcgaaggcggcttactggacgatgactgacgttgaggctcgaaagcgtggggagcaaacaggattagataccctggtagtccacgctgtaaacgatgaatactaggtgtcgggtggcaaagccattcggtgccgcagcaaacgcaataagtattccacctggggagtacgttcgcaagaatgaaactcaaaggaattgacggggacccgcacaagcggtggagcatgtggtttaattcgaagcaacgcgaagaaccttacctggtcttgacatccctttgaccgctctttaatcggagctttccttcgggacagaggagacaggtggtgcatggttgtcgtcagctcgtgtcgtgagatgttgggttaagtcccgcaacgagcgcaacccctatctttagtagccagcatttaaggtgggcactctagagagactgccagggataacctggaggaaggtggggatgacgtcaaatcatcatgccccttatgaccagggctacacacgtgctacaatggcgtaaacaaagggaagcgagcccgcgagggggagcaaatcccaaaaataacgtctcagttcggattgtagtctgcaactcgactacatgaagctggaatcgctagtaatcgcgaatcagaatgtcgcggtgaatacgttcccgggtcttgtacacaccgcccgtcacaccatgggagtcagtaacgcccgaagtcagtgacccaaccgaaaggagggagctgccgaaggtgggaccgataactggggtgaagtcgtaacaaggtagccgtatcggaaggtgcggctggatcacctccttt

SEQ ID NO: 279 - DNA, 1528 bp, artificial sequence
  >GCF_000526735.1_01883 [Ruminococcus]_gnavus
aacgagagtttgatcctggctcaggatgaacgctggcggcgtgcttaacacatgcaagtcgagcgaagcgctttgacggatttcttcggattgaagtcttagtgactgagcggcggacgggtgagtaacgcgtgggtaacctgcctcatacagggggataacagttggaaacgactgctaataccgcataagcgcacagtaccgcatggtacggtgtgaaaaactccggtggtatgagatggacccgcgtctgattaggtagttggtggggtaacggcctaccaagccgacgatcagtagccgacctgagagggtgaccggccacattgggactgagacacggcccaaactcctacgggaggcagcagtggggaatattgcacaatgggggaaaccctgatgcagcgacgccgcgtgagcgatgaagtatttcggtatgtaaagctctatcagcagggaagaaaatgacggtacctgactaagaagccccggctaactacgtgccagcagccgcggtaatacgtagggggcaagcgttatccggatttactgggtgtaaagggagcgtagacggcatggcaagccagatgtgaaagcccggggctcaaccccgggactgcatttggaactgtcaggctagagtgtcggagaggaaagcggaattcctagtgtagcggtgaaatgcgtagatattaggaggaacaccagtggcgaaggcggctttctggacgatgactgacgttgaggctcgaaagcgtggggagcaaacaggattagataccctggtagtccacgccgtaaacgatgaatactaggtgtcgggtggcaaagccattcggtgccgcagcaaacgcaataagtattccacctggggagtacgttcgcaagaatgaaactcaaaggaattgacggggacccgcacaagcggtggagcatgtggtttaattcgaagcaacgcgaagaaccttacctggtcttgacatccctttgaccgctctttaatcggagctttccttcgggacagaggagacaggtggtgcatggttgtcgtcagctcgtgtcgtgagatgttgggttaagtcccgcaacgagcgcaacccctatctttagtagccagcatttaaggtgggcactctagagagactgccagggataacctggaggaaggtggggatgacgtcaaatcatcatgccccttatgaccagggctacacacgtgctacaatggcgtaaacaaagggaagcgagcccgcgagggggagcaaatcccaaaaataacgtctcagttcggattgtagtctgcaactcgactacatgaagctggaatcgctagtaatcgcgaatcagaatgtcgcggtgaatacgttcccgggtcttgtacacaccgcccgtcacaccatgggagtcagtaacgcccgaagtcagtgacccaaccgaaaggagggagctgccgaaggtgggaccgataactggggtgaagtcgtaacaaggtagccgtatcggaaggtgcggctggatcacctccttt

SEQ ID NO: 280 - DNA, 1528 bp, artificial sequence
  >GCF_000526735.1_01946 [Ruminococcus]_gnavus
aacgagagtttgatcctggctcaggatgaacgctggcggcgtgcttaacacatgcaagtcgagcgaagcacttttgcggatttcttcggattgaagcaactgtgactgagcggcggacgggtgagtaacgcgtgggtaacctgcctcatacagggggataacagttggaaacgactgctaataccgcataagcgcacagtaccgcatggtacggtgtgaaaaactccggtggtatgagatggacccgcgtctgattaggtagttggtggggtaacggcctaccaagccgacgatcagtagccgacctgagagggtgaccggccacattgggactgagacacggcccaaactcctacgggaggcagcagtggggaatattgcacaatgggggaaaccctgatgcagcgacgccgcgtgagcgatgaagtatttcggtatgtaaagctctatcagcagggaagaaaatgacggtacctgactaagaagccccggctaactacgtgccagcagccgcggtaatacgtagggggcaagcgttatccggatttactgggtgtaaagggagcgtagacggcatggcaagccagatgtgaaagcccggggctcaaccccgggactgcatttggaactgtcaggctagagtgtcggagaggaaagcggaattcctagtgtagcggtgaaatgcgtagatattaggaggaacaccagtggcgaaggcgactttctggacgatgactgacgttgaggctcgaaagcgtggggagcaaacaggattagataccctggtagtccacgccgtaaacgatgaatactaggtgtcgggtggcaaagccattcggtgccgcagcaaacgcaataagtattccacctggggagtacgttcgcaagaatgaaactcaaaggaattgacggggacccgcacaagcggtggagcatgtggtttaattcgaagcaacgcgaagaaccttacctggtcttgacatccctttgaccgctctttaatcggagctttccttcgggacagaggagacaggtggtgcatggttgtcgtcagctcgtgtcgtgagatgttgggttaagtcccgcaacgagcgcaacccctatctttagtagccagcatttaaggtgggcactctagagagactgccagggataacctggaggaaggtggggatgacgtcaaatcatcatgccccttatgaccagggctacacacgtgctacaatggcgtaaacaaagggaagcgagcccgcgagggggagcaaatcccaaaaataacgtctcagttcggattgtagtctgcaactcgactacatgaagctggaatcgctagtaatcgcgaatcagaatgtcgcggtgaatacgttcccgggtcttgtacacaccgcccgtcacaccatgggagtcagtaacgcccgaagtcagtgacccaaccgtaaggagggagctgccgaaggtgggaccgataactggggtgaagtcgtaacaaggtagccgtatcggaaggtgcggctggatcacctccttt

SEQ ID NO: 281 - DNA, 1528 bp, artificial sequence
  >GCF_000526735.1_02099 [Ruminococcus]_gnavus
aacgagagtttgatcctggctcaggatgaacgctggcggcgtgcttaacacatgcaagtcgagcgaagcacttttgcggatttcttcggattgaagcaactgtgactgagcggcggacgggtgagtaacgcgtgggtaacctgcctcatacagggggataacagttggaaacggctgctaataccgcataagcgcacagtaccgcatggtaccgtgtgaaaaactccggtggtatgagatggacccgcgtctgattagctagttggtggggtaacggcctaccaaggcgacgatcagtagccgacctgagagggtgaccggccacattgggactgagacacggcccaaactcctacgggaggcagcagtggggaatattgcacaatgggggaaaccctgatgcagcgacgccgcgtgagcgatgaagtatttcggtatgtaaagttctatcagcagggaagaaaatgacggtacctgactaagaagccccggctaactacgtgccagcagccgcggtaatacgtagggggcaagcgttatccggatttactgggtgtaaagggagcgtagacggcatggcaagccagatgtgaaagcccggggctcaaccccgggactgcatttggaactgtcaggctagagtgtcggagaggaaagcggaattcctagtgtagcggtgaaatgcgtagatattaggaggaacaccagtggcgaaggcggctttctggacgatgactgacgttgaggctcgaaagcgtggggagcaaacaggattagataccctggtagtccacgccgtaaacgatgaatactaggtgtcgggtggcaaagccattcggtgccgcagcaaacgcaataagtattccacctggggagtacgttcgcaagaatgaaactcaaaggaattgacggggacccgcacaagcggtggagcatgtggtttaattcgaagcaacgcgaagaaccttacctggtcttgacatccctttgaccgctctttaatcggagctttccttcgggacagaggagacaggtggtgcatggttgtcgtcagctcgtgtcgtgagatgttgggttaagtcccgcaacgagcgcaacccctatctttagtagccagcatttaaggtgggcactctagagagactgccagggataacctggaggaaggtggggatgacgtcaaatcatcatgccccttatgaccagggctacacacgtgctacaatggcgtaaacaaagggaagcgagcccgcgagggggagcaaatcccaaaaataacgtctcagttcggattgtagtctgcaactcgactacatgaagctggaatcgctagtaatcgcgaatcagaatgtcgcggtgaatacgttcccgggtcttgtacacaccgcccgtcacaccatgggagtcagtaacgcccgaagtcagtgacccaaccgaaaggagggagctgccgaaggtgggaccgataactggggtgaagtcgtaacaaggtagccgtatcggaaggtgcggctggatcacctccttt

SEQ ID NO: 282 - DNA, 1509 bp, artificial sequence
  >GCF_000564995.1_00295 [Atopobium]_parvulum
atggagagttcgatcctggctcaggatgaacgctggcggcgcgcctaacacatgcaagtcgaacgattaaagcaccttcgggtgtgtataaagtggcgaacggctgagtaacacgtgggcaacctgcccctctcattgggatagccacgggaaaccgtggataataccgaatacttcgagtctcccgcatggaagactcgagaaagctccggcggagagggatgggcccgcggcctgttagcttgttggtggggtaacggcctaccaaggcaatgatgggtagctgggttgagagaccgaccagccagattgggactgagacacggcccagactcctacgggaggcagcagtggggaatcttgcacaatgggcgaaagcctgatgcagcgacgccgcgtgcgggatgaaggccttcgggttgtaaaccgctttcagcagggacgaggcgaaagtgacggtacctgcagaagaagccccggctaactacgtgccagcagccgcggtaatacgtagggggcaagcgttatccggattcattgggcgtaaagcgctcgtaggcggtctgttaggtcgggagttaaatccgggggctcaacccccgttcgctcccgataccggcagacttgagtttggtaggggaaggtggaattcctagtgtagcggtggaatgcgcagatattaggaagaacaccagtggcgaaggcggccttctgggccataactgacgctgaggagcgaaagctaggggagcaaacaggattagataccctggtagtcctagccgtaaacgatggacactaggtgtgggggaatatttcttccgtgccgcagctaacgcattaagtgtcccgcctggggagtacggccgcaaggctaaaactcaaaggaattgacgggggcccgcacaagcagcggagcatgtggtttaattcgaagcaacgcgaagaaccttaccagggcttgacatttaggtgaagcggcggaaacgtcgtggccgaaaggagcctaaacaggtggtgcatggctgtcgtcagctcgtgtcgtgagatgttaggttaagtcctgcaacgagcgcaaccctcgtcgtatgttgccagcggttaggccgggcacccatacgagaccgccggcgtcaagccggaggaaggtggggacgacgtcaagtcatcatgccccttatgtcctgggctacacacgtgctacaatggccggcacaatgggctgccaacccgcgagggtgagcgaatccctaaagccggtcccagttcggattggaggctgcaacccgcctccatgaagtcggagttgctagtaatcgcggatcagcacgccgcggtgaatgcgttcccgggccttgtacacaccgcccgtcacaccacccgagtcgattgcacccgaagtcgtcggcctaaccttttaggagggagacgccgaaggtgtggttggtaaggggggtgaagtcgtaacaaggtagccgtaccggaaggtgcggctggatcacctccttt

SEQ ID NO: 283 - DNA, 1536 bp, artificial sequence
  >GCF_000565035.1_00789 Schaalia_odontolytica
tcggagagtttgatcctggctcaggacgaacgctggcggcgtgcttaacacatgcaagtcgaacgctgaagcccagcttgctgggtggatgagtggcgaacgggtgagtaacacgtgagtaacctgcccccttctttgggataacgcccggaaacgggtgctaatactggatattcactggccttcgcatgggggttggtggaaaggttttttctggtgggggatgggctcgcggcctatcagcttgttggtggggtgatggcctaccaaggctttgacgggtagccggcctgagagggtgaccggtcacattgggactgagatacggcccagactcctacgggaggcagcagtggggaatattgcacaatgggcgaaagcctgatgcagcgacgccgcgtgagggatgacggccttcgggttgtaaacctctttcgctcatggtcaagccgcgacattggttgtggtgagggtagtgggtaaagaagcgccggctaactacgtgccagcagccgcggtaatacgtagggcgcgagcgttgtccggaattattgggcgtaaagggcttgtaggcggttggtcgcgtctgccgtgaaatcctctggcttaactgggggcgtgcggtgggtacgggctgacttgagtgcggtaggggagactggaactcctggtgtagcggtggaatgcgcagatatcaggaagaacaccggtggcgaaggcgggtctctgggccgttactgacgctgaggagcgaaagcgtggggagcgaacaggattagataccctggtagtccacgctgtaaacgttgggcactaggtgtgggggccacccgtggtttctgcgccgtagctaacgctttaagtgccccgcctggggagtacggccgcaaggctaaaactcaaaggaattgacgggggcccgcacaagcggcggagcatgcggattaattcgatgcaacgcgaagaaccttaccaaggcttgacatgcacggcgacactgcagagatgtggtggcatttagttggtcgtgtgcaggtggtgcatggttgtcgtcagctcgtgtcgtgagatgttgggttaagtcccgcaacgagcgcaacccttgccctatgttgccagcacgtgatggtggggactcgtgggggactgccggggttaactcggaggaaggtggggatgacgtcaaatcatcatgccccttatgtcttgggcttcacgcatgctacaatggttggtacagagggttgcgatactgtgaggtggagcgaatcccttaaagccagtctcagttcggattggggtctgcaactcgaccccatgaaggtggagtcgctagtaatcgcagatcagcaacgctgcggtgaatacgttctcgggccttgtacacaccgcccgtcacgtcacgaaagttggtaacacccgaagcccatggcctaaccgcttttgcggggggagtggtcgaaggtgggattggcgattgggacgaagtcgtaacaaggtagccgtaccggaaggtgcggctggatcacctccttt

SEQ ID NO: 284 - DNA, 1509 bp, artificial sequence
  >GCF_000565075.1_00959 [Atopobium]_parvulum
atggagagttcgatcctggctcaggatgaacgctggcggcgcgcctaacacatgcaagtcgaacgattaaagcaccttcgggtgtgtataaagtggcgaacggctgagtaacacgtgggcaacctgcccctctcattgggatagccacgggaaaccgtggataataccgaatacttcgagacttccgcatggaagactcgagaaagctccggcggagagggatgggcccgcggcctgttagcttgttggtggggtaacggcctaccaaggcaatgatgggtagctgggttgagagaccgaccagccagattgggactgagacacggcccagactcctacgggaggcagcagtggggaatcttgcacaatgggcgaaagcctgatgcagcgacgccgcgtgcgggatgaaggccttcgggttgtaaaccgctttcagcagggacgaggcgaaagtgacggtacctgcagaagaagccccggctaactacgtgccagcagccgcggtaatacgtagggggcaagcgttatccggattcattgggcgtaaagcgctcgtaggcggtctgttaggtcgggagttaaatccgggggctcaacccccgttcgctcccgataccggcagacttgagtttggtaggggaaggtggaattcctagtgtagcggtggaatgcgcagatattaggaagaacaccagtggcgaaggcggccttctgggccataactgacgctgaggagcgaaagctaggggagcaaacaggattagataccctggtagtcctagccgtaaacgatggacactaggtgtgggggaatatttcttccgtgccgcagctaacgcattaagtgtcccgcctggggagtacggccgcaaggctaaaactcaaaggaattgacgggggcccgcacaagcagcggagcatgtggtttaattcgaagcaacgcgaagaaccttaccagggcttgacatttaggtgaagcggcggaaacgtcgtggccgaaaggagcctaaacaggtggtgcatggctgtcgtcagctcgtgtcgtgagatgttaggttaagtcctgcaacgagcgcaaccctcgtcgtatgttgccagcggttaggccgggcacccatacgagaccgccggcgtcaagccggaggaaggtggggacgacgtcaagtcatcatgccccttatgtcctgggctacacacgtgctacaatggccggcacaatgggctgccaacccgcgagggtgagcgaatccctaaagccggtcccagttcggattggaggctgcaacccgcctccatgaagtcggagttgctagtaatcgcggatcagcacgccgcggtgaatgcgttcccgggccttgtacacaccgcccgtcacaccacccgagtcgattgcacccgaagtcgtcggcctaaccttttaggagggagacgccgaaggtgtggttggtaaggggggtgaagtcgtaacaaggtagccgtaccggaaggtgcggctggatcacctccttt

SEQ ID NO: 285 - DNA, 792 bp, artificial sequence
  >GCF_000699705.1_02143 Bacteroides_dorei_group
ttaatacaagatggcatcatgagtccgcatgttcacatgattaaaggtattccggtagacgatggggatgcgttccattagatagtaggcggggtaacggcccacctagtcttcgatggataggggttctgagaggaaggtcccccacattggaactgagacacggtccaaactcctacgggaggcagcagtgaggaatattggtcaatgggcgagagcctgaaccagccaagtagcgtgaaggatgactgccctatgggttgtaaacttcttttataaaggaataaagtcgggtatggatacccgtttgcatgtactttatgaataaggatcggctaactccgtgccagcagccgcggtaatacggaggatccgagcgttatccggatttattgggtttaaagggagcgtagatggatatttaagtcagttgtgaaagtttgcggctcaaccgtaaaattgcagttgatactggatatcttgagtgcagttgaggcaggcggaattcgtggtgtagcggtgaaatgcttagatatcacgaagaactccgattgcgaaggcagcctgctaagctgcaactgacattgaggctcgaaagtgtgggtatcaaacaggattagataccctggtagtccacacggtaaacgatgaatactcgctgtttgcgatatactgcaagcggccaagcgaaagcgttaagtattccacctggggagtacgccggcaacggtgaaactcaaaggaattgacgggggcccgcacaagcggaggaacatgtggtttaattcgatg

SEQ ID NO: 286 - DNA, 1544 bp, artificial sequence
  >GCF_000714445.1_01536 Streptococcus_salivarius_group
aatgagagtttgatcctggctcaggacgaacgctggcggcgtgcctaatacatgcaagtagaacgctgaagagaggagcttgctcttcttggatgagttgcgaacgggtgagtaacgcgtaggtaacctgccttgtagcgggggataactattggaaacgatagctaataccgcataacaatgaatgacacatgtcatttatttgaaaggggcaattgctccactacaagatggacctgcgttgtattagctagtaggtgaggtaacggctcacctaggcgacgatacatagccgacctgagagggtgatcggccacactgggactgagacacggcccagactcctacgggaggcagcagtagggaatcttcggcaatgggggcaaccctgaccgagcaacgccgcgtgagtgaagaaggttttcggatcgtaaagctctgttgtaagtcaagaacgagtgtgagagtggaaagttcacactgtgacggtagcttaccagaaagggacggctaactacgtgccagcagccgcggtaatacgtaggtcccgagcgttgtccggatttattgggcgtaaagcgagcgcaggcggtttgataagtctgaagttaaaggctgtggctcaaccatagttcgctttggaaactgtcaaacttgagtgcagaaggggagagtggaattccatgtgtagcggtgaaatgcgtagatatatggaggaacaccggtggcgaaagcggctctctggtctgtaactgacgctgaggctcgaaagcgtggggagcgaacaggattagataccctggtagtccacgccgtaaacgatgagtgctaggtgttggatcctttccgggattcagtgccgcagctaacgcattaagcactccgcctggggagtacgaccgcaaggttgaaactcaaaggaattgacgggggcccgcacaagcggtggagcatgtggtttaattcgaagcaacgcgaagaaccttaccaggtcttgacatcccgatgctatttctagagatagaaagttacttcggtacatcggtgacaggtggtgcatggttgtcgtcagctcgtgtcgtgagatgttgggttaagtcccgcaacgagcgcaacccctattgttagttgccatcattcagttgggcactctagcgagactgccggtaataaaccggaggaaggtggggatgacgtcaaatcatcatgccccttatgacctgggctacacacgtgctacaatggttggtacaacgagttgcgagtcggtgacggcaagctaatctcttaaagccaatctcagttcggattgtaggctgcaactcgcctacatgaagtcggaatcgctagtaatcgcggatcagcacgccgcggtgaatacgttcccgggccttgtacacaccgcccgtcacaccacgagagtttgtaacacccgaagtcggtgaggtaaccttttggagccagccgcctaaggtgggatagatgattggggtgaagtcgtaacaaggtagccgtatcggaaggtgcggctggatcacctcctt

SEQ ID NO: 287 - DNA, 1509 bp, artificial sequence
  >GCF_000758945.1_00333 [Atopobium]_parvulum
atggagagttcgatcctggctcaggatgaacgctggcggcgcgcctaacacatgcaagtcgaacgattaaagcaccttcgggtgtgtataaagtggcgaacggctgagtaacacgtgggcaacctgcccctctcattgggatagccacgggaaaccgtggataataccgaatacttcgagactttcgcatgaaagactcgagaaagctccggcggagagggatgggcccgcggcctgttagcttgttggtggggtaacggcctaccaaggcaatgatgggtagctgggttgagagaccgaccagccagattgggactgagacacggcccagactcctacgggaggcagcagtggggaatcttgcacaatgggcgaaagcctgatgcagcgacgccgcgtgcgggatgaaggccttcgggttgtaaaccgctttcagcagggacgaggcgaaagtgacggtacctgcagaagaagccccggctaactacgtgccagcagccgcggtaatacgtagggggcaagcgttatccggattcattgggcgtaaagcgctcgtaggcggtctgttaggtcgggagttaaatccgggggctcaacccccgttcgctcccgataccggcagacttgagtttggtaggggaaggtggaattcctagtgtagcggtggaatgcgcagatattaggaagaacaccagtggcgaaggcggccttctgggccataactgacgctgaggagcgaaagctaggggagcaaacaggattagataccctggtagtcctagccgtaaacgatggacactaggtgtgggggaatatttcttccgtgccgcagctaacgcattaagtgtcccgcctggggagtacggccgcaaggctaaaactcaaaggaattgacgggggcccgcacaagcagcggagcatgtggtttaattcgaagcaacgcgaagaaccttaccagggcttgacatttaggtgaagcggcggaaacgtcgtggccgaaaggagcctaaacaggtggtgcatggctgtcgtcagctcgtgtcgtgagatgttaggttaagtcctgcaacgagcgcaaccctcgtcgtatgttgccagcggttaggccgggcacccatacgagaccgccggcgtcaagccggaggaaggtggggacgacgtcaagtcatcatgccccttatgtcctgggctacacacgtgctacaatggccggcacaatgggctgccaacccgcgagggtgagcgaatccctaaagccggtcccagttcggattggaggctgcaacccgcctccatgaagtcggagttgctagtaatcgcggatcagcacgccgcggtgaatgcgttcccgggccttgtacacaccgcccgtcacaccacccgagtcgattgcacccgaagtcgtcggcctaaccttttaggagggagacgccgaaggtgtggttggtaaggggggtgaagtcgtaacaaggtagccgtaccggaaggtgcggctggatcacctccttt

SEQ ID NO: 288 - DNA, 1529 bp, artificial sequence; identical to SEQ ID NO: 49
  >GCF_000765235.1_00962 Ruminococcaceae_NG18_sp1

SEQ ID NO: 289 - DNA, 1553 bp, artificial sequence
  >GCF_000959925.1_01371 Streptococcus_gordonii
aatgagagtttgatcctggctcaggacgaacgctggcggcgtgcctaatacatgcaagtagaacgcacagtttataccgtagcttgctacaccatagattgtgagttgcgaacgggtgagtaacgcgtaggtaacctgcctggtagcgggggataactattggaaacgatagctaataccgcataatattaattattgcatgataattaattgaaagatgcaattgcatcactaccagatggacctgcgttgtattagctagtaggtgaggtaacggctcacctaggcgacgatacatagccgacctgagagggtgatcggccacactgggactgagacacggcccagactcctacgggaggcagcagtagggaatcttcggcaatggacgaaagtctgaccgagcaacgccgcgtgagtgaagaaggttttcggatcgtaaagctctgttgtaagagaagaacgggtgtgagagtggaaagttcacactgtgacggtatcttaccagaaagggacggctaactacgtgccagcagccgcggtaatacgtaggtcccgagcgttgtccggatttattgggcgtaaagcgagcgcaggcggttagataagtctgaagttaaaggctgtggcttaaccatagtacgctttggaaactgtttaacttgagtgcagaaggggagagtggaattccatgtgtagcggtgaaatgcgtagatatatggaggaacaccggtggcgaaagcggctctctggtctgtaactgacgctgaggctcgaaagcgtggggagcgaacaggattagataccctggtagtccacgccgtaaacgatgagtgctaggtgttaggccctttccggggcttagtgccgcagctaacgcattaagcactccgcctggggagtacgaccgcaaggttgaaactcaaaggaattgacgggggcccgcacaagcggtggagcatgtggtttaattcgaagcaacgcgaagaaccttaccaggtcttgacatcccgatgcccgctctagagatagagttttacttcggtacatcggtgacaggtggtgcatggttgtcgtcagctcgtgtcgtgagatgttgggttaagtcccgcaacgagcgcaacccttattgttagttgccatcattcagttgggcactctagcgagactgccggtaataaaccggaggaaggtggggatgacgtcaaatcatcatgccccttatgacctgggctacacacgtgctacaatggctggtacaacgagtcgcaagtcggtgacggcaagctaatctcttaaagccagtctcagttcggattgtaggctgcaactcgcctacatgaagtcggaatcgctagtaatcgcggatcagcacgccgcggtgaatacgttcccgggccttgtacacaccgcccgtcacaccacgagagtttgtaacacccgaagtcggtgaggtaaccttttaggagccagccgcctaaggtgggatagatgattggggtgaagtcgtaacaaggtagccgtatcggaaggtgcggctggatcacctcctt

SEQ ID NO: 290 - DNA, 1544 bp, artificial sequence
  >GCF_000960085.1_00017s Streptococcus_infantis_group
aatgagagtttgatcctggctcaggatgaacgctggcggcgtgcctaatacatgcaagtagaacgctgaagcttggtgcttgcaccgagcggatgagttgcgaacgggtgagtaacgcgtaggtaacctgcctggtagcgggggataactattggaaacgatagctaataccgcatgacaacagttattgcatgatagctgtttaaaaggggcaattgctccactaccagatggacctgcgttgtattagctagttggtggggtaacggctcaccaaggcgacgatacatagccgacctgagagggtgatcggccacactgggactgagacacggcccagactcctacgggaggcagcagtagggaatcttcggcaatggacggaagtctgaccgagcaacgccgcgtgagtgaagaaggttttcggatcgtaaagctctgttgtaagagaagaacgagtgtgagagtggaaagttcacactgtgacggtatcttaccagaaagggacggctaactacgtgccagcagccgcggtaatacgtaggtcccgagcgttatccggatttattgggcgtaaagcgagcgcaggcggttagataagtctgaagttaaaggctgtggcttaaccatagtacgctttggaaactgtttaacttgagtgcaagaggggagagtggaattccatgtgtagcggtgaaatgcgtagatatatggaggaacaccggtggcgaaagcggctctctggcttgtaactgacgctgaggctcgaaagcgtggggagcaaacaggattagataccctggtagtccacgccgtaaacgatgagtgctaggtgttagaccctttccggggtttagtgccgtagctaacgcattaagcactccgcctggggagtacgaccgcaaggttgaaactcaaaggaattgacgggggcccgcacaagcggtggagcatgtggtttaattcgaagcaacgcgaagaaccttaccaggtcttgacatccctctgaccgctctagagatagagttttccttcgggacagaggtgacaggtggtgcatggttgtcgtcagctcgtgtcgtgagatgttgggttaagtcccgcaacgagcgcaacccctattgttagttgccatcattcagttgggcactctagcgagactgccggtaataaaccggaggaaggtggggatgacgtcaaatcatcatgccccttatgacctgggctacacacgtgctacaatggctggtacaacgagtcgcaagtcggtgacggcaagctaatctcttaaagccagtctcagttcggattgtaggctgcaactcgcctacatgaagtcggaatcgctagtaatcgcggatcagcacgccgcggtgaatacgttcccgggccttgtacacaccgcccgtcacaccacgagagtttgtaacacccgaagtcggtgaggtaaccatttggagccagccgcctaaggtgggatagatgattggggtgaagtcgtaacaaggtagccgtatcggaaggtgcggctggatcacctcctt

SEQ ID NO: 291 - DNA, 1543 bp, artificial sequence
  >GCF_000963255.1_00145 Streptococcus_infantis_group
aatgagagtttgatcctggctcaggacgaacgctggcggcgtgcctaatacatgcaagtagaacgctgaaggaggagcttgcttctccggatgagttgcgaacgggtgagtaacgcgtaggtaacctgcctggtagcgggggataactattggaaacgatagctaataccgcataacagtagatattgcatgatatctgcttgaaaggtgcaattgcatcactaccagatggacctgcgttgtattagctagttggtggggtaacggctcaccaaggcgacgatacatagccgacctgagagggtgatcggccacactgggactgagacacggcccagactcctacgggaggcagcagtagggaatcttcggcaatggacggaagtctgaccgagcaacgccgcgtgagtgaagaaggttttcggatcgtaaagctctgttgtaagagaagaacgagtgtgagagtggaaagttcacactgtgacggtatcttaccagaaagggacggctaactacgtgccagcagccgcggtaatacgtaggtcccgagcgttgtccggatttattgggcgtaaagcgagcgcaggcggttagataagtctgaagttaaaggctgtggcttaaccatagtacgctttggaaactgtttaacttgagtgcaagaggggagagtggaattccatgtgtagcggtgaaatgcgtagatatatggaggaacaccggtggcgaaagcggctctctggcttgtaactgacgctgaggctcgaaagcgtggggagcaaacaggattagataccctggtagtccacgccgtaaacgatgagtgctaggtgttagaccctttccggggtttagtgccgcagctaacgcattaagcactccgcctggggagtacgaccgcaaggttgaaactcaaaggaattgacgggggcccgcacaagcggtggagcatgtggtttaattcgaagcaacgcgaagaaccttaccaggtcttgacatccctctgaccgctctagagatagagttttccttcgggacagaggtgacaggtggtgcatggttgtcgtcagctcgtgtcgtgagatgttgggttaagtcccgcaacgagcgcaacccctattgttagttgccatcattcagttgggcactctagcgagactgccggtaataaaccggaggaaggtggggatgacgtcaaatcatcatgccccttatgacctgggctacacacgtgctacaatggctggtacaacgagtcgcaagtcggtgacggcaagctaatctcttaaagccagtctcagttcggattgtaggctgcaactcgcctacatgaagtcggaatcgctagtaatcgcggatcagcacgccgcggtgaatacgttcccgggccttgtacacaccgcccgtcacaccacgagagtttgtaacacccgaagtcggtgaggtaaccttttaggagccagccgcctaaggtgggatagatgattggggtgaagtcgtaacaaggtagccgtatcggaaggtgcggctggatcacctcctt

SEQ ID NO: 292 - DNA, 1544 bp, artificial sequence
  >GCF_000963275.1_01769 Streptococcus_parasanguinis
aatgagagtttgatcctggctcaggatgaacgctggcggcgtgcctaatacatgcaagtagaacgctgaagcttggtgcttgcaccgagcggatgagttgcgaacgggtgagtaacgcgtaggtaacctgcctcttagcgggggataactattggaaacgatagctaataccgcataaaagacgatatcgcatgatattgatttgaaaggtgcaattgcatcactaagagatggacctgcgttgtattagctagttggtgaggtaacggctcaccaaggcaacgatacatagccgacctgagagggtgatcggccacactgggactgagacacggcccagactcctacgggaggcagcagtagggaatcttcggcaatgggggcaaccctgaccgagcaacgccgcgtgagtgaagaaggttttcggatcgtaaagctctgttgtaagagaagaacgagtgtgagagtggaaagttcacactgtgacggtaacttaccagaaagggacggctaactacgtgccagcagccgcggtaatacgtaggtcccgagcgttatccggatttattgggcgtaaagcgagcgcaggcggttagataagtctgaagttaaaggctgtggcttaaccatagtacgctttggaaactgtttaacttgagtgcagaaggggagagtggaattccatgtgtagcggtgaaatgcgtagatatatggaggaacaccggtggcgaaagcggctctctggtctgtaactgacgctgaggctcgaaagcgtggggagcaaacaggattagataccctggtagtccacgccgtaaacgatgagtgctaggtgttgggtcctttccgggactcagtgccgcagctaacgcattaagcactccgcctggggagtacgaccgcaaggttgaaactcaaaggaattgacgggggcccgcacaagcggtggagcatgtggtttaattcgaagcaacgcgaagaaccttaccaggtcttgacatccctctgaccgctctagagatagagttttccttcgggacagaggtgacaggtggtgcatggttgtcgtcagctcgtgtcgtgagatgttgggttaagtcccgcaacgagcgcaacccctattgttagttgccatcattgagttgggcactctagcgagactgccggtaataaaccggaggaaggtggggatgacgtcaaatcatcatgccccttatgacctgggctacacacgtgctacaatggctggtacaacgagtcgcgagtcggtgacggcaagctaatctcttaaagccagtctcagttcggattgtaggctgcaactcgcctacatgaagtcggaatcgctagtaatcgcggatcagcacgccgcggtgaatacgttcccgggccttgtacacaccgcccgtcacaccacgagagtttgtaacacccgaagtcggtgaggtaaccgtaaggagccagccgcctaaggtgggatagatgattggggtgaagtcgtaacaaggtagccgtatcggaaggtgcggctggatcaccttctt

SEQ ID NO: 293 - DNA, 1553 bp, artificial sequence
  >GCF_000970665.2_00121 Streptococcus_gordonii
aatgagagtttgatcctggctcaggacgaacgctggcggcgtgcctaatacatgcaagtagaacgcacagtttataccgtagcttgctacaccatagactgtgagttgcgaacgggtgagtaacgcgtaggtaacctgcctggtagcgggggataactattggaaacgatagctaataccgcataatattgattattgcatgataattgattgaaagatgcaactgcatcactaccagatggacctgcgttgtattagctagtaggtgaggtaacggctcacctaggcgacgatacatagccgacctgagagggtgatcggccacactgggactgagacacggcccagactcctacgggaggcagcagtagggaatcttcggcaatggacgaaagtctgaccgagcaacgccgcgtgagtgaagaaggttttcggatcgtaaagctctgttgtaagagaagaacgggtgtgagagtggaaagttcacactgtgacggtatcttaccagaaagggacggctaactacgtgccagcagccgcggtaatacgtaggtcccgagcgttgtccggatttattgggcgtaaagcgagcgcaggcggttagataagtctgaagttaaaggctgtggcttaaccatagtacgctttggaaactgtttaacttgagtgcagaaggggagagtggaattccatgtgtagcggtgaaatgcgtagatatatggaggaacaccggtggcgaaagcggctctctggtctgtaactgacgctgaggctcgaaagcgtggggagcgaacaggattagataccctggtagtccacgccgtaaacgatgagtgctaggtgttaggccctttccggggcttagtgccgcagctaacgcattaagcactccgcctggggagtacgaccgcaaggttgaaactcaaaggaattgacgggggcccgcacaagcggtggagcatgtggtttaattcgaagcaacgcgaagaaccttaccaggtcttgacatcccgatgcccgctctagagatagagttttacttcggtacatcggtgacaggtggtgcatggttgtcgtcagctcgtgtcgtgagatgttgggttaagtcccgcaacgagcgcaacccttattgttagttgccatcattcagttgggcactctagcgagactgccggtaataaaccggaggaaggtggggatgacgtcaaatcatcatgccccttatgacctgggctacacacgtgctacaatggctggtacaacgagtcgcaagtcggtgacggcaagctaatctcttaaagccagtctcagttcggattgtaggctgcaactcgcctacatgaagtcggaatcgctagtaatcgcggatcagcacgccgcggtgaatacgttcccgggccttgtacacaccgcccgtcacaccacgagagtttgtaacacccgaagtcggtgaggtaaccttttaggagccagccgcctaaggtgggatagatgattggggtgaagtcgtaacaaggtagccgtatcggaaggtgcggctggatcacctcctt

SEQ ID NO: 294 - DNA, 1535 bp, artificial sequence
  >GCF_001059235.1_01738 Schaalia_odontolytica
tcggagagtttgatcctggctcaggacgaacgctggcggcgtgcttaacacatgcaagtcgaacgctgaagcccagcttgctgggtggatgagtggcgaacgggtgagtaacacgtgagtaacctgcccccttctttgggataacgcccggaaacgggtgctaatactggatattcactgatcttcgcatgggggttggtggaaaggttttttctggtgggggatgggctcgcggcctatcagcttgttggtggggtgatggcctaccaaggctttgacgggtagccggcctgagagggtgaccggtcacattgggactgagatacggcccagactcctacgggaggcagcagtggggaatattgcacaatgggcgaaagcctgatgcagcgacgccgcgtgagggatgacggccttcgggttgtaaacctctttcgctcatggtcaagccgcagctttgggttgtggtgagggtagtgggtaaagaagcgccggctaactacgtgccagcagccgcggtaatacgtagggcgcgagcgttgtccggaattattgggcgtaaagggcttgtaggcggttggtcgcgtctgccgtgaaatcctctggcttaactgggggcgtgcggtgggtacgggctgacttgagtgcggtaggggagactggaactcctggtgtagcggtggaatgcgcagatatcaggaagaacaccggtggcgaaggcgggtctctgggccgttactgacgctgaggagcgaaagcgtggggagcgaacaggattagataccctggtagtccacgctgtaaacgttgggcactaggtgtgggggccacccgtggtttctgcgccgtagctaacgctttaagtgccccgcctggggagtacggccgcaaggctaaaactcaaaggaattgacgggggcccgcacaagcggcggagcatgcggattaattcgatgcaacgcgaagaaccttaccaaggcttgacatgcacggcgacactgcagagatgtggtggcatttagttggtcgtgtgcaggtggtgcatggttgtcgtcagctcgtgtcgtgagatgttgggttaagtcccgcaacgagcgcaacccttgccctatgttgccagcacgtgatggtggggactcgtgggggactgccggggttaactcggaggaaggtggggatgacgtcaaatcatcatgccccttatgtcttgggcttcacgcatgctacaatggttggtacagagggttgcgatactgtgaggtggagcgaatcccttaaagccagtctcagttcggattggggtctgcaactcgaccccatgaaggtggagtcgctagtaatcgcagatcagcaacgctgcggtgaatacgttctcgggccttgtacacaccgcccgtcacgtcacgaaagttggtaacacccgaagcccatggcctaaccgttttgcggggggagtggtcgaaggtgggattggcgattgggacgaagtcgtaacaaggtagccgtaccggaaggtgcggctggatcacctcctt

SEQ ID NO: 295 - DNA, 1525 bp, artificial sequence
  >GCF_001060545.1_01055 Rothia_mucilaginosa
acggagagtttgattctggctcaggacgaacgctggcggcgtgcttaacacatgcaagtcgaacgatgaagcctagcttgctaggtggattagtggcgaacgggtgagtaatacgtgagtaacctacctttaactctgggataagcctgggaaactgggtctaataccggatacgaccaatctccgcatggggtgttggtggaaagcgttatgtagtggttatagatgggctcacggcctatcagcttgttggtgaggtaacggctcaccaaggcgacgacgggtagccggcctgagagggtgaccggccacactgggactgagacacggcccagactcctacgggaggcagcagtggggaatattgcacaatgggcgcaagcctgatgcagcgacgccgcgtgagggatgacggccttcgggttgtaaacctctgttagcagggaagaagagagattgacggtacctgcagagaaagcgccggctaactacgtgccagcagccgcggtaatacgtagggcgcgagcgttgtccggaattattgggcgtaaagagcttgtaggcggtttgtcgcgtctgctgtgaaagaccggagcttaactccgtgtattgcagtgggtacgggcagactagagtgcagtaggggagactggaattcctggtgtagcggtggaatgcgcagatatcaggaggaacaccgatggcgaaggcaggtctctgggctgtaactgacgctgagaagcgaaagcatggggagcgaacaggattagataccctggtagtccatgccgtaaacgttgggcactaggtgtgggggacattccacgttttccgcgccgtagctaacgcattaagtgccccgcctggggagtacggccgcaaggctaaaactcaaagaaattgacgggggcccgcacaagcggcggagcatgcggattaattcgatgcaacgcgaagaaccttaccaaggcttgacatatactggaccgcatcagagatggtgtttcccttcggggctggtatacaggtggtgcatggttgtcgtcagctcgtgtcgtgagatgttgggttaagtcccgcaacgagcgcaaccctcgttctatgttgccagcacgtaatggtggggactcataggagactgccggggtcaactcggaggaaggtggggatgacgtcaaatcatcatgccccttatgtcttgggcttcacgcatgctacaatggccggtacagagggttgcgatactgtgaggtggagctaatccctaaaagccggtctcagttcggattggggtctgcaactcgaccccatgaagtcggagtcgctagtaatcgcagatcagcaacgctgcggtgaatacgttcccgggccttgtacacaccgcccgtcaagtcacgaaagttggtaacacccaaagccggtggcctaacctttttggagggagccgtctaaggtgggattggcgattgggactaagtcgtaacaaggtagccgtaccggaaggtgcggctggatcacctccttt

SEQ ID NO: 296 - DNA, 1525 bp, artificial sequence
  >GCF_001061665.1_01297 Rothia_mucilaginosa
acggagagtttgattctggctcaggacgaacgctggcggcgtgcttaacacatgcaagtcgaacgatgaagcctagcttgctaggtggattagtggcgaacgggtgagtaatacgtgagtaacctacctttaactctgggataagcctgggaaactgggtctaataccggatacgaccaatctccgcatggggtgttggtggaaagcgttatgtagtggttatagatgggctcacggcctatcagcttgttggtgaggtaacggctcaccaaggcgacgacgggtagccggcctgagagggtgaccggccacactgggactgagacacggcccagactcctacgggaggcagcagtggggaatattgcacaatgggcgcaagcctgatgcagcgacgccgcgtgagggatgacggccttcgggttgtaaacctctgttagcagggaagaagagaaattgacggtacctgcagagaaagcgccggctaactacgtgccagcagccgcggtaatacgtagggcgcgagcgttgtccggaattattgggcgtaaagagcttgtaggcggtttgtcgcgtctgctgtgaaaggccggggcttaaccccgtgtattgcagtgggtacgggcagactagagtgcagtaggggagactggaactcctggtgtagcggtggaatgcgcagatatcaggaagaacaccgatggcgaaggcaggtctctgggctgtaactgacgctgagaagcgaaagcatggggagcgaacaggattagataccctggtagtccatgccgtaaacgttgggcactaggtgtgggggacattccacgttttccgcgccgtagctaacgcattaagtgccccgcctggggagtacggccgcaaggctaaaactcaaagaaattgacgggggcccgcacaagcggcggagcatgcggattaattcgatgcaacgcgaagaaccttaccaaggcttgacatatactggaccgcatcagagatggtgtttcccttcggggctggtatacaggtggtgcatggttgtcgtcagctcgtgtcgtgagatgttgggttaagtcccgcaacgagcgcaaccctcgttctatgttgccagcacgttatggtggggactcataggagactgccggggtcaactcggaggaaggtggggatgacgtcaaatcatcatgccccttatgtcttgggcttcacgcatgctacaatggccggtacagagggttgcgatactgtgaggtggagctaatccctaaaagccggtctcagttcggattggggtctgcaactcgaccccatgaagtcggagtcgctagtaatcgcagatcagcaacgctgcggtgaatacgttcccgggccttgtacacaccgcccgtcaagtcacgaaagttggtaacacccaaagccggtggcctaacctttttggagggagccgtctaaggtgggattggcgattgggactaagtcgtaacaaggtagccgtaccggaaggtgcggctggatcacctccttt

SEQ ID NO: 297 - DNA, 1526 bp, artificial sequence
  >GCF_001062855.1_00451 Rothia_mucilaginosa
acggagagtttgattctggctcaggacgaacgctggcggcgtgcttaacacatgcaagtcgaacgatgaagcctagcttgctaggtggattagtggcgaacgggtgagtaatacgtgagtaacctacctttaactctgggataagcccgggaaactgggtctaataccggatacgaccaatctccgcatggggtgttggtggaaagcgttatgtagtggttatagatgggctcacggcctatcagcttgttggtgaggtaacagctcaccaaggcgacgacgggtagccggcctgagagggtgaccggccacactgggactgagacacggcccagactcctacgggaggcagcagtggggaatattgcacaatgggcgcaagcctgatgcagcgacgccgcgtgagggatgacggccttcgggttgtaaacctctgttagcagggaagaagagagattgacggtacctgcagagaaagcgccggctaactacgtgccagcagccgcggtaatacgtagggcgcgagcgttgtccggaattattgggcgtaaagagcttgtaggcggtttgtcgcgtctgctgtgaaaggccggggcttaactccgtgtattgcagtgggtacgggcagactagagtgcagtaggggagactggaattcctggtgtagcggtggaatgcgcagatatcaggaggaacaccgatggcgaaggcaggtctctgggctgtaactgacgctgagaagcgaaagcatggggagcgaacaggattagataccctggtagtccatgccgtaaacgttgggcactaggtgtgggggacattccacgttttccgcgccgtagctaacgcattaagtgccccgcctggggagtacggccgcaaggctaaaactcaaagaaattgacgggggcccgcacaagcggcggagcatgcggattaattcgatgcaacgcgaagaaccttaccaaggcttgacatatactggaccgcatcagagatggtgtttcccttcggggctggtatacaggtggtgcatggttgtcgtcagctcgtgtcgtgagatgttgggttaagtcccgcaacgagcgcaaccctcgttctatgttgccagcacgttatggtggggactcataggagactgccggggtcaactcggaggaaggtggggatgacgtcaaatcatcatgccccttatgtcttgggcttcacgcatgctacaatggccggtacagagggttgcgatactgtgaggtggagctaatccctaaaagccggtctcagttcggattggggtctgcaactcgaccccatgaagtcggagtcgctagtaatcgcagatcagcaacgctgcggtgaatacgttcccgggccttgtacacaccgcccgtcaagtcacgaaagttggtaacacccaaagccggtggcctaacccttttgggagggagccgtctaaggtgggattggcgattgggactaagtcgtaacaaggtagccgtaccggaaggtgcggctggatcacctccttt

SEQ ID NO: 298 - DNA, 1525 bp, artificial sequence
  >GCF_001063995.1_00787 Rothia_mucilaginosa
acggagagtttgattctggctcaggacgaacgctggcggcgtgcttaacacatgcaagtcgaacgatgaagcctagcttgctaggtggattagtggcgaacgggtgagtaatacgtgagtaacctacctttaactctgggataagcctgggaaactgggtctaataccggatacgaccaatctccgcatggggtgttggtggaaagcgttatgtagtggttatagatgggctcacggcctatcagcttgttggtgaggtaacggctcaccaaggcgacgacgggtagccggcctgagagggtgaccggccacactgggactgagacacggcccagactcctacgggaggcagcagtggggaatattgcacaatgggcgcaagcctgatgcagcgacgccgcgtgagggatgacggccttcgggttgtaaacctctgttagcagggaagaagagagattgacggtacctgcagagaaagcgccggctaactacgtgccagcagccgcggtaatacgtagggcgcgagcgttgtccggaattattgggcgtaaagagcttgtaggcggtttgtcgcgtctgctgtgaaaggccggggcttaaccccgtgtattgcagtgggtacgggcagactagagtgcagtaggggagactggaattcctggtgtagcggtggaatgcgcagatatcaggaggaacaccgatggcgaaggcaggtctctgggctgtaactgacgctgagaagcgaaagcatggggagcgaacaggattagataccctggtagtccatgccgtaaacgttgggcactaggtgtgggggacattccacgttttccgcgccgtagctaacgcattaagtgccccgcctggggagtacggccgcaaggctaaaactcaaagaaattgacgggggcccgcacaagcggcggagcatgcggattaattcgatgcaacgcgaagaaccttaccaaggcttgacatatactggaccgcatcagagatggtgtttcccttcggggctggtatacaggtggtgcatggttgtcgtcagctcgtgtcgtgagatgttgggttaagtcccgcaacgagcgcaaccctcgttctatgttgccagcacgttatggtggggactcataggagactgccggggtcaactcggaggaaggtggggatgacgtcaaatcatcatgccccttatgtcttgggcttcacgcatgctacaatggccggtacagagggttgcgatactgtgaggtggagctaatccctaaaagccggtctcagttcggattggggtctgcaactcgaccccatgaagtcggagtcgctagtaatcgcagatcagcaacgctgcggtgaatacgttcccgggccttgtacacaccgcccgtcaagtcacgaaagttggtaacacccaaagccggtggcctaacctttttggagggagccgtctaaggtgggattggcgattgggactaagtcgtaacaaggtagccgtaccggaaggtgcggctggatcacctccttt

SEQ ID NO: 299 - DNA, 1536 bp, artificial sequence
  >GCF_001064145.1_00659 Schaalia_odontolytica
tcggagagtttgatcctggctcaggacgaacgctggcggcgtgcttaacacatgcaagtcgaacgctgaagcctagcttgctgggtggatgagtggcgaacgggtgagtaacacgtgagtaacctgccctcttctttgggataacgcccggaaacgggtgctaatactggatattcactggccttcgcatgggggttggtggaaaggttttttctggtgggggatgggctcgcggcctatcagcttgttggtggggtgatggcctaccaaggctttgacgggtagccggcctgagagggtgaccggtcacattgggactgagatacggcccagactcctacgggaggcagcagtggggaatattgcacaatgggcgaaagcctgatgcagcgacgccgcgtgagggatggaggccttcgggttgtaaacctctttcgctcatggtcaagccgcaactgtgggttgtggtgagggtagtgggtaaagaagcgccggctaactacgtgccagcagccgcggtaatacgtagggcgcgagcgttgtccggaattattgggcgtaaagggcttgtaggcggttggtcgcgtctgccgtgaaatcctctggcttaactgggggcgtgcggtgggtacgggctgacttgagtgcggtaggggagactggaactcctggtgtagcggtggaatgcgcagatatcaggaagaacaccggtggcgaaggcgggtctctgggccgttactgacgctgaggagcgaaagcgtggggagcgaacaggattagataccctggtagtccacgctgtaaacgttgggcactaggtgtgggggccacccgtggtttctgcgccgtagctaacgctttaagtgccccgcctggggagtacggccgcaaggctaaaactcaaaggaattgacgggggcccgcacaagcggcggagcatgcggattaattcgatgcaacgcgaagaaccttaccaaggcttgacatgcacggcggcactgcagagatgtggtggcatttagttggtcgtgtgcaggtggtgcatggttgtcgtcagctcgtgtcgtgagatgttgggttaagtcccgcaacgagcgcaacccttgccctatgttgccagcacgtgatggtggggactcgtgggggactgccggggttaactcggaggaaggtggggatgacgtcaaatcatcatgccccttatgtcttgggcttcacgcatgctacaatggttggtacagagggttgcgatactgtgaggtggagcgaatcccttaaagccagtctcagttcggattggggtctgcaactcgaccccatgaaggtggagtcgctagtaatcgcagatcagcaacgctgcggtgaatacgttctcgggccttgtacacaccgcccgtcacgtcacgaaagttggtaacacccgaagcccatggcctaaccgtttttgcggggggagtggtcgaaggtgggattggcgattgggacgaagtcgtaacaaggtagccgtaccggaaggtgcggctggatcacctcctt

SEQ ID NO: 300 - DNA, 1525 bp, artificial sequence
  >GCF_001064265.1_01746 Rothia_mucilaginosa
acggagagtttgattctggctcaggacgaacgctggcggcgtgcttaacacatgcaagtcgaacgatgaagcctagcttgctaggtggattagtggcgaacgggtgagtaatacgtgagtaacctacctttaactctgggataagcctgggaaactgggtctaataccggatacgaccaatctccgcatggggtgttggtggaaagcgttatgtagtggttatagatgggctcacggcctatcagcttgttggtgaggtaacggctcaccaaggcgacgacgggtagccggcctgagagggtgaccggccacactgggactgagacacggcccagactcctacgggaggcagcagtggggaatattgcacaatgggcgcaagcctgatgcagcgacgccgcgtgagggatgacggccttcgggttgtaaacctctgttagcagggaagaagagagattgacggtacctgcagagaaagcgccggctaactacgtgccagcagccgcggtaatacgtagggcgcgagcgttgtccggaattattgggcgtaaagagcttgtaggcggtttgtcgcgtctgctgtgaaaggccggagcttaactccgtgtattgcagtgggtacgggcagactagagtgcagtaggggagactggaactcctggtgtagcggtggaatgcgcagatatcaggaagaacaccgatggcgaaggcaggtctctgggctgtaactgacgctgagaagcgaaagcatggggagcgaacaggattagataccctggtagtccatgccgtaaacgttgggcactaggtgtgggggacattccacgttttccgcgccgtagctaacgcattaagtgccccgcctggggagtacggccgcaaggctaaaactcaaagaaattgacgggggcccgcacaagcggcggagcatgcggattaattcgatgcaacgcgaagaaccttaccaaggcttgacatatactggaccgcatcagagatggtgtttcccttcggggctggtatacaggtggtgcatggttgtcgtcagctcgtgtcgtgagatgttgggttaagtcccgcaacgagcgcaaccctcgttctatgttgccagcacgtaatggtggggactcataggagactgccggggtcaactcggaggaaggtggggatgacgtcaaatcatcatgccccttatgtcttgggcttcacgcatgctacaatggccggtacagagggttgcgatactgtgaggtggagctaatccctaaaagccggtctcagttcggattggggtctgcaactcgaccccatgaagtcggagtcgctagtaatcgcagatcagcaacgctgcggtgaatacgttcccgggccttgtacacaccgcccgtcaagtcacgaaagttggtaacacccaaagccggtggcctaacctttttggagggagccgtctaaggtgggattggcgattgggactaagtcgtaacaaggtagccgtaccggaaggtgcggctggatcacctccttt

SEQ ID NO: 301 - DNA, 1526 bp, artificial sequence
  >GCF_001065115.1_00230 Rothia_mucilaginosa
acggagagtttgattctggctcaggacgaacgctggcggcgtgcttaacacatgcaagtcgaacgatgaagcctagcttgctaggtggattagtggcgaacgggtgagtaatacgtgagtaacctacctttaactctgggataagcccgggaaactgggtctaataccggatacgaccaatctccgcatggggtgttggtggaaagcgttatgtagtggttatagatgggctcacggcctatcagcttgttggtgaggtaacggctcaccaaggcgacgacgggtagccggcctgagagggtgaccggccacactgggactgagacacggcccagactcctacgggaggcagcagtggggaatattgcacaatgggcgcaagcctgatgcagcgacgccgcgtgagggatgacggccttcgggttgtaaacctctgttagcagggaagaagagagattgacggtacctgcagagaaagcgccggctaactacgtgccagcagccgcggtaatacgtagggcgcgagcgttgtccggaattattgggcgtaaagagcttgtaggcggtttgtcgcgtctgctgtgaaaggccggggcttaaccccgtgtattgcagtgggtacgggcagactagagtgcagtaggggagactggaattcctggtgtagcggtggaatgcgcagatatcaggaggaacaccgatggcgaaggcaggtctctgggctgtaactgacgctgagaagcgaaagcatggggagcgaacaggattagataccctggtagtccatgccgtaaacgttgggcactaggtgtgggggacattccacgttttccgcgccgtagctaacgcattaagtgccccgcctggggagtacggccgcaaggctaaaactcaaagaaattgacgggggcccgcacaagcggcggagcatgcggattaattcgatgcaacgcgaagaaccttaccaaggcttgacatatactggaccgcatcagagatggtgtttcccttcggggctggtatacaggtggtgcatggttgtcgtcagctcgtgtcgtgagatgttgggttaagtcccgcaacgagcgcaaccctcgttctatgttgccagcacgttatggtggggactcataggagactgccggggtcaactcggaggaaggtggggatgacgtcaaatcatcatgccccttatgtcttgggcttcacgcatgctacaatggccggtacagagggttgcgatactgtgaggtggagctaatccctaaaagccggtctcagttcggattggggtctgcaactcgaccccatgaagtcggagtcgctagtaatcgcagatcagcaacgctgcggtgaatacgttcccgggccttgtacacaccgcccgtcaagtcacgaaagttggtaacacccaaagccggtggcctaacccttttgggagggagccgtctaaggtgggattggcgattgggactaagtcgtaacaaggtagccgtaccggaaggtgcggctggatcacctccttt

SEQ ID NO: 302 - DNA, 1525 bp, artificial sequence
  >GCF_001065135.1_00227 Rothia_mucilaginosa
acggagagtttgattctggctcaggacgaacgctggcggcgtgcttaacacatgcaagtcgaacgatgaagcctagcttgctaggtggattagtggcgaacgggtgagtaatacgtgagtaacctacctttaactctgggataagcctgggaaactgggtctaataccggatacgaccaatctccgcatggagtgttggtggaaagcgttatgtagtggttatagatgggctcacggcctatcagcttgttggtgaggtaacggctcaccaaggcgacgacgggtagccggcctgagagggtgaccggccacactgggactgagacacggcccagactcctacgggaggcagcagtggggaatattgcacaatgggcgcaagcctgatgcagcgacgccgcgtgagggatgacggccttcgggttgtaaacctctgttagcagggaagaagagaaattgacggtacctgcagagaaagcgccggctaactacgtgccagcagccgcggtaatacgtagggcgcgagcgttgtccggaattattgggcgtaaagagcttgtaggcggtttgtcgcgtctgctgtgaaaggccggggcttaaccccgtgtattgcagtgggtacgggcagactagagtgcagtaggggagactggaactcctggtgtagcggtggaatgcgcagatatcaggaagaacaccgatggcgaaggcaggtctctgggctgtaactgacgctgagaagcgaaagcatggggagcgaacaggattagataccctggtagtccatgccgtaaacgttgggcactaggtgtgggggacattccacgttttccgcgccgtagctaacgcattaagtgccccgcctggggagtacggccgcaaggctaaaactcaaagaaattgacgggggcccgcacaagcggcggagcatgcggattaattcgatgcaacgcgaagaaccttaccaaggcttgacatatactggaccgcatcagagatggtgtttcccttcggggctggtatacaggtggtgcatggttgtcgtcagctcgtgtcgtgagatgttgggttaagtcccgcaacgagcgcaaccctcgttctatgttgccagcacgttatggtggggactcataggagactgccggggtcaactcggaggaaggtggggatgacgtcaaatcatcatgccccttatgtcttgggcttcacgcatgctacaatggccggtacagagggttgcgatactgtgaggtggagctaatccctaaaagccggtctcagttcggattggggtctgcaactcgaccccatgaagtcggagtcgctagtaatcgcagatcagcaacgctgcggtgaatacgttcccgggccttgtacacaccgcccgtcaagtcacgaaagttggtaacacccaaagccggtggcctaacctttttggagggagccgtctaaggtgggattggcgattgggactaagtcgtaacaaggtagccgtaccggaaggtgcggctggatcacctccttt

SEQ ID NO: 303 - DNA, 1525 bp, artificial sequence
  >GCF_001067345.1_01512 Rothia_mucilaginosa
acggagagtttgattctggctcaggacgaacgctggcggcgtgcttaacacatgcaagtcgaacgatgaagcctagcttgctaggtggattagtggcgaacgggtgagtaatacgtgagtaacctacctttaactctgggataagcctgggaaactgggtctaataccggatacgaccaatctccgcatggggtgttggtggaaagcgttatgtagtggttatagatgggctcacggcctatcagcttgttggtgaggtaacggctcaccaaggcgacgacgggtagccggcctgagagggtgaccggccacactgggactgagacacggcccagactcctacgggaggcagcagtggggaatattgcacaatgggcgcaagcctgatgcagcgacgccgcgtgagggatgacggccttcgggttgtaaacctctgttagcagggaagaagagagattgacggtacctgcagagaaagcgccggctaactacgtgccagcagccgcggtaatacgtagggcgcgagcgttgtccggaattattgggcgtaaagagcttgtaggcggtttgtcgcgtctgctgtgaaaggccggggcttaactccgtgtattgcagtgggtacgggcagactagagtgcagtaggggagactggaattcctggtgtagcggtggaatgcgcagatatcaggaggaacaccgatggcgaaggcaggtctctgggctgtaactgacgctgagaagcgaaagcatggggagcgaacaggattagataccctggtagtccatgccgtaaacgttgggcactaggtgtgggggacattccacgttttccgcgccgtagctaacgcattaagtgccccgcctggggagtacggccgcaaggctaaaactcaaagaaattgacgggggcccgcacaagcggcggagcatgcggattaattcgatgcaacgcgaagaaccttaccaaggcttgacatatactggaccgcatcagagatggtgtttcccttcggggctggtatacaggtggtgcatggttgtcgtcagctcgtgtcgtgagatgttgggttaagtcccgcaacgagcgcaaccctcgttctatgttgccagcacgttatggtggggactcataggagactgccggggtcaactcggaggaaggtggggatgacgtcaaatcatcatgccccttatgtcttgggcttcacgcatgctacaatggccggtacagagggttgcgatactgtgaggtggagctaatccctaaaagccggtctcagttcggattggggtctgcaactcgaccccatgaagtcggagtcgctagtaatcgcagatcagcaacgctgcggtgaatacgttcccgggccttgtacacaccgcccgtcaagtcacgaaagttggtaacacccaaagccggtggcctaacccttttggagggagccgtctaaggtgggattggcgattgggactaagtcgtaacaaggtagccgtaccggaaggtgcggctggatcacctccttt

SEQ ID NO: 304 - DNA, 1525 bp, artificial sequence
  >GCF_001067855.1_01039 Rothia_mucilaginosa
acggagagtttgattctggctcaggacgaacgctggcggcgtgcttaacacatgcaagtcgaacgatgaagcctagcttgctaggtggattagtggcgaacgggtgagtaatacgtgagtaacctacctttaactctgggataagcccgggaaactgggtctaataccggatacgaccaatctccgcatggggtgttggtggaaagcgttatgtagtggttatagatgggctcacggcctatcagcttgttggtgaggtaacggctcaccaaggcgacgacgggtagccggcctgagagggtgaccggccacactgggactgagacacggcccagactcctacgggaggcagcagtggggaatattgcacaatgggcgcaagcctgatgcagcgacgccgcgtgagggatgacggccttcgggttgtaaacctctgttagcagggaagaagagaaattgacggtacctgcagagaaagcgccggctaactacgtgccagcagccgcggtaatacgtagggcgcgagcgttgtccggaattattgggcgtaaagagcttgtaggcggtttgtcgcgtctgctgtgaaaggccggggcttaactccgtgtattgcagtgggtacgggcagactagagtgcagtaggggagactggaattcctggtgtagcggtggaatgcgcagatatcaggaggaacaccgatggcgaaggcaggtctctgggctgtaactgacgctgagaagcgaaagcatggggagcgaacaggattagataccctggtagtccatgccgtaaacgttgggcactaggtgtgggggacattccacgttttccgcgccgtagctaacgcattaagtgccccgcctggggagtacggccgcaaggctaaaactcaaagaaattgacgggggcccgcacaagcggcggagcatgcggattaattcgatgcaacgcgaagaaccttaccaaggcttgacatatactggaccgcatcagagatggtgtttcccttcggggctggtatacaggtggtgcatggttgtcgtcagctcgtgtcgtgagatgttgggttaagtcccgcaacgagcgcaaccctcgttctatgttgccagcacgttatggtggggactcataggagactgccggggtcaactcggaggaaggtggggatgacgtcaaatcatcatgccccttatgtcttgggcttcacgcatgctacaatggccggtacagagggttgcgatactgtgaggtggagctaatccctaaaagccggtctcagttcggattggggtctgcaactcgaccccatgaagtcggagtcgctagtaatcgcagatcagcaacgctgcggtgaatacgttcccgggccttgtacacaccgcccgtcaagtcacgaaagttggtaacacccaaagccggtggcctaacctttttggagggagccgtctaaggtgggattggcgattgggactaagtcgtaacaaggtagccgtaccggaaggtgcggctggatcacctccttt

SEQ ID NO: 305 - DNA, 1543 bp, artificial sequence
  >GCF_001068775.1_00093 Streptococcus_infantis_group
aatgagagtttgatcctggctcaggacgaacgctggcggcgtgcctaatacatgcaagtagaacgctgaaggaggagcttgctcttctggatgagttgcgaacgggtgagtaacgcgtaggtaacctgcctggtagcgggggataactattggaaacgatagctaataccgcataacagtagatattgcatgatatctgcttgaaaggtgcaattgcatcactaccagatggacctgcgttgtattagctagttggtgaggtaacggctcaccaaggcgacgatacatagccgacctgagagggtgatcggccacactgggactgagacacggcccagactcctacgggaggcagcagtagggaatcttcggcaatggacggaagtctgaccgagcaacgccgcgtgagtgaagaaggttttcggatcgtaaagctctgttgtaagagaagaacgagtgtgagagtggaaagttcacactgtgacggtatcttaccagaaagggacggctaactacgtgccagcagccgcggtaatacgtaggtcccgagcgttgtccggatttattgggcgtaaagcgagcgcaggcggttagataagtctgaagttaaaggctgtggcttaaccatagtacgctttggaaactgtttaacttgagtgcaagaggggagagtggaattccatgtgtagcggtgaaatgcgtagatatatggaggaacaccggtggcgaaagcggctctctggcttgtaactgacgctgaggctcgaaagcgtggggagcaaacaggattagataccctggtagtccacgccgtaaacgatgagtgctaggtgttagaccctttccggggtttagtgccgcagctaacgcattaagcactccgcctggggagtacgaccgcaaggttgaaactcaaaggaattgacgggggcccgcacaagcggtggagcatgtggtttaattcgaagcaacgcgaagaaccttaccaggtcttgacatccctctgacctctctagagatagagatttccttcgggacagaggtgacaggtggtgcatggttgtcgtcagctcgtgtcgtgagatgttgggttaagtcccgcaacgagcgcaacccctattgttagttgccatcattcagttgggcactctagcgagactgccggtaataaaccggaggaaggtggggatgacgtcaaatcatcatgccccttatgacctgggctacacacgtgctacaatggctggtacaacgagtcgcaagtcggtgacggcaagctaatctcttaaagccagtctcagttcggattgtaggctgcaactcgcctacatgaagtcggaatcgctagtaatcgcggatcagcacgccgcggtgaatacgttcccgggccttgtacacaccgcccgtcacaccacgagagtttgtaacacccgaagtcggtgaggtaaccttttaggagccagccgcctaaggtgggatagatgattggggtgaagtcgtaacaaggtagccgtatcggaaggtgcggctggatcacctcctt

SEQ ID NO: 306 - DNA, 1545 bp, artificial sequence
  >GCF_001069335.1_00896 Streptococcus_australis
aatgagagtttgatcctggctcaggatgaacgctggcggcgtgcctaatacatgcaagtagaacgctgaaggaaggagcttgctctttccggatgagttgcgaacgggtgagtaacgcgtaggtaacctgcctggtagcgggggataactattggaaacgatagctaataccgcataacagtagatgttgcatgatatctgcttgaaaggtgcaattgcatcactaccagatggacctgcgttgtattagctagttggtgaggtaacggctcaccaaggcgacgatacatagccgacctgagagggtgatcggccacactgggactgagacacggcccagactcctacgggaggcagcagtagggaatcttcggcaatggacggaagtctgaccgagcaacgccgcgtgagtgaagaaggttttcggatcgtaaagctctgttgtaagagaagaacgagtgtgagagtggaaagttcacactgtgacggtatcttaccagaaagggacggctaactacgtgccagcagccgcggtaatacgtaggtcccgagcgttatccggatttattgggcgtaaagcgagcgcaggcggttagataagtctgaagttaaaggctgtggcttaaccatagtacgctttggaaactgtttaacttgagtgcaagaggggagagtggaattccatgtgtagcggtgaaatgcgtagatatatggaggaacaccggtggcgaaagcggctctctggcttgtaactgacgctgaggctcgaaagcgtggggagcaaacaggattagataccctggtagtccacgccgtaaacgatgagtgctaggtgttgggtcctttccgggactcagtgccgcagctaacgcattaagcactccgcctggggagtacgaccgcaaggttgaaactcaaaggaattgacgggggcccgcacaagcggtggagcatgtggtttaattcgaagcaacgcgaagaaccttaccaggtcttgacatccctctgaccgctctagagatagagctttccttcgggacagaggtgacaggtggtgcatggttgtcgtcagctcgtgtcgtgagatgttgggttaagtcccgcaacgagcgcaacccctattgttagttgccatcattcagttgggcactctagcgagactgccggtaataaaccggaggaaggtggggatgacgtcaaatcatcatgccccttatgacctgggctacacacgtgctacaatggctggtacaacgagtcgcaagtcggtgacggcaagctaatctcttaaagccagtctcagttcggattgtaggctgcaactcgcctacatgaagtcggaatcgctagtaatcgcggatcagcacgccgcggtgaatacgttcccgggccttgtacacaccgcccgtcacaccacgagagtttgtaacacccgaagtcggtgaggtaaccttttaggagccagccgcctaaggtgggatagatgattggggtgaagtcgtaacaaggtagccgtatcggaaggtgcggctggatcacctcctt

SEQ ID NO: 307 - DNA, 1544 bp, artificial sequence
  >GCF_001069785.1_02141 Streptococcus_parasanguinis
aatgagagtttgatcctggctcaggatgaacgctggcggcgtgcctaatacatgcaagtagaacgctgaagcttggtgcttgcaccgagcggatgagttgcgaacgggtgagtaacgcgtaggtaacctgcctcttagcgggggataactattggaaacgatagctaataccgcataaaagtcgatatcacatgatattgatttgaaaggtgcaattgcatcactaagagatggacctgcgttgtattagctagttggtgaggtaacggctcaccaaggcgacgatacatagccgacctgagagggtgatcggccacactgggactgagacacggcccagactcctacgggaggcagcagtagggaatcttcggcaatgggggcaaccctgaccgagcaacgccgcgtgagtgaagaaggttttcggatcgtaaagctctgttgtaagagaagaacgagtgtgagagtggaaagttcacactgtgacggtaacttaccagaaagggacggctaactacgtgccagcagccgcggtaatacgtaggtcccgagcgttatccggatttattgggcgtaaagcgagcgcaggcggttagataagtctgaagttaaaggctgtggcttaaccatagtacgctttggaaactgtttaacttgagtgcagaaggggagagtggaattccatgtgtagcggtgaaatgcgtagatatatggaggaacaccggtggcgaaagcggctctctggtctgtaactgacgctgaggctcgaaagcgtggggagcaaacaggattagataccctggtagtccacgccgtaaacgatgagtgctaggtgttgggtcctttccgggactcagtgccgcagctaacgcattaagcactccgcctggggagtacgaccgcaaggttgaaactcaaaggaattgacgggggcccgcacaagcggtggagcatgtggtttaattcgaagcaacgcgaagaaccttaccaggtcttgacatccctctgaccgctctagagatagagttttccttcgggacagaggtgacaggtggtgcatggttgtcgtcagctcgtgtcgtgagatgttgggttaagtcccgcaacgagcgcaacccctattgttagttgccatcattcagttgggcactctagcgagactgccggtaataaaccggaggaaggtggggatgacgtcaaatcatcatgccccttatgacctgggctacacacgtgctacaatggctggtacaacgagtcgcgagtcggtgacggcaagctaatctcttaaagccagtctcagttcggattgtaggctgcaactcgcctacatgaagtcggaatcgctagtaatcgcggatcagcacgccgcggtgaatacgttcccgggccttgtacacaccgcccgtcacaccacgagagtttgtaacacccgaagtcggtgaggtaaccatttggagccagccgcctaaggtgggatagatgattggggtgaagtcgtaacaaggtagccgtatcggaaggtgcggctggatcacctcctt

SEQ ID NO: 308 - DNA, 1546 bp, artificial sequence
  >GCF_001070445.1_01688 Streptococcus_parasanguinis
taatgagagtttgatcctggctcaggatgaacgctggcggcgtgcctaatacatgcaagtagaacgctgaagcttggtgcttgcaccgagcggatgagttgcgaacgggtgagtaacgcgtaggtaacctgcctcttagcgggggataactattggaaacgatagctaataccgcataaaagacgatatcgcatgatattgatttgaaaggtgcaaatgcatcactaagagatggacctgcgttgtattagctagttggtgaggtaacggctcaccaaggcaacgatacatagccgacctgagagggtgatcggccacactgggactgagacacggcccagactcctacgggaggcagcagtagggaatcttcggcaatgggggcaaccctgaccgagcaacgccgcgtgagtgaagaaggttttcggatcgtaaagctctgttgtaagagaagaacgagtgtgagagtggaaagttcacactgtgacggtaacttaccagaaagggacggctaactacgtgccagcagccgcggtaatacgtaggtcccgagcgttatccggatttattgggcgtaaagcgagcgcaggcggttagataagtctgaagttaaaggctgtggcttaaccatagtacgctttggaaactgtttaacttgagtgcagaaggggagagtggaattccatgtgtagcggtgaaatgcgtagatatatggaggaacaccggtggcgaaagcggctctctggtctgtaactgacgctgaggctcgaaagcgtggggagcaaacaggattagataccctggtagtccacgccgtaaacgatgagtgctaggtgttgggtcctttccgggactcagtgccgcagctaacgcattaagcactccgcctggggagtacgaccgcaaggttgaaactcaaaggaattgacgggggcccgcacaagcggtggagcatgtggtttaattcgaagcaacgcgaagaaccttaccaggtcttgacatccctctgaccgctctagagatagagttttcctttgggacagaggtgacaggtggtgcatggttgtcgtcagctcgtgtcgtgagatgttgggttaagtcccgcaacgagcgcaacccctattgttagttgccatcattgagttgggcactctagcgagactgccggtaataaaccggaggaaggtggggatgacgtcaaatcatcatgccccttatgacctgggctacacacgtgctacaatggctggtacaacgagtcgcgagtcggtgacggcaagctaatctcttaaagccagtctcagttcggattgtaggctgcaactcgcctacatgaagtcggaatcgctagtaatcgcggatcagcacgccgcggtgaatacgttcccgggccttgtacacaccgcccgtcacaccacgagagtttgtaacacccgaagtcggtgaggtaaccgtaaggagccagccgcctaaggtgggatagatgattggggtgaagtcgtaacaaggtagccgtatcggaaggtgcggctggatcacctccttt

SEQ ID NO: 309 - DNA, 1544 bp, artificial sequence
  >GCF_001070595.1_01151 Streptococcus_salivarius_group
aatgagagtttgatcctggctcaggacgaacgctggcggcgtgcctaatacatgcaagtagaacgctgaagagaggagcttgctcttcttggatgagttgcgaacgggtgagtaacgcgtaggtaacctgccttgtagcgggggataactattggaaacgatagctaataccgcataacaatggatgacacatgtcatttatttgaaaggggcaattgctccactacaagatggacctgcgttgtattagctagtaggtgaggtaacggctcacctaggcgacgatacatagccgacctgagagggtgatcggccacactgggactgagacacggcccagactcctacgggaggcagcagtagggaatcttcggcaatgggggcaaccctgaccgagcaacgccgcgtgagtgaagaaggttttcggatcgtaaagctctgttgtaagtcaagaacgagtgtgagagtggaaagttcacactgtgacggtagcttaccagaaagggacggctaactacgtgccagcagccgcggtaatacgtaggtcccgagcgttgtccggatttattgggcgtaaagcgagcgcaggcggtttgataagtctgaagttaaaggctgtggctcaaccatagtttgctttggaaactgtcaaacttgagtgcagaaggggagagtggaattccatgtgtagcggtgaaatgcgtagatatatggaggaacaccggtggcgaaagcggctctctggtctgtaactgacgctgaggctcgaaagcgtggggagcgaacaggattagataccctggtagtccacgccgtaaacgatgagtgctaggtgttggatcctttccgggattcagtgccgcagctaacgcattaagcactccgcctggggagtacgaccgcaaggttgaaactcaaaggaattgacgggggcccgcacaagcggtggagcatgtggtttaattcgaagcaacgcgaagaaccttaccaggtcttgacatcccgatgctatttctagagatagaaagttacttcggtacatcggtgacaggtggtgcatggttgtcgtcagctcgtgtcgtgagatgttgggttaagtcccgcaacgagcgcaacccctattgttagttgccatcattcagttgggcactctagcgagactgccggtaataaaccggaggaaggtggggatgacgtcaaatcatcatgccccttatgacctgggctacacacgtgctacaatggttggtacaacgagttgcaagtcggtgacggcaagctaatctcttaaagccaatctcagttcggattgtaggctgcaactcgcctacatgaagtcggaatcgctagtaatcgcggatcagcacgccgcggtgaatacgttcccgggccttgtacacaccgcccgtcacaccacgagagtttgtaacacccgaagtcggtgaggtaaccttttggagccagccgcctaaggtgggatagatgattggggtgaagtcgtaacaaggtagccgtatcggaaggtgcggctggatcacctcctt

SEQ ID NO: 310 - DNA, 1544 bp, artificial sequence
  >GCF_001071035.1_01792 Streptococcus_parasanguinis
aatgagagtttgatcctggctcaggatgaacgctggcggcgtgcctaatacatgcaagtagaacgctgaagcttggtgcttgcaccgagcggatgagttgcgaacgggtgagtaacgcgtaggtaacctgcctcttagcgggggataactattggaaacgatagctaataccgcataaaagtcgatatcgcatgatattgatttgaaaggtgcaattgcatcactaagagatggacctgcgttgtattagctagttggtgaggtaacggctcaccaaggcgacgatacatagccgacctgagagggtgatcggccacactgggactgagacacggcccagactcctacgggaggcagcagtagggaatcttcggcaatgggggcaaccctgaccgagcaacgccgcgtgagtgaagaaggttttcggatcgtaaagctctgttgtaagagaagaacgagtgtgagagtggaaagttcacactgtgacggtaacttaccagaaagggacggctaactacgtgccagcagccgcggtaatacgtaggtcccgagcgttatccggatttattgggcgtaaagcgagcgcaggcggttagataagtctgaagttaaaggctgtggcttaaccatagtacgctttggaaactgtttaacttgagtgcagaaggggagagtggaattccatgtgtagcggtgaaatgcgtagatatatggaggaacaccggtggcgaaagcggctctctggtctgtaactgacgctgaggctcgaaagcgtggggagcaaacaggattagataccctggtagtccacgccgtaaacgatgagtgctaggtgttgggtcctttccgggactcagtgccgcagctaacgcattaagcactccgcctggggagtacgaccgcaaggttgaaactcaaaggaattgacgggggcccgcacaagcggtggagcatgtggtttaattcgaagcaacgcgaagaaccttaccaggtcttgacatccctctgaccgctctagagatagagttttccttcgggacagaggtgacaggtggtgcatggttgtcgtcagctcgtgtcgtgagatgttgggttaagtcccgcaacgagcgcaacccctattgttagttgccatcattgagttgggcactctagcgagactgccggtaataaaccggaggaaggtggggatgacgtcaaatcatcatgccccttatgacctgggctacacacgtgctacaatggctggtacaacgagtcgcgagtcggtgacggcaagctaatctcttaaagccagtctcagttcggattgtaggctgcaactcgcctacatgaagtcggaatcgctagtaatcgcggatcagcacgccgcggtgaatacgttcccgggccttgtacacaccgcccgtcacaccacgagagtttgtaacacccgaagtcggtgaggtaaccatttggagccagccgcctaaggtgggatagatgattggggtgaagtcgtaacaaggtagccgtatcggaaggtgcggctggatcacctcctt

SEQ ID NO: 311 - DNA, 1452 bp, artificial sequence
  >GCF_001071295.1_00897 Streptococcus_parasanguinis
taatgagagtttgatcctggctcaggatgaacgctggcggcgtgcctaatacatgcaagtagaacgctgaagcttggtgcttgcaccgagcggatgagttgcgaacgggtgagtaacgcgtaggtaacctgcctggtagcgggggataactattggaaacgatagctaataccgcataacagtcgacattgcatgatgttgatttgaaaggggcaattgctccactaccagatggacctgcgttgtattagctagttggtgaggtaacggctcaccaaggcgacgatacatagccgacctgagagggtgatcggccacactgggactgagacacggcccagactcctacgggaggcagcagtagggaatcttcggcaatggacggaagtctgaccgagcaacgccgcgtgagtgaagaaggttttcggatcgtaaagctctgttgtaagagaagaacgagtgtgagagtggaaagttcacactgtgacggtaacttaccagaaagggacggctaactacgtgccagcagccgcggtaatacgtaggtcccgagcgttatccggatttattgggcgtaaagcgagcgcaggcggttagataagtctgaagttaaaggctgtggcttaaccatagtacgctttggaaactgtttaacttgagtgcagaaggggagagtggaattccatgtgtagcggtgaaatgcgtagatatatggaggaacaccggtggcgaaagcggctctctggtctgtaactgacgctgaggctcgaaagcgtggggagcaaacaggattagataccctggtagtccacgccgtaaacgatgagtgctaggtgttgggtcctttccgggactcagtgccgcagctaacgcattaagcactccgcctggggagtacgaccgcaaggttgaaactcaaaggaattgacgggggcccgcacaagcggtggagcatgtggtttaattcgaagcaacgcgaagaaccttaccaggtcttgacatccctctgaccgctctagagatagagttttccttcgggacagaggtgacaggtggtgcatggttgtcgtcagctcgtgtcgtgagatgttgggttaagtcccgcaacgagcgcaacccctattgttagttgccatcatttagttgggcactctagcgagactgccggtaataaaccggaggaaggtggggatgacgtcaaatcatcatgccccttatgacctgggctacacacgtgctacaatggctggtacaacgagtcgcgagtcggtgacggcaagctaatctcttaaagccagtctcagttcggattgtaggctgcaactcgcctacatgaagtcggaatcgctagtaatcgcggatcagcacgccgcggtgaatacgttcccgggccttgtacacaccgcccgtcacaccacgagagtttgtaacacccgaagtcggtgaggtaac

SEQ ID NO: 312 - DNA, 1546 bp, artificial sequence
  >GCF_001072295.1_01149 Streptococcus_parasanguinis
taatgagagtttgatcctggctcaggatgaacgctggcggcgtgcctaatacatgcaagtagaacgctgaagcttggtgcttgcaccgagcggatgagttgcgaacgggtgagtaacgcgtaggtaacctgcctcttagcgggggataactattggaaacgatagctaataccgcataaaagacgatatcgcatgatattgatttgaaaggtgcaaatgcatcactaagagatggacctgcgttgtattagctagttggtgaggtaacggctcaccaaggcgacgatacatagccgacctgagagggtgatcggccacactgggactgagacacggcccagactcctacgggaggcagcagtagggaatcttcggcaatgggggcaaccctgaccgagcaacgccgcgtgagtgaagaaggttttcggatcgtaaagctctgttgtaagagaagaacgagtgtgagagtggaaagttcacactgtgacggtaacttaccagaaagggacggctaactacgtgccagcagccgcggtaatacgtaggtcccgagcgttatccggatttattgggcgtaaagcgagcgcaggcggttagataagtctgaagttaaaggctgtggcttaaccatagtacgctttggaaactgtttaacttgagtgcagaaggggagagtggaattccatgtgtagcggtgaaatgcgtagatatatggaggaacaccggtggcgaaagcggctctctggtctgtaactgacgctgaggctcgaaagcgtggggagcaaacaggattagataccctggtagtccacgccgtaaacgatgagtgctaggtgttgggtcctttccgggactcagtgccgcagctaacgcattaagcactccgcctggggagtacgaccgcaaggttgaaactcaaaggaattgacgggggcccgcacaagcggtggagcatgtggtttaattcgaagcaacgcgaagaaccttaccaggtcttgacatccctctgaccgctctagagatagagttttccttcgggacagaggtgacaggtggtgcatggttgtcgtcagctcgtgtcgtgagatgttgggttaagtcccgcaacgagcgcaacccctattgttagttgccatcattcagttgggcactctagcgagactgccggtaataaaccggaggaaggtggggatgacgtcaaatcatcatgccccttatgacctgggctacacacgtgctacaatggctggtacaacgagtcgcgagtcggtgacggcaagctaatctcttaaagccagtctcagttcggattgtaggctgcaactcgcctacatgaagtcggaatcgctagtaatcgcggatcagcacgccgcggtgaatacgttcccgggccttgtacacaccgcccgtcacaccacgagagtttgtaacacccgaagtcggtgaggtaaccatttggagccagccgcctaaggtgggatagatgattggggtgaagtcgtaacaaggtagccgtatcggaaggtgcggctggatcacctccttt

SEQ ID NO: 313 - DNA, 1545 bp, artificial sequence
  >GCF_001072385.1_00427 Streptococcus_australis
aatgagagtttgatcctggctcaggatgaacgctggcggcgtgcctaatacatgcaagtagaacgctgaaggaaggagcttgctctttccggatgagttgcgaacgggtgagtaacgcgtaggtaacctgcctggtagcgggggataactattggaaacgatagctaataccgcataacagtagatattgcatgatatctgcttgaaaggggcaattgctccactaccagatggacctgcgttgtattagctagttggtgaggtaacggctcaccaaggcgacgatacatagccgacctgagagggtgatcggccacactgggactgagacacggcccagactcctacgggaggcagcagtagggaatcttcggcaatggacggaagtctgaccgagcaacgccgcgtgagtgaagaaggttttcggatcgtaaagctctgttgtaagagaagaacgagtgtgagagtggaaagttcacactgtgacggtatcttaccagaaagggacggctaactacgtgccagcagccgcggtaatacgtaggtcccgagcgttatccggatttattgggcgtaaagcgagcgcaggcggttagataagtctgaagttaaaggctgtggcttaaccatagtacgctttggaaactgtttaacttgagtgcaagaggggagagtggaattccatgtgtagcggtgaaatgcgtagatatatggaggaacaccggtggcgaaagcggctctctggcttgtaactgacgctgaggctcgaaagcgtggggagcaaacaggattagataccctggtagtccacgccgtaaacgatgagtgctaggtgttgggtcctttccgggactcagtgccgcagctaacgcattaagcactccgcctggggagtacgaccgcaaggttgaaactcaaaggaattgacgggggcccgcacaagcggtggagcatgtggtttaattcgaagcaacgcgaagaaccttaccaggtcttgacatccctctgaccgctctagagatagagctttccttcgggacagaggtgacaggtggtgcatggttgtcgtcagctcgtgtcgtgagatgttgggttaagtcccgcaacgagcgcaacccctattgttagttgccatcattcagttgggcactctagcgagactgccggtaataaaccggaggaaggtggggatgacgtcaaatcatcatgccccttatgacctgggctacacacgtgctacaatggctggtacaacgagtcgcaagtcggtgacggcaagctaatctcttaaagccagtctcagttcggattgtaggctgcaactcgcctacatgaagtcggaatcgctagtaatcgcggatcagcacgccgcggtgaatacgttcccgggccttgtacacaccgcccgtcacaccacgagagtttgtaacacccgaagtcggtgaggtaaccttttaggagccagccgcctaaggtgggatagatgattggggtgaagtcgtaacaaggtagccgtatcggaaggtgcggctggatcacctcctt

SEQ ID NO: 314 - DNA, 1546 bp, artificial sequence
  >GCF_001072435.1_01594 Streptococcus_parasanguinis
taatgagagtttgatcctggctcaggatgaacgctggcggcgtgcctaatacatgcaagtagaacgctgaagcttggtgcttgcaccgagcggatgagttgcgaacgggtgagtaacgcgtaggtaacctgcctcttagcgggggataactattggaaacgatagctaataccgcataaaagtcgacatcgcatgatgttgacttgaaaggtgcaattgcatcactaagagatggacctgcgttgtattagctagttggtgaggtaacggctcaccaaggcgacgatacatagccgacctgagagggtgatcggccacactgggactgagacacggcccagactcctacgggaggcagcagtagggaatcttcggcaatgggggcaaccctgaccgagcaacgccgcgtgagtgaagaaggttttcggatcgtaaagctctgttgtaagagaagaacgagtgtgagagtggaaagttcacactgtgacggtaacttaccagaaagggacggctaactacgtgccagcagccgcggtaatacgtaggtcccgagcgttatccggatttattgggcgtaaagcgagcgcaggcggttagataagtctgaagttaaaggctgtggcttaaccatagtacgctttggaaactgtttaacttgagtgcagaaggggagagtggaattccatgtgtagcggtgaaatgcgtagatatatggaggaacaccggtggcgaaagcggctctctggtctgtaactgacgctgaggctcgaaagcgtggggagcaaacaggattagataccctggtagtccacgccgtaaacgatgagtgctaggtgttgggtcctttccgggactcagtgccgcagctaacgcattaagcactccgcctggggagtacgaccgcaaggttgaaactcaaaggaattgacgggggcccgcacaagcggtggagcatgtggtttaattcgaagcaacgcgaagaaccttaccaggtcttgacatccctctgaccgctctagagatagagttttccttcgggacagaggtgacaggtggtgcatggttgtcgtcagctcgtgtcgtgagatgttgggttaagtcccgcaacgagcgcaacccctattgttagttgccatcattgagttgggcactctagcgagactgccggtaataaaccggaggaaggtggggatgacgtcaaatcatcatgccccttatgacctgggctacacacgtgctacaatggctggtacaacgagtcgcgagtcggtgacggcaagctaatctcttaaagccagtctcagttcggattgtaggctgcaactcgcctacatgaagtcggaatcgctagtaatcgcggatcagcacgccgcggtgaatacgttcccgggccttgtacacaccgcccgtcacaccacgagagtttgtaacacccgaagtcggtgaggtaaccatttggagccagccgcctaaggtgggatagatgattggggtgaagtcgtaacaaggtagccgtatcggaaggtgcggctggatcacctccttt

SEQ ID NO: 315 - DNA, 1535 bp, artificial sequence
  >GCF_001072465.1_01762 Schaalia_odontolytica
tcggagagtttgatcctggctcaggacgaacgctggcggcgtgcttaacacatgcaagtcgaacgctgaagcccagcttgctgggtggatgagtggcgaacgggtgagtaacacgtgagtaacctgcccccttctttgggataacgcccggaaacgggtgctaatactggatattcactggccttcgcatgggggttggtggaaaggttttttctggtgggggatgggctcgcggcctatcagcttgttggtggggtgatggcctaccaaggctttgacgggtagccggcctgagagggtgaccggtcacattgggactgagatacggcccagactcctacgggaggcagcagtggggaatattgcacaatgggcgaaagcctgatgcagcgacgccgcgtgagggatgacggccttcgggttgtaaacctctttcgctcatggtcaagccgcaacagtggttgtggtgagggtagtgggtaaagaagcgccggctaactacgtgccagcagccgcggtaatacgtagggcgcgagcgttgtccggaattattgggcgtaaagggcttgtaggcggttggtcgcgtctgccgtgaaatcctctggcttaactgggggcgtgcggtgggtacgggctgacttgagtgcggtaggggagactggaactcctggtgtagcggtggaatgcgcagatatcaggaagaacaccggtggcgaaggcgggtctctgggccgttactgacgctgaggagcgaaagcgtggggagcgaacaggattagataccctggtagtccacgctgtaaacgttgggcactaggtgtgggggccacccgtggtttctgcgccgtagctaacgctttaagtgccccgcctggggagtacggccgcaaggctaaaactcaaaggaattgacgggggcccgcacaagcggcggagcatgcggattaattcgatgcaacgcgaagaaccttaccaaggcttgacatgcacggcgacactgcagagatgtggtggcatttagttggtcgtgtgcaggtggtgcatggttgtcgtcagctcgtgtcgtgagatgttgggttaagtcccgcaacgagcgcaacccttgccctatgttgccagcacgtgatggtggggactcgtgggggactgccggggttaactcggaggaaggtggggatgacgtcaaatcatcatgccccttatgtcttgggcttcacgcatgctacaatggttggtacagagggttgcgatactgtgaggtggagcgaatcccttaaagccagtctcagttcggattggggtctgcaactcgaccccatgaaggtggagtcgctagtaatcgcagatcagcaacgctgcggtgaatacgttctcgggccttgtacacaccgcccgtcacgtcacgaaagttggtaacacccgaagcccatggcctaaccgttttgcggggggagtggtcgaaggtgggattggcgattgggacgaagtcgtaacaaggtagccgtaccggaaggtgcggctggatcacctccttt

SEQ ID NO: 316 - DNA, 1545 bp, artificial sequence
  >GCF_001072745.1_01406 Streptococcus_australis
  misc_feature (73)..(75): n is a, c, g, or t
  misc_feature (78)..(78): n is a, c, g, or t
  misc_feature (85)..(85): n is a, c, g, or t
  misc_feature (87)..(91): n is a, c, g, or t
taatgagagtttgatcctggctcaggatgaacgctggcggcgtgcctaatacatgcaagtagaacgctgaagnnnggngcttgcncnnnnnggatgagttgcgaacgggtgagtaacgcgtaggtaacctgcctggtagcgggggataactattggaaacgatagctaataccgcataacagtagatgttgcatgacaactatttgaaaggggcaattgctccactaccagatggacctgcgttgtattagctagttggtgaggtaacggctcaccaaggcgacgatacatagccgacctgagagggtgatcggccacactgggactgagacacggcccagactcctacgggaggcagcagtagggaatcttcggcaatggacggaagtctgaccgagcaacgccgcgtgagtgaagaaggttttcggatcgtaaagctctgttgtaagagaagaacgagtgtgagagtggaaagttcacactgtgacggtatcttaccagaaagggacggctaactacgtgccagcagccgcggtaatacgtaggtcccgagcgttatccggatttattgggcgtaaagcgagcgcaggcggttagataagtctgaagttaaaggctgtggcttaaccatagtacgctttggaaactgtttaacttgagtgcagaaggggagagtggaattccatgtgtagcggtgaaatgcgtagatatatggaggaacaccggtggcgaaagcggctctctggtctgtaactgacgctgaggctcgaaagcgtggggagcaaacaggattagataccctggtagtccacgccgtaaacgatgagtgctaggtgttgggtcctttccgggactcagtgccgcagctaacgcattaagcactccgcctggggagtacgaccgcaaggttgaaactcaaaggaattgacgggggcccgcacaagcggtggagcatgtggtttaattcgaagcaacgcgaagaaccttaccaggtcttgacatccctctgatcgctctagagatagagttttccttcgggacagaggtgacaggtggtgcatggttgtcgtcagctcgtgtcgtgagatgttgggttaagtcccgcaacgagcgcaacccctattgttagttgccatcattcagttgggcactctagcgagactgccggtaataaaccggaggaaggtggggatgacgtcaaatcatcatgccccttatgacctgggctacacacgtgctacaatggctggtacaacgagtcgcaagtcggtgacggcaagctaatctcttaaagccagtctcagttcggattgtaggctgcaactcgcctacatgaagtcggaatcgctagtaatcgcggatcagcacgccgcggtgaatacgttcccgggccttgtacacaccgcccgtcacaccacgagagtttgtaacacccgaagtcggtgaggtaaccatttggagccagccgcctaaggtgggatagatgattggggtgaagtcgtaacaaggtagccgtatcggaaggtgcggctggatcacctcctt

SEQ ID NO: 317 - DNA, 1543 bp, artificial sequence
  >GCF_001072925.1_00677 Streptococcus_infantis_group
aatgagagtttgatcctggctcaggacgaacgctggcggcgtgcctaatacatgcaagtagaacgctgaaggaggagcttgcttctctggatgagttgcgaacgggtgagtaacgcgtaggtaacctgcctggtagcgggggataactattggaaacgatagctaataccgcataacagtagatattgcatgatatctgcttgaaaggtgcaattgcatcactaccagatggacctgcgttgtattagctagttggtggggtaacggctcaccaaggcgacgatacatagccgacctgagagggtgatcggccacactgggactgagacacggcccagactcctacgggaggcagcagtagggaatcttcggcaatggacggaagtctgaccgagcaacgccgcgtgagtgaagaaggttttcggatcgtaaagctctgttgtaagagaagaacgagtgtgagagtggaaagttcacactgtgacggtatcttaccagaaagggacggctaactacgtgccagcagccgcggtaatacgtaggtcccgagcgttgtccggatttattgggcgtaaagcgagcgcaggcggttagataagtctgaagttaaaggctgtggcttaaccatagtacgctttggaaactgtttaacttgagtgcaagaggggagagtggaattccatgtgtagcggtgaaatgcgtagatatatggaggaacaccggtggcgaaagcggctctctggcttgtaactgacgctgaggctcgaaagcgtggggagcaaacaggattagataccctggtagtccacgccgtaaacgatgagtgctaggtgttagaccctttccggggtttagtgccgtagctaacgcattaagcactccgcctggggagtacgaccgcaaggttgaaactcaaaggaattgacgggggcccgcacaagcggtggagcatgtggtttaattcgaagcaacgcgaagaaccttaccaggtcttgacatccctctgaccgttctagagatagagctttccttcgggacagaggtgacaggtggtgcatggttgtcgtcagctcgtgtcgtgagatgttgggttaagtcccgcaacgagcgcaacccctattgttagttgccatcatttagttgggcactctagcgagactgccggtaataaaccggaggaaggtggggatgacgtcaaatcatcatgccccttatgacctgggctacacacgtgctacaatggctggtacaacgagtcgcaagtcggtgacggcaagctaatctcttaaagccagtctcagttcggattgtaggctgcaactcgcctacatgaagtcggaatcgctagtaatcgcggatcagcacgccgcggtgaatacgttcccgggccttgtacacaccgcccgtcacaccacgagagtttgtaacacccgaagtcggtgaggtaaccttttaggagccagccgcctaaggtgggatagatgattggggtgaagtcgtaacaaggtagccgtatcggaaggtgcggctggatcacctcctt

SEQ ID NO: 318 - DNA, 1543 bp, artificial sequence
  >GCF_001073085.1_00347 Streptococcus_infantis_group
aatgagagtttgatcctggctcaggacgaacgctggcggcgtgcctaatacatgcaagtagaacgctgaaggaggagcttgcttctccggatgagttgcgaacgggtgagtaacgcgtaggtaacctgcctggtagcgggggataactattggaaacgatagctaataccgcataacagtagatattgcatgatatctgcttgaaaggtgcaaatgcatcactaccagatggacctgcgttgtattagctagttggtgaagtaacggctcaccaaggcgacgatacatagccgacctgagagggtgatcggccacactgggactgagacacggcccagactcctacgggaggcagcagtagggaatcttcggcaatggacggaagtctgaccgagcaacgccgcgtgagtgaagaaggttttcggatcgtaaagctctgttgtaagagaagaacgagtgtgagagtggaaagttcacactgtgacggtatcttaccagaaagggacggctaactacgtgccagcagccgcggtaatacgtaggtcccgagcgttgtccggatttattgggcgtaaagcgagcgcaggcggttagataagtctgaagttaaaggctgtggcttaaccatagtacgctttggaaactgtttaacttgagtgcaagaggggagagtggaattccatgtgtagcggtgaaatgcgtagatatatggaggaacaccggtggcgaaagcggctctctggcttgtaactgacgctgaggctcgaaagcgtggggagcaaacaggattagataccctggtagtccacgccgtaaacgatgagtgctaggtgttagaccctttccggggtttagtgccgtagctaacgcattaagcactccgcctggggagtacgaccgcaaggttgaaactcaaaggaattgacgggggcccgcacaagcggtggagcatgtggtttaattcgaagcaacgcgaagaaccttaccaggtcttgacatccctctgaccgctctagagatagagttttccttcgggacagaggtgacaggtggtgcatggttgtcgtcagctcgtgtcgtgagatgttgggttaagtcccgcaacgagcgcaacccctattgttagttgccatcattcagttgggcactctagcgagactgccggtaataaaccggaggaaggtggggatgacgtcaaatcatcatgccccttatgacctgggctacacacgtgctacaatggctggtacaacgagtcgcaagtcggtgacgacaagctaatctcttaaagccagtctcagttcggattgtaggctgcaactcgcctacatgaagtcggaatcgctagtaatcgcggatcagcacgccgcggtgaatacgttcccgggccttgtacacaccgcccgtcacaccacgagagtttgtaacacccgaagtcggtgaggtaaccttataggagccagccgcctaaggtgggatagatgattggggtgaagtcgtaacaaggtagccgtatcggaaggtgcggctggatcacctcctt

SEQ ID NO: 319 - DNA, 1546 bp, artificial sequence
  >GCF_001073155.1_00224 Streptococcus_parasanguinis
taatgagagtttgatcctggctcaggatgaacgctggcggcgtgcctaatacatgcaagtagaacgctgaagcttggtgcttgcaccgagcggaagagttgcgaacgggtgagtaacgcgtaggtaacctgcctcttagcgggggataactattggaaacgatagctaataccgcataaaagtcgacattgcatgatgttgatttgaaaggtgcaattgcatcactaagagatggacctgcgttgtattagctagttggtgaggtaacggctcaccaaggcgacgatacatagccgacctgagagggtgatcggccacactgggactgagacacggcccagactcctacgggaggcagcagtagggaatcttcggcaatgggggcaaccctgaccgagcaacgccgcgtgagtgaagaaggttttcggatcgtaaagctctgttgtaagagaagaacgagtgtgagagtggaaagttcacactgtgacggtaacttaccagaaagggacggctaactacgtgccagcagccgcggtaatacgtaggtcccgagcgttatccggatttattgggcgtaaagcgagcgcaggcggttagataagtctgaagttaaaggctgtggcttaaccatagtacgctttggaaactgtttaacttgagtgcagaaggggagagtggaattccatgtgtagcggtgaaatgcgtagatatatggaggaacaccggtggcgaaagcggctctctggtctgtaactgacgctgaggctcgaaagcgtggggagcaaacaggattagataccctggtagtccacgccgtaaacgatgagtgctaggtgttgggtcctttccgggactcagtgccgcagctaacgcattaagcactccgcctggggagtacgaccgcaaggttgaaactcaaaggaattgacgggggcccgcacaagcggtggagcatgtggtttaattcgaagcaacgcgaagaaccttaccaggtcttgacatccctctgaccgctctagagatagagttttccttcgggacagaggtgacaggtggtgcatggttgtcgtcagctcgtgtcgtgagatgttgggttaagtcccgcaacgagcgcaacccctattgttagttgccatcattgagttgggcactctagcgagactgccggtaataaaccggaggaaggtggggatgacgtcaaatcatcatgccccttatgacctgggctacacacgtgctacaatggctggtacaacgagtcgcgagtcggtgacggcaagctaatctcttaaagccagtctcagttcggattgtaggctgcaactcgcctacatgaagtcggaatcgctagtaatcgcggatcagcacgccgcggtgaatacgttcccgggccttgtacacaccgcccgtcacaccacgagagtttgtaacacccgaagtcggtgaggtaaccgtaaggagccagccgcctaaggtgggatagatgattggggtgaagtcgtaacaaggtagccgtatcggaaggtgcggctggatcacctccttt

SEQ ID NO: 320 - DNA, 1542 bp, artificial sequence
  >GCF_001074155.1_00094 Streptococcus_infantis_group
aatgagagtttgatcctggctcaggacgaacgctggcggcgtgcctaatacatgcaagtagaacgctgaaggaggagcttgctcttctggatgagttgcgaacgggtgagtaacgcgtaggtaacctgcctggtagcgggggataactattggaaacgatagctaataccgcataacagtagatgtcgcatgacatttgcttaaaaggtgcaattgcatcactaccagatggacctgcgttgtattagctagttggtgaggtaacggctcaccaaggcaacgatacatagccgacctgagagggtgatcggccacactgggactgagacacggcccagactcctacgggaggcagcagtagggaatcttcggcaatggacggaagtctgaccgagcaacgccgcgtgagtgaagaaggttttcggatcgtaaagctctgttgtaagagaagaacgagtgtgagagtggaaagttcacactgtgacggtatcttaccagaaagggacggctaactacgtgccagcagccgcggtaatacgtaggtcccgagcgttgtccggatttattgggcgtaaagcgagcgcaggcggttagataagtctgaagttaaaggctgtggcttaaccatagtacgctttggaaactgtttaacttgagtgcaagaggggagagtggaattccatgtgtagcggtgaaatgcgtagatatatggaggaacaccggtggcgaaagcggctctctggcttgtaactgacgctgaggctcgaaagcgtggggagcaaacaggattagataccctggtagtccacgccgtaaacgatgagtgctaggtgttagaccctttccggggtttagtgccgtagctaacgcattaagcactccgcctggggagtacgaccgcaaggttgaaactcaaaggaattgacgggggcccgcacaagcggtggagcatgtggtttaattcgaagcaacgcgaagaaccttaccaggtcttgacatccctctgaccgctctagagatagagttttccttcgggacagaggtgacaggtggtgcatggttgtcgtcagctcgtgtcgtgagatgttgggttaagtcccgcaacgagcgcaacccctattgttagttgccatcatttagttgggcactctagcgagactgccggtaataaaccggaggaaggtggggatgacgtcaaatcatcatgccccttatgacctgggctacacacgtgctacaatggctggtacaacgagtcgcaagtcggtgacgacaagctaatctcttaaagccagtctcagttcggattgtaggctgcaactcgcctacatgaagtcggaatcgctagtaatcgcggatcagcacgccgcggtgaatacgttcccgggccttgtacacaccgcccgtcacaccacgagagtttgtaacacccgaagtcggtgaggtaaccatttggagccagccgcctaaggtgggatagatgattggggtgaagtcgtaacaaggtagccgtatcggaaggtgcggctggatcacctcctt

SEQ ID NO: 321 - DNA, 1553 bp, artificial sequence
  >GCF_001074415.1_01353 Streptococcus_gordonii
aatgagagtttgatcctggctcaggacgaacgctggcggcgtgcctaatacatgcaagtagaacgcacagtttataccgtagcttgctacaccatagactgtgagttgcgaacgggtgagtaacgcgtaggtaacctgcctggtagcgggggataactattggaaacgatagctaataccgcataatattgattattgcatgataattgattgaaagatgctattgcatcactaccagatggacctgcgttgtattagctagtaggtgaggtaacggctcacctaggcgacgatacatagccgacctgagagggtgatcggccacactgggactgagacacggcccagactcctacgggaggcagcagtagggaatcttcggcaatggacgaaagtctgaccgagcaacgccgcgtgagtgaagaaggttttcggatcgtaaagctctgttgtaagagaagaacgggtgtgagagtggaaagttcacactgtgacggtatcttaccagaaagggacggctaactacgtgccagcagccgcggtaatacgtaggtcccgagcgttgtccggatttattgggcgtaaagcgagcgcaggcggttagataagtctgaagttaaaggctgtggcttaaccatagtacgctttggaaactgtttaacttgagtgcagaaggggagagtggaattccatgtgtagcggtgaaatgcgtagatatatggaggaacaccggtggcgaaagcggctctctggtctgtaactgacgctgaggctcgaaagcgtggggagcgaacaggattagataccctggtagtccacgccgtaaacgatgagtgctaggtgttaggccctttccggggcttagtgccgcagctaacgcattaagcactccgcctggggagtacgaccgcaaggttgaaactcaaaggaattgacgggggcccgcacaagcggtggagcatgtggtttaattcgaagcaacgcgaagaaccttaccaggtcttgacatcccgatgcccgctctagagatagagttttacttcggtacatcggtgacaggtggtgcatggttgtcgtcagctcgtgtcgtgagatgttgggttaagtcccgcaacgagcgcaacccttattgttagttgccatcattcagttgggcactctagcgagactgccggtaataaaccggaggaaggtggggatgacgtcaaatcatcatgccccttatgacctgggctacacacgtgctacaatggctggtacaacgagtcgcaagtcggtgacggcaagctaatctcttaaagccagtctcagttcggattgtaggctgcaactcgcctacatgaagtcggaatcgctagtaatcgcggatcagcacgccgcggtgaatacgttcccgggccttgtacacaccgcccgtcacaccacgagagtttgtaacacccgaagtcggtgaggtaaccttttaggagccagccgcctaaggtgggatagatgattggggtgaagtcgtaacaaggtagccgtatcggaaggtgcggctggatcacctcctt

SEQ ID NO: 322 - DNA, 1546 bp, artificial sequence
  >GCF_001074805.1_01805 Streptococcus_parasanguinis
taatgagagtttgatcctggctcaggatgaacgctggcggcgtgcctaatacatgcaagtagaacgctgaagcttggtgcttgcaccgagcggatgagttgcgaacgggtgagtaacgcgtaggtaacctgcctggtagcgggggataactattggaaacgatagctaataccgcataacagtcgacattgcatgatgttgatttgaaaggggcaaatgctccactaccagatggacctgcgttgtattagctagttggtgaggtaacggctcaccaaggcgacgatacatagccgacctgagagggtgatcggccacactgggactgagacacggcccagactcctacgggaggcagcagtagggaatcttcggcaatggacggaagtctgaccgagcaacgccgcgtgagtgaagaaggttttcggatcgtaaagctctgttgtaagagaagaacgagtgtgagagtggaaagttcacactgtgacggtaacttaccagaaagggacggctaactacgtgccagcagccgcggtaatacgtaggtcccgagcgttatccggatttattgggcgtaaagcgagcgcaggcggttagataagtctgaagttaaaggctgtggcttaaccatagtacgctttggaaactgtttaacttgagtgcagaaggggagagtggaattccatgtgtagcggtgaaatgcgtagatatatggaggaacaccggtggcgaaagcggctctctggtctgtaactgacgctgaggctcgaaagcgtggggagcaaacaggattagataccctggtagtccacgccgtaaacgatgagtgctaggtgttgggtcctttccgggactcagtgccgcagctaacgcattaagcactccgcctggggagtacgaccgcaaggttgaaactcaaaggaattgacgggggcccgcacaagcggtggagcatgtggtttaattcgaagcaacgcgaagaaccttaccaggtcttgacatccctctgaccgctctagagatagagttttccttcgggacagaggtgacaggtggtgcatggttgtcgtcagctcgtgtcgtgagatgttgggttaagtcccgcaacgagcgcaacccctattgttagttgccatcattcagttgggcactctagcgagactgccggtaataaaccggaggaaggtggggatgacgtcaaatcatcatgccccttatgacctgggctacacacgtgctacaatggctggtacaacgagtcgcgagtcggtgacggcaagctaatctcttaaagccagtctcagttcggattgtaggctgcaactcgcctacatgaagtcggaatcgctagtaatcgcggatcagcacgccgcggtgaatacgttcccgggccttgtacacaccgcccgtcacaccacgagagtttgtaacacccgaagtcggtgaggtaaccatttggagccagccgcctaaggtgggatagatgattggggtgaagtcgtaacaaggtagccgtatcggaaggtgcggctggatcacctccttt

SEQ ID NO: 323 - DNA, 1521 bp, artificial sequence; identical to SEQ ID NO: 54
  >GCF_001405855.1_01268 Alistipes_onderdonkii

SEQ ID NO: 324 - DNA, 1526 bp, artificial sequence
  >GCF_001486165.1_00012 Bittarella_massiliensis
ataaagagtttgatcctggctcaggacgaacgctggcggcgcgcctaacacatgcaagtcgaacggacacatccgacggaatagcttgctaggaagatggatgttgttagtggcggacgggtgagtaacacgtgagcaacctgcctcggagtgggggacaacagttggaaacgactgctaataccgcatacggtggtcgggggacatcccctggctaagaaaggatctatgatccgctctgagatgggctcgcgtctgattagctagttggcggggtaacggcccaccaaggcaacgatcagtagccggactgagaggttgaacggccacattgggactgagacacggcccagactcctacgggaggcagcagtggggaatattgcacaatggggggaaccctgatgcagcgacgccgcgtgagggaagaaggttttcggattgtaaacctctgtcttgtgggacgataatgacggtaccacaggaggaagccatggctaactacgtgccagcagccgcggtaatacgtagatggcgagcgttgtccggaattactgggtgtaaagggagtgtaggcgggatcataagttgcgtgtgaaatgcaggggctcaacccctgaactgcgcgcaaaactgtggttcttgagtgaagtagaggcaggcggaattcccggtgtagcggtggaatgcgtagatatcgggaggaacaccagtggcgaaggcggcctgctgggcttttactgacgctgaggctcgaaagcatggggagcaaacaggattagataccctggtagtccatgccgtaaacgatgattactaggtgtggggggataaccccctccgtgccggagttaacacaataagtaatccacctggggagtacgaccgcaaggttgaaactcaaaggaattgacgggggcccgcacaagcagtggagtatgtggtttaattcgaagcaacgcgaaaaaccttaccaggtcttgacatctatcgctatcccaagagattgggagttcccttcggggacggtaagacaggtggtgcatggttgtcgtcagctcgtgtcgtgagatgttgggttaagtcccgcaacgagcgcaacccttactgttagttgctacgcaagagcactctaacgggactgccgttgacaaaacggaggaaggtggggatgacgtcaaatcatcatgccctttatgacctgggctacacacgtactacaatggccgcaaacaacgagcagcgaaaccgcgaggtggagcgaatctataaaagcggtctcagttcggattgcaggctgcaactcgcctgcatgaagtcggaattgctagtaatcgcggatcagcatgccgcggtgaatacgttcccgggccttgtacacaccgcccgtcacaccatgagagccggtaacacccgaagtcagtagtctaaccgcaagggggacgctgccgaaggtggggctggtgattggggtgaagtcgtaacaaggtagccgtatcggaaggtgcggctggatcacctccttt

SEQ ID NO: 325 - DNA, 850 bp, artificial sequence
  >GCF_001487165.1_00006 Blautia_luti_group
  misc_feature (34)..(34): n is a, c, g, or t
gatatgataaagtattcaagtcgtcaacaaaatngaaggcggcttactggacggtaactgacgttgaggctcgaaagcgtggggagcaaacaggattagataccctggtagtccacgcggtaaacgatgaatgctaggtgtcggggagcaaagctcttcggtgccgccgcaaacgcattaagcattccacctggggagtacgttcgcaagaatgaaactcaaaggaattgacggggacccgcacaagcggtggagcatgtggtttaattcgaagcaacgcgaagaaccttaccaagtcttgacatccttctgaccggaacttaaccgttccttcccttcggggcagaagtgacaggtggtgcatggttgtcgtcagctcgtgtcgtgagatgttgggttaagtcccgcaacgagcgcaacccctatcctcagtagccagcatataagatgggcactctgtggagactgccagggataacctggaggaaggcggggatgacgtcaaatcatcatgccccttatgatttgggctacacacgtgctacaatggcgtaaacaaagggaagcgaacctgcgagggtgggcaaatcccaaaaataacgtcccagttcggactgtagtctgcaacccgactacacgaagctggaatcgctagtaatcgcggatcagaatgccgcggtgaatacgttcccgggtcttgtacacaccgcccgtcacaccatgggagtcagtaacgcccgaagtcagtgacctaaccgcaaggaaggagctgccgaaggcgggaccgatgactggggtgaagtcgtaacaaggtagccgtatcggaaggtgcggctggatcacctccttt

SEQ ID NO: 326 - DNA, 1316 bp, artificial sequence
  >GCF_001487165.1_00572 Blautia_luti_group
agtgtgaaaaactccggtggtataagatggacccgcgttggattagctagttggtgaggtaacggcccaccaaggcgacgatccatagccggcctgagagggtgaacggccacattgggactgagacacggcccagactcctacgggaggcagcagtggggaatattgcacaatgggggaaaccctgatgcagcgacgccgcgtgaaggaagaagtatctcggtatgtaaacttctatcagcagggaagaaaatgacggtacctgactaagaagccccggctaactacgtgccagcagccgcggtaatacgtagggggcaagcgttatccggatttactgggtgtaaagggagcgtagacggatggacaagtctgatgtgaaaggctggggctcaaccccgggactgcattggaaactgcccgtcttgagtgccggagaggtaagcggaattcctagtgtagcggtgaaatgcgtagatattaggaggaacaccagtggcgaaggcggcttactggacggtaactgacgttgaggctcgaaagcgtggggagcaaacaggattagataccctggtagtccacgcggtaaacgatgaatgctaggtgtcggggagcaaagctcttcggtgccgccgcaaacgcattaagcattccacctggggagtacgttcgcaagaatgaaactcaaaggaattgacggggacccgcacaagcggtggagcatgtggtttaattcgaagcaacgcgaagaaccttaccaagtcttgacatccctctgaccggaacttaaccgttcctttccttcgggacagaggagacaggtggtgcatggttgtcgtcagctcgtgtcgtgagatgttgggttaagtcccgcaacgagcgcaacccctatccccagtagccagcggttcggccgggcactctgaggagactgccagggataacctggaggaaggcggggatgacgtcaaatcatcatgccccttatgatttgggctacacacgtgctacaatggcgtaaacaaagggaagcgaacctgcgagggtgggcaaatcccaaaaataacgtcccagttcggactgtagtctgcaacccgactacacgaagctggaatcgctagtaatcgcggatcagaatgccgcggtgaatacgttcccgggtcttgtacacaccgcccgtcacaccatgggagtcagtaacgcccgaagtcagtgacctaaccgcaaggaaggagctgccgaaggcgggaccgatgactggggtgaagtcgtaacaaggtagccgtatcggaaggtgcggctggatcacctccttt

SEQ ID NO: 327 - DNA, 1527 bp, artificial sequence
  >GCF_001487165.1_02034 Blautia_luti_group
tcagagagtttgatcctggctcaggatgaacgctggcggcgtgcttaacacatgcaagtcgaacgggaattactttattgaaacttcggtcgatatgatttaattctagtggcggacgggtgagtaacgcgtgggtaacctgccttatacagggggataacagtcagaaatgactgctaataccgcataagcgcacagagctgcatggctcggtgtgaaaaactccggtggtataagatggacccgcgttggattagctagttggtgaggtaacggcccaccaaggcgacgatccatagccggcctgagagggtgaacggccacattgggactgagacacggcccagactcctacgggaggcagcagtggggaatattgcacaatgggggaaaccctgatgcagcgacgccgcgtgaaggaagaagtatctcggtatgtaaacttctatcagcagggaagaaaatgacggtacctgactaagaagccccggctaactacgtgccagcagccgcggtaatacgtagggggcaagcgttatccggatttactgggtgtaaagggagcgtagacggatggacaagtctgatgtgaaaggctggggctcaaccccgggactgcattggaaactgcccgtcttgagtgccggagaggtaagcggaattcctagtgtagcggtgaaatgcgtagatattaggaggaacaccagtggcgaaggcggcttactggacggtaactgacgttgaggctcgaaagcgtggggagcaaacaggattagataccctggtagtccacgcggtaaacgatgaatgctaggtgtcggggagcaaagctcttcggtgccgccgcaaacgcattaagcattccacctggggagtacgttcgcaagaatgaaactcaaaggaattgacggggacccgcacaagcggtggagcatgtggtttaattcgaagcaacgcgaagaaccttaccaagtcttgacatccctctgaccggaacttaaccgttcctttccttcgggacagaggagacaggtggtgcatggttgtcgtcagctcgtgtcgtgagatgttgggttaagtcccgcaacgagcgcaacccctatccccagtagccagcggttcggccgggcactctgaggagactgccagggataacctggaggaaggcggggatgacgtcaaatcatcatgccccttatgatttgggctacacacgtgctacaatggcgtaaacaaagggaagcgaacctgcgagggtgggcaaatcccaaaaataacgtcccagttcggactgtagtctgcaacccgactacacgaagctggaatcgctagtaatcgcggatcagaatgccgcggtgaatacgttcccgggtcttgtacacaccgcccgtcacaccatgggagtcagtaacgcccgaagtcagtgacctaaccgcaaggaaggagctgccgaaggcgggaccgatgactggggtgaagtcgtaacaaggtagccgtatcggaaggtgcggctggatcacctccttt

SEQ ID NO: 328 - DNA, 1121 bp, artificial sequence
  >GCF_001487165.1_02404 Blautia_luti_group
tcagagagtttgatcctggctcaggatgaacgctggcggcgtgcttaacacatgcaagtcgaacgggaattactttattgaaacttcggtcgatatgatttaattctagtggcggacgggtgagtaacgcgtgggtaacctgccttatacagggggataacagtcagaaatgactgctaataccgcataagcgcacagagctgcatggctcggtgtgaaaaactccggtggtataagatggacccgcgttggattagctagttggtgaggtaacggcccaccaaggcgacgatccatagccggcctgagagggtgaacggccacattgggactgagacacggcccagactcctacgggaggcagcagtggggaatattgcacaatgggggaaaccctgatgcagcgacgccgcgtgaaggaagaagtatctcggtatgtaaacttctatcagcagggaagagattgacggtacctgactaagaagccccggctaactacgtgccagcagccgcggtaatacgtagggggcaagcgttatccggatttactgggtgtaaagggagcgtagacggatggacaagtctgatgtgaaaggctggggctcaaccccgggactgcattggaaactgcccgtcttgagtgccggagaggtaagcggaattcctagtgtagcggtgaaatgcgtagatattaggaggaacaccagtggcgaaggcggcttactggacggtaactgacgttgaggctcgaaagcgtggggagcaaacaggattagataccctggtagtccacgcggtaaacgatgaatgctaggtgtcgggtgacaaagtcattcggtgccgccgcaaacgcattaagcattccacctggggagtacgttcgcaagaatgaaactcaaaggaattgacggggacccgcacaagcggtggagcatgtggtttaattcgaagcaacgcgaagaaccttaccaagtcttgacatccctctgaccgactcttaaccgagtctttccttcgggacagaggagacaggtggtgcatggttgtcgtcagctcgtgtcgtgagatgttgggttaagtcccgcaacgagcgcaacccctatcctcagtagccagcatga

SEQ ID NO: 329 - DNA, 1544 bp, artificial sequence
  >GCF_001546835.1_00343 Streptococcus_salivarius_group
aatgagagtttgatcctggctcaggacgaacgctggcggcgtgcctaatacatgcaagtagaacgctgaagagaggagcttgctcttcttggaagagttgcgaacgggtgagtaacgcgtaggtaacctgccttgtagcgggggataactattggaaacgatagctaataccgcataacaatgggtgacccatgtcattcatttgaaaggggcaactgctccactacaagatggacctgcgttgtattagctagtaggtgaggtaacggctcacctaggcgacgatacatagccgacctgagagggtgatcggccacactgggactgagacacggcccagactcctacgggaggcagcagtagggaatcttcggcaatgggggcaaccctgaccgagcaacgccgcgtgagtgaagaaggttttcggatcgtaaagctctgttgtaagtcaagaacgagtgtgagagtggaaagttcacactgtgacggtagcttaccagaaagggacggctaactacgtgccagcagccgcggtaatacgtaggtcccgagcgttgtccggatttattgggcgtaaagcgagcgcaggcggtttgataagtctgaagttaaaggctgtggctcaaccatagttcgctttggaaactgtcaaacttgagtgcagaaggggagagtggaattccatgtgtagcggtgaaatgcgtagatatatggaggaacaccggtggcgaaagcggctctctggtctgtaactgacgctgaggctcgaaagcgtggggagcgaacaggattagataccctggtagtccacgccgtaaacgatgagtgctaggtgttgggtcctttccgggattcagtgccgcagctaacgcattaagcactccgcctggggagtacgaccgcaaggttgaaactcaaaggaattgacgggggcccgcacaagcggtggagcatgtggtttaattcgaagcaacgcgaagaaccttaccaggtcttgacatcccgatgctatttctagagataggaagttacttcggtacatcggtgacaggtggtgcatggttgtcgtcagctcgtgtcgtgagatgttgggttaagtcccgcaacgagcgcaacccctattgttagttgccatcattcagttgggcactctagcgagactgccggtaataaaccggaggaaggtggggatgacgtcaaatcatcatgccccttatgacctgggctacacacgtgctacaatggttggtacaacgagttgcgagtcggtgacggcgagctaatctcttaaagccaatctcagttcggattgtaggctgcaactcgcctacatgaagtcggaatcgctagtaatcgcggatcagcacgccgcggtgaatacgttcccgggccttgtacacaccgcccgtcacaccacgagagtttgtaacacccgaagtcggtgaggtaaccttatggagccagccgcctaaggtgggatagatgattggggtgaagtcgtaacaaggtagccgtatcggaaggtgcggctggatcacctcctt

SEQ ID NO: 330 - DNA, 1526 bp, artificial sequence
  >GCF_001548235.1_00242 Rothia_mucilaginosa
acggagagtttgattctggctcaggacgaacgctggcggcgtgcttaacacatgcaagtcgaacgatgaagcctagcttgctaggtggattagtggcgaacgggtgagtaatacgtgagtaacctacctttaactctgggataagcctgggaaactgggtctaataccggatacgaccaatctccgcatggggtgttggtggaaagcgttatgtagtggttatagatgggctcacggcctatcagcttgttggtgaggtaatggctcaccaaggcgacgacgggtagccggcctgagagggtgaccggccacactgggactgagacacggcccagactcctacgggaggcagcagtggggaatattgcacaatgggcgcaagcctgatgcagcgacgccgcgtgagggatgacggccttcgggttgtaaacctctgttagcagggaagaagagagattgacggtacctgcagagaaagcgccggctaactacgtgccagcagccgcggtaatacgtagggcgcgagcgttgtccggaattattgggcgtaaagagcttgtaggcggtttgtcgcgtctgctgtgaaaggccggggcttaactccgtgtattgcagtgggtacgggcagactagagtgcagtaggggagactggaattcctggtgtagcggtggaatgcgcagatatcaggaggaacaccgatggcgaaggcaggtctctgggctgtaactgacgctgagaagcgaaagcatggggagcgaacaggattagataccctggtagtccatgccgtaaacgttgggcactaggtgtgggggacattccacgttttccgcgccgtagctaacgcattaagtgccccgcctggggagtacggccgcaaggctaaaactcaaagaaattgacgggggcccgcacaagcggcggagcatgcggattaattcgatgcaacgcgaagaaccttaccaaggcttgacatatactggaccgcatcagagatggtgtttcccttcggggctggtatacaggtggtgcatggttgtcgtcagctcgtgtcgtgagatgttgggttaagtcccgcaacgagcgcaaccctcgttctatgttgccagcacgttatggtggggactcataggagactgccggggtcaactcggaggaaggtggggatgacgtcaaatcatcatgccccttatgtcttgggcttcacgcatgctacaatggccggtacagagggttgcgatactgtgaggtggagctaatccctaaaagccggtctcagttcggattggggtctgcaactcgaccccatgaagtcggagtcgctagtaatcgcagatcagcaacgctgcggtgaatacgttcccgggccttgtacacaccgcccgtcaagtcacgaaagttggtaacacccaaagccggtggcctaacccttttgggagggagccgtctaaggtgggattggcgattgggactaagtcgtaacaaggtagccgtaccggaaggtgcggctggatcacctccttt

SEQ ID NO: 331 - DNA, 1546 bp, artificial sequence
  >GCF_001553605.1_00139 Desulfovibrio_fairfieldensis
tggagagtttgattctggctcagattgaacgctggcggcgtgcttaacacatgcaagtcgaacgcgaaagagacttcggtctcgagtagagtggcgcacgggtgagtaacgcgtggataatctgccctcatgaccgggataacagttggaaacggctgctaataccggatacgctctgaatgaacttttaggggaaagacggcctctgcttgcaagctgtcgtatgaggatgagtccgcgtcccattagctggttggcggggtaacggcccaccaaggcaacgatgggtagccgatctgagaggatgatcggccacactggaactgaaacacggtccagactcctacgggaggcagcagtggggaatattgcgcaatgggcgaaagcctgacgcagcgacgccgcgtgagggatgaaggttttcggatcgtaaacctctgtcagaagggaagaaagtgcgtggtgctaatcagccgcgcattgacggtaccttcaaaggaagcaccggctaactccgtgccagcagccgcggtaatacggagggtgcaagcgttaatcggaattactgggcgtaaagcgcacgtaggctgttgtgtaagtcaggggtgaaatcccacggctcaaccgtggaactgcccttgatactgcatgacttgaatccgggagagggtggcggaattccaggtgtaggagtgaaatccgtagatatctggaggaacatcagtggcgaaggcggccacctggaccggtattgacgctgaggtgcgaaagcgtggggagcaaacaggattagataccctggtagtccacgctgtaaacgatggatgctagatgtcggggagtattcttcggtgtcgtagttaacgcgttaagcatcccgcctggggagtacggtcgcaaggctgaaactcaaagaaattgacgggggcccgcacaagcggtggagtatgtggtttaattcgatgcaacgcgaagaaccttacctaggtttgacatctggggaaccctcccgaaaaggaggggtgcccttcggggagccccaagacaggtgctgcatggctgtcgtcagctcgtgtcgtgagatgttgggttaagtcccgcaacgagcgcaacccctatgcatagttgccagcaagtgaagttgggcactctatgcagactgcccgggttaaccgggaggaaggtggggacgacgtcaagtcatcatggcccttacacctagggctacacacgtactacaatggcgcgcacaaaggggagcgagaccgcgaggtggagccaatcccaaaaaacgcgtcccagtccggattgcagtctgcaactcgactgcatgaagtcggaatcgctagtaattcgagatcagcatgctcgggtgaatgcgttcccgggccttgtacacaccgcccgtcacaccacgaaagtcggttttacccgaagccggtgagccaaccatttatggaggcagccgtctacggtagggccgatgattggggtgaagtcgtaacaaggtagccgtaggggaacctgcggctggatcacctccttt

SEQ ID NO: 332 - DNA, 1546 bp, artificial sequence
  >GCF_001553605.1_00492 Desulfovibrio_fairfieldensis
tggagagtttgattctggctcagattgaacgctggcggcgtgcttaacacatgcaagtcgaacgcgaaagagacttcggtctcgagtagagtggcgcacgggtgagtaacgcgtggataatctgccctcataaccgggataacagttggaaacggctgctaataccggatacgctctgaatgaacttttaggggaaagacggcctctgcttgcaagctgtcgtatgaggatgagtccgcgtcccattagctggttggcggggtaacggcccaccaaggcaacgatgggtagccgatctgagaggatgatcggccacactggaactgaaacacggtccagactcctacgggaggcagcagtggggaatattgcgcaatgggcgaaagcctgacgcagcgacgccgcgtgagggatgaaggttttcggatcgtaaacctctgtcagaagggaagaaagtgcgtggtgctaatcagctgcgcattgacggtaccttcaaaggaagcaccggctaactccgtgccagcagccgcggtaatacggagggtgcaagcgttaatcggaattactgggcgtaaagcgcacgtaggctgttgtgtaagtcaggggtgaaatcccacggctcaaccgtggaactgcccttgatactgcatgacttgaatccgggagagggtggcggaattccaggtgtaggagtgaaatccgtagatatctggaggaacatcagtggcgaaggcggccacctggaccggtattgacgctgaggtgcgaaagcgtggggagcaaacaggattagataccctggtagtccacgctgtaaacgatggatgctagatgtcggggagtattcttcggtgtcgtagttaacgcgttaagcatcccgcctggggagtacggtcgcaaggctgaaactcaaagaaattgacgggggcccgcacaagcggtggagtatgtggtttaattcgatgcaacgcgaagaaccttacctaggtttgacatctggggaaccctcccgaaaaggaggggtgcccttcggggagccccaagacaggtgctgcatggctgtcgtcagctcgtgtcgtgagatgttgggttaagtcccgcaacgagcgcaacccctatgcatagttgccagcaagtgaagttgggcactctatgcagactgcccgggttaaccgggaggaaggtggggacgacgtcaagtcatcatggcccttacacctagggctacacacgtactacaatggcgcgcacaaaggggagcgagaccgcgaggtggagccaatcccaaaaaacgcgtcccagtccggattgcagtctgcaactcgactgcatgaagtcggaatcgctagtaattcgagatcagcatgctcgggtgaatgcgttcccgggccttgtacacaccgcccgtcacaccacgaaagtcggttttacccgaagccggtgagccaaccatttatggaggcagccgtctacggtagggccgatgattggggtgaagtcgtaacaaggtagccgtaggggaacctgcggctggatcacctccttt

SEQ ID NO: 333 - DNA, 1543 bp, artificial sequence
  >GCF_001553685.1_00061 Streptococcus_infantis_group
aatgagagtttgatcctggctcaggacgaacgctggcggcgtgcctaatacatgcaagtagaacgctgaaggaggagcttgcttctccggatgagttgcgaacgggtgagtaacgcgtaggtaacctgcctggtagcgggggataactattggaaacgatagctaataccgcataacagtagatattgcatgatatctgcttaaaaggtgcaattgcatcactaccagatggacctgcgttgtattagctagttggtgaggtaacggctcaccaaggcgacgatacatagccgacctgagagggtgatcggccacactgggactgagacacggcccagactcctacgggaggcagcagtagggaatcttcggcaatggacggaagtctgaccgagcaacgccgcgtgagtgaagaaggttttcggatcgtaaagctctgttgtaagagaagaacgagtgtgagagtggaaagttcacactgtgacggtatcttaccagaaagggacggctaactacgtgccagcagccgcggtaatacgtaggtcccgagcgttgtccggatttattgggcgtaaagcgagcgcaggcggttagataagtctgaagttaaaggctgtggcttaaccatagtacgctttggaaactgtttaacttgagtgcaagaggggagagtggaattccatgtgtagcggtgaaatgcgtagatatatggaggaacaccggtggcgaaagcggctctctggcttgtaactgacgctgaggctcgaaagcgtggggagcaaacaggattagataccctggtagtccacgccgtaaacgatgagtgctaggtgttagaccctttccggggtttagtgccgtagctaacgcattaagcactccgcctggggagtacgaccgcaaggttgaaactcaaaggaattgacgggggcccgcacaagcggtggagcatgtggtttaattcgaagcaacgcgaagaaccttaccaggtcttgacatccctctgaccgctctagagatagagttttccttcgggacagaggtgacaggtggtgcatggttgtcgtcagctcgtgtcgtgagatgttgggttaagtcccgcaacgagcgcaacccctattgttagttgccatcatttagttgggcactctagcgagactgccggtaataaaccggaggaaggtggggatgacgtcaaatcatcatgccccttatgacctgggctacacacgtgctacaatggctggtacaacgagtcgcaagtcggtgacggcaagctaatctcttaaagccagtctcagttcggattgtaggctgcaactcgcctacatgaagtcggaatcgctagtaatcgcggatcagcacgccgcggtgaatacgttcccgggccttgtacacaccgcccgtcacaccacgagagtttgtaacacccgaagtcggtgaggtaaccttttaggagccagccgcctaaggtgggatagatgattggggtgaagtcgtaacaaggtagccgtatcggaaggtgcggctggatcacctcctt

SEQ ID NO: 334 - DNA, 1547 bp, artificial sequence
  >GCF_001578955.1_02107 Streptococcus_parasanguinis
taatgagagtttgatcctggctcaggatgaacgctggcggcgtgcctaatacatgcaagtagaacgctgaagcttggtgcttgcaccgagcggatgagttgcgaacgggtgagtaacgcgtaggtaacctgcctcttagcgggggataactattggaaacgatagctaataccgcataaaagtacgatatcgcatgatgttgatttgaaaggtgcaattgcatcactaagagatggacctgcgttgtattagctagttggtgaggtaacggctcaccaaggcgacgatacatagccgacctgagagggtgatcggccacactgggactgagacacggcccagactcctacgggaggcagcagtagggaatcttcggcaatgggggcaaccctgaccgagcaacgccgcgtgagtgaagaaggttttcggatcgtaaagctctgttgtaagagaagaacgagtgtgagagtggaaagttcacactgtgacggtaacttaccagaaagggacggctaactacgtgccagcagccgcggtaatacgtaggtcccgagcgttatccggatttattgggcgtaaagcgagcgcaggcggttagataagtctgaagttaaaggctgtggcttaaccatagtacgctttggaaactgtttaacttgagtgcagaaggggagagtggaattccatgtgtagcggtgaaatgcgtagatatatggaggaacaccggtggcgaaagcggctctctggtctgtaactgacgctgaggctcgaaagcgtggggagcaaacaggattagataccctggtagtccacgccgtaaacgatgagtgctaggtgttgggtcctttccgggactcagtgccgcagctaacgcattaagcactccgcctggggagtacgaccgcaaggttgaaactcaaaggaattgacgggggcccgcacaagcggtggagcatgtggtttaattcgaagcaacgcgaagaaccttaccaggtcttgacatccctctgaccgctctagagatagagttttccttcgggacagaggtgacaggtggtgcatggttgtcgtcagctcgtgtcgtgagatgttgggttaagtcccgcaacgagcgcaacccctattgttagttgccatcattcagttgggcactctagcgagactgccggtaataaaccggaggaaggtggggatgacgtcaaatcatcatgccccttatgacctgggctacacacgtgctacaatggctggtacaacgagtcgcgagtcggtgacggcaagctaatctcttaaagccagtctcagttcggattgtaggctgcaactcgcctacatgaagtcggaatcgctagtaatcgcggatcagcacgccgcggtgaatacgttcccgggccttgtacacaccgcccgtcacaccacgagagtttgtaacacccgaagtcggtgaggtaaccgtaaggagccagccgcctaaggtgggatagatgattggggtgaagtcgtaacaaggtagccgtatcggaaggtgcggctggatcacctccttt

SEQ ID NO: 335 - DNA, 1543 bp, artificial sequence
  >GCF_001579645.1_01957 Streptococcus_infantis_group
aatgagagtttgatcctggctcaggacgaacgctggcggcgtgcctaatacatgcaagtagaacgctgaaggaggagcttgcttctccggatgagttgcgaacgggtgagtaacgcgtaggtaacctgcctggtagcgggggataactattggaaacgatagctaataccgcataacagtagatattgcatgatatctgcttgaaaggtgcaattgcatcactaccagatggacctgcgttgtattagctagttggtgaggtaacggctcaccaaggcgacgatacatagccgacctgagagggtgatcggccacactgggactgagacacggcccagactcctacgggaggcagcagtagggaatcttcggcaatggacggaagtctgaccgagcaacgccgcgtgagtgaagaaggttttcggatcgtaaagctctgttgtaagagaagaacgagtgtgagagtggaaagttcacactgtgacggtatcttaccagaaagggacggctaactacgtgccagcagccgcggtaatacgtaggtcccgagcgttgtccggatttattgggcgtaaagcgagcgcaggcggttagataagtctgaagttaaaggctgtggcttaaccatagtacgctttggaaactgtttaacttgagtgcaagaggggagagtggaattccatgtgtagcggtgaaatgcgtagatatatggaggaacaccggtggcgaaagcggctctctggcttgtaactgacgctgaggctcgaaagcgtggggagcaaacaggattagataccctggtagtccacgccgtaaacgatgagtgctaggtgttagaccctttccggggtttagtgccgtagctaacgcattaagcactccgcctggggagtacgaccgcaaggttgaaactcaaaggaattgacgggggcccgcacaagcggtggagcatgtggtttaattcgaagcaacgcgaagaaccttaccaggtcttgacatccctctgactgctctagagatagagttttccttcgggacagaggtgacaggtggtgcatggttgtcgtcagctcgtgtcgtgagatgttgggttaagtcccgcaacgagcgcaacccctattgttagttgccatcatttagttgggcactctagcgagactgccggtaataaaccggaggaaggtggggatgacgtcaaatcatcatgccccttatgacctgggctacacacgtgctacaatggctggtacaacgagtcgcaagtcggtgacggcaagctaatctcttaaagccagtctcagttcggattgtaggctgcaactcgcctacatgaagtcggaatcgctagtaatcgcggatcagcacgccgcggtgaatacgttcccgggccttgtacacaccgcccgtcacaccacgagagtttgtaacacccgaagtcggtgaggtaaccttttaggagccagccgcctaaggtgggatagatgattggggtgaagtcgtaacaaggtagccgtatcggaaggtgcggctggatcacctcctt

SEQ ID NO: 336 - DNA, 1545 bp, artificial sequence
  >GCF_001587175.1_00022 Streptococcus_australis
aatgagagtttgatcctggctcaggatgaacgctggcggcgtgcctaatacatgcaagtagaacgctgaagcttggtgcttgcaccgagcggatgagttgcgaacgggtgagtaacgcgtaggtaacctgcctggtagcgggggataactattggaaacgatagctaataccgcataacagtagatattgcatgatatctgcttgaaaggtgcaattgcatcactaccagatggacctgcgttgtattagctagttggtgaggtaacggctcaccaaggcgacgatacatagccgacctgagagggtgatcggccacactgggactgagacacggcccagactcctacgggaggcagcagtagggaatcttcggcaatggacggaagtctgaccgagcaacgccgcgtgagtgaagaaggttttcggatcgtaaagctctgttgtaagagaagaacgagtgtgagagtggaaagttcacactgtgacggtatcttaccagaaagggacggctaactacgtgccagcagccgcggtaatacgtaggtcccgagcgttatccggatttattgggcgtaaagcgagcgcaggcggttagataagtctgaagttaaaggctgtggcttaaccatagtacgctttggaaactgtttaacttgagtgcagaaggggagagtggaattccatgtgtagcggtgaaatgcgtagatatatggaggaacaccggtggcgaaagcggctctctggtctgtaactgacgctgaggctcgaaagcgtggggagcaaacaggattagataccctggtagtccacgccgtaaacgatgagtgctaggtgttgggtcctttccgggactcagtgccgcagctaacgcattaagcactccgcctggggagtacgaccgcaaggttgaaactcaaaggaattgacgggggcccgcacaagcggtggagcatgtggtttaattcgaagcaacgcgaagaaccttaccaggtcttgacatccctctgaccgctctagagatagagttttccttcgggacagaggtgacaggtggtgcatggttgtcgtcagctcgtgtcgtgagatgttgggttaagtcccgcaacgagcgcaacccctattgttagttgccatcattcagttgggcactctagcgagactgccggtaataaaccggaggaaggtggggatgacgtcaaatcatcatgccccttatgacctgggctacacacgtgctacaatggctggtacaacgagtcgcaagtcggtgacggcaagctaatctcttaaagccagtctcagttcggattgtaggctgcaactcgcctacatgaagtcggaatcgctagtaatcgcggatcagcacgccgcggtgaatacgttcccgggccttgtacacaccgcccgtcacaccacgagagtttgtaacacccgaagtcggtgaggtaaccttttaggagccagccgcctaaggtgggatagatgattggggtgaagtcgtaacaaggtagccgtatcggaaggtgcggctggatcacctcctt

SEQ ID NO: 337 - DNA, 1545 bp, artificial sequence
  >GCF_001587175.1_01419 Streptococcus_australis
aatgagagtttgatcctggctcaggatgaacgctggcggcgtgcctaatacatgcaagtagaacgctgaaggaaggagcttgctctttccggatgagttgcgaacgggtgagtaacgcgtaggtaacctgcctggtagcgggggataactattggaaacgatagctaataccgcataacagtagatgttgcatgacatctgcttgaaaggtgcaattgcatcactaccagatggacctgcgttgtattagctagttggtgaggtaacggctcaccaaggcgacgatacatagccgacctgagagggtgatcggccacactgggactgagacacggcccagactcctacgggaggcagcagtagggaatcttcggcaatggacggaagtctgaccgagcaacgccgcgtgagtgaagaaggttttcggatcgtaaagctctgttgtaagagaagaacgagtgtgagagtggaaagttcacactgtgacggtatcttaccagaaagggacggctaactacgtgccagcagccgcggtaatacgtaggtcccgagcgttatccggatttattgggcgtaaagcgagcgcaggcggttagataagtctgaagttaaaggctgtggcttaaccatagtacgctttggaaactgtttaacttgagtgcaagaggggagagtggaattccatgtgtagcggtgaaatgcgtagatatatggaggaacaccggtggcgaaagcggctctctggcttgtaactgacgctgaggctcgaaagcgtggggagcaaacaggattagataccctggtagtccacgccgtaaacgatgagtgctaggtgttgggtcctttccgggactcagtgccgcagctaacgcattaagcactccgcctggggagtacgaccgcaaggttgaaactcaaaggaattgacgggggcccgcacaagcggtggagcatgtggtttaattcgaagcaacgcgaagaaccttaccaggtcttgacatccctctgaccgctctagagatagagctttccttcgggacagaggtgacaggtggtgcatggttgtcgtcagctcgtgtcgtgagatgttgggttaagtcccgcaacgagcgcaacccctattgttagttgccatcattcagttgggcactctagcgagactgccggtaataaaccggaggaaggtggggatgacgtcaaatcatcatgccccttatgacctgggctacacacgtgctacaatggctggtacaacgagtcgcaagtcggtgacggcaagctaatctcttaaagccagtctcagttcggattgtaggctgcaactcgcctacatgaagtcggaatcgctagtaatcgcggatcagcacgccgcggtgaatacgttcccgggccttgtacacaccgcccgtcacaccacgagagtttgtaacacccgaagtcggtgaggtaaccttttaggagccagccgcctaaggtgggatagatgattggggtgaagtcgtaacaaggtagccgtatcggaaggtgcggctggatcacctcctt

SEQ ID NO: 338 - DNA, 1545 bp, artificial sequence
  >GCF_001587175.1_01563 Streptococcus_australis
aatgagagtttgatcctggctcaggatgaacgctggcggcgtgcctaatacatgcaagtagaacgctgaaggaaggagcttgctctttccggatgagttgcgaacgggtgagtaacgcgtaggtaacctgcctggtagcgggggataactattggaaacgatagctaataccgcataacagtagatgttgcatgacatctgcttgaaaggtgcaattgcatcactaccagatggacctgcgttgtattagctagttggtgaggtaacggctcaccaaggcgacgatacatagccgacctgagagggtgatcggccacactgggactgagacacggcccagactcctacgggaggcagcagtagggaatcttcggcaatggacggaagtctgaccgagcaacgccgcgtgagtgaagaaggttttcggatcgtaaagctctgttgtaagagaagaacgagtgtgagagtggaaagttcacactgtgacggtatcttaccagaaagggacggctaactacgtgccagcagccgcggtaatacgtaggtcccgagcgttatccggatttattgggcgtaaagcgagcgcaggcggttagataagtctgaagttaaaggctgtggcttaaccatagtacgctttggaaactgtttaacttgagtgcagaaggggagagtggaattccatgtgtagcggtgaaatgcgtagatatatggaggaacaccggtggcgaaagcggctctctggtctgtaactgacgctgaggctcgaaagcgtggggagcaaacaggattagataccctggtagtccacgccgtaaacgatgagtgctaggtgttgggtcctttccgggactcagtgccgcagctaacgcattaagcactccgcctggggagtacgaccgcaaggttgaaactcaaaggaattgacgggggcccgcacaagcggtggagcatgtggtttaattcgaagcaacgcgaagaaccttaccaggtcttgacatccctctgaccgctctagagatagagttttccttcgggacagaggtgacaggtggtgcatggttgtcgtcagctcgtgtcgtgagatgttgggttaagtcccgcaacgagcgcaacccctattgttagttgccatcattcagttgggcactctagcgagactgccggtaataaaccggaggaaggtggggatgacgtcaaatcatcatgccccttatgacctgggctacacacgtgctacaatggctggtacaacgagtcgcaagtcggtgacggcaagctaatctcttaaagccagtctcagttcggattgtaggctgcaactcgcctacatgaagtcggaatcgctagtaatcgcggatcagcacgccgcggtgaatacgttcccgggccttgtacacaccgcccgtcacaccacgagagtttgtaacacccgaagtcggtgaggtaaccttttaggagccagccgcctaaggtgggatagatgattggggtgaagtcgtaacaaggtagccgtatcggaaggtgcggctggatcacctcctt

SEQ ID NO: 339 - DNA, 1553 bp, artificial sequence
  >GCF_001588615.1_00277 Streptococcus_gordonii
aatgagagtttgatcctggctcaggacgaacgctggcggcgtgcctaatacatgcaagtagaacgcacagtttataccgtagcttgctacaccatagactgtgagttgcgaacgggtgagtaacgcgtaggtaacctgcctggtagcgggggataactattggaaacgatagctaataccgcataatattgattattgcatgataattgattgaaaggtgcaattgcaccactaccagatggacctgcgttgtattagctagtaggtgaggtaacggctcacctaggcgacgatacatagccgacctgagagggtgatcggccacactgggactgagacacggcccagactcctacgggaggcagcagtagggaatcttcggcaatggacgaaagtctgaccgagcaacgccgcgtgagtgaagaaggttttcggatcgtaaagctctgttgtaagagaagaacgggtgtgagagtggaaagttcacactgtgacggtatcttaccagaaagggacggctaactacgtgccagcagccgcggtaatacgtaggtcccgagcgttgtccggatttattgggcgtaaagcgagcgcaggcggttagataagtctgaagttaaaggctgtggcttaaccatagtacgctttggaaactgtttaacttgagtgcagaaggggagagtggaattccatgtgtagcggtgaaatgcgtagatatatggaggaacaccggtggcgaaagcggctctctggtctgtaactgacgctgaggctcgaaagcgtggggagcgaacaggattagataccctggtagtccacgccgtaaacgatgagtgctaggtgttaggccctttccggggcttagtgccgcagctaacgcattaagcactccgcctggggagtacgaccgcaaggttgaaactcaaaggaattgacgggggcccgcacaagcggtggagcatgtggtttaattcgaagcaacgcgaagaaccttaccaggtcttgacatcccgatgcccgctctagagatagagttttacttcggtacatcggtgacaggtggtgcatggttgtcgtcagctcgtgtcgtgagatgttgggttaagtcccgcaacgagcgcaacccttattgttagttgccatcattcagttgggcactctagcgagactgccggtaataaaccggaggaaggtggggatgacgtcaaatcatcatgccccttatgacctgggctacacacgtgctacaatggctggtacaacgagtcgcaagtcggtgacggcaagctaatctcttaaagccagtctcagttcggattgtaggctgcaactcgcctacatgaagtcggaatcgctagtaatcgcggatcagcacgccgcggtgaatacgttcccgggccttgtacacaccgcccgtcacaccacgagagtttgtaacacccgaagtcggtgaggtaaccttttaggagccagccgcctaaggtgggatagatgattggggtgaagtcgtaacaaggtagccgtatcggaaggtgcggctggatcacctcctt

SEQ ID NO: 340 - DNA, 1553 bp, artificial sequence
  >GCF_001588985.1_00427 Streptococcus_gordonii
aatgagagtttgatcctggctcaggacgaacgctggcggcgtgcctaatacatgcaagtagaacgcacagtttataccgtagcttgctacaccatagactgtgagttgcgaacgggtgagtaacgcgtaggtaacctgcctggtagcgggggataactattggaaacgatagctaataccgcataatattaattattgcatgataattgattgaaaggtgcaattgcaccactaccagatggacctgcgttgtattagctagtaggtgaggtaacggctcacctaggcgacgatacatagccgacctgagagggtgatcggccacactgggactgagacacggcccagactcctacgggaggcagcagtagggaatcttcggcaatggacgaaagtctgaccgagcaacgccgcgtgagtgaagaaggttttcggatcgtaaagctctgttgtaagagaagaacgggtgtgagagtggaaagttcacactgtgacggtatcttaccagaaagggacggctaactacgtgccagcagccgcggtaatacgtaggtcccgagcgttgtccggatttattgggcgtaaagcgaacgcaggcggttagataagtctgaagttaaaggctgtggcttaaccatagtacgctttggaaactgtttaacttgagtgcagaaggggagagtggaattccatgtgtagcggtgaaatgcgtagatatatggaggaacaccggtggcgaaagcggctctctggtctgtaactgacgctgaggctcgaaagcgtggggagcgaacaggattagataccctggtagtccacgccgtaaacgatgagtgctaggtgttaggccctttccggggcttagtgccgcagctaacgcattaagcactccgcctggggagtacgaccgcaaggttgaaactcaaaggaattgacgggggcccgcacaagcggtggagcatgtggtttaattcgaagcaacgcgaagaaccttaccaggtcttgacatcccgatgcccgctctagagatagagttttacttcggtacatcggtgacaggtggtgcatggttgtcgtcagctcgtgtcgtgagatgttgggttaagtcccgcaacgagcgcaacccttattgttagttgccatcattcagttgggcactctagcgagactgccggtaataaaccggaggaaggtggggatgacgtcaaatcatcatgccccttatgacctgggctacacacgtgctacaatggctggtacaacgagtcgcaagtcggtgacggcaagctaatctcttaaagccagtctcagttcggattgtaggctgcaactcgcctacatgaagtcggaatcgctagtaatcgcggatcagcacgccgcggtgaatacgttcccgggccttgtacacaccgcccgtcacaccacgagagtttgtaacacccgaagtcggtgaggtaaccttttaggagccagccgcctaaggtgggatagatgattggggtgaagtcgtaacaaggtagccgtatcggaaggtgcggctggatcacctcctt

SEQ ID NO: 341 - DNA, 1553 bp, artificial sequence
  >GCF_001589035.1_01331 Streptococcus_gordonii
aatgagagtttgatcctggctcaggacgaacgctggcggcgtgcctaatacatgcaagtagaacgcacagtttataccgtagcttgctacaccatagactgtgagttgcgaacgggtgagtaacgcgtaggtaacctgcctggtagcgggggataactattggaaacgatagctaataccgcataatattaattattgcatgataattgattgaaaggtgcaattgcatcactaccagatggacctgcgttgtattagctagtaggtgaggtaacggctcacctaggcgacgatacatagccgacctgagagggtgatcggccacactgggactgagacacggcccagactcctacgggaggcagcagtagggaatcttcggcaatggacgaaagtctgaccgagcaacgccgcgtgagtgaagaaggttttcggatcgtaaagctctgttgtaagagaagaacgggtgtgagagtggaaagttcacactgtgacggtatcttaccagaaagggacggctaactacgtgccagcagccgcggtaatacgtaggtcccgagcgttgtccggatttattgggcgtaaagcgagcgcaggcggttagataagtctgaagttaaaggctgtggcttaaccatagtacgctttggaaactgtttaacttgagtgcagaaggggagagtggaattccatgtgtagcggtgaaatgcgtagatatatggaggaacaccggtggcgaaagcggctctctggtctgtaactgacgctgaggctcgaaagcgtggggagcgaacaggattagataccctggtagtccacgccgtaaacgatgagtgctaggtgttaggccctttccggggcttagtgccgcagctaacgcattaagcactccgcctggggagtacgaccgcaaggttgaaactcaaaggaattgacgggggcccgcacaagcggtggagcatgtggtttaattcgaagcaacgcgaagaaccttaccaggtcttgacatcccgatgcccgctctagagatagagttttacttcggtacatcggtgacaggtggtgcatggttgtcgtcagctcgtgtcgtgagatgttgggttaagtcccgcaacgagcgcaacccttattgttagttgccatcattcagttgggcactctagcgagactgccggtaataaaccggaggaaggtggggatgacgtcaaatcatcatgccccttatgacctgggctacacacgtgctacaatggctggtacaacgagtcgcaagtcggtgacggcaagctaatctcttaaagccagtctcagttcggattgtaggctgcaactcgcctacatgaagtcggaatcgctagtaatcgcggatcagcacgccgcggtgaatacgttcccgggccttgtacacaccgcccgtcacaccacgagagtttgtaacacccgaagtcggtgaggtaaccttttaggagccagccgcctaaggtgggatagatgattggggtgaagtcgtaacaaggtagccgtatcggaaggtgcggctggatcacctcctt

SEQ ID NO: 342 - DNA, 1553 bp, artificial sequence
  >GCF_001589055.1_01882 Streptococcus_gordonii
aatgagagtttgatcctggctcaggacgaacgctggcggcgtgcctaatacatgcaagtagaacgcacagtttataccgtagcttgctacaccataaactgtgagttgcgaacgggtgagtaacgcgtaggtaacctgcctggtagcgggggataactattggaaacgatagctaataccgcataatattaattattgcatgataattaattgaaaggtgcaaatgcaccactaccagatggacctgcgttgtattagctagtaggtgaggtaacggctcacctaggcgacgatacatagccgacctgagagggtgatcggccacactgggactgagacacggcccagactcctacgggaggcagcagtagggaatcttcggcaatggacgaaagtctgaccgagcaacgccgcgtgagtgaagaaggttttcggatcgtaaagctctgttgtaagagaagaacgggtgtgagagtggaaagttcacactgtgacggtatcttaccagaaagggacggctaactacgtgccagcagccgcggtaatacgtaggtcccgagcgttgtccggatttattgggcgtaaagcgagcgcaggcggttagataagtctgaagttaaaggctgtggcttaaccatagtacgctttggaaactgtttaacttgagtgcagaaggggagagtggaattccatgtgtagcggtgaaatgcgtagatatatggaggaacaccggtggcgaaagcggctctctggtctgtaactgacgctgaggctcgaaagcgtggggagcgaacaggattagataccctggtagtccacgccgtaaacgatgagtgctaggtgttaggccctttccggggcttagtgccgcagctaacgcattaagcactccgcctggggagtacgaccgcaaggttgaaactcaaaggaattgacgggggcccgcacaagcggtggagcatgtggtttaattcgaagcaacgcgaagaaccttaccaggtcttgacatcccgatgcccgctctagagatagagttttacttcggtacatcggtgacaggtggtgcatggttgtcgtcagctcgtgtcgtgagatgttgggttaagtcccgcaacgagcgcaacccttattgttagttgccatcattcagttgggcactctagcgagactgccggtaataaaccggaggaaggtggggatgacgtcaaatcatcatgccccttatgacctgggctacacacgtgctacaatggctggtacaacgagtcgcaagtcggtgacggcaagctaatctcttaaagccagtctcagttcggattgtaggctgcaactcgcctacatgaagtcggaatcgctagtaatcgcggatcagcacgccgcggtgaatacgttcccgggccttgtacacaccgcccgtcacaccacgagagtttgtaacacccgaagtcggtgaggtaaccttttaggagccagccgcctaaggtgggatagatgattggggtgaagtcgtaacaaggtagccgtatcggaaggtgcggctggatcacctcctt

SEQ ID NO: 343 - DNA, 1572 bp, artificial sequence
  >GCF_001742205.1_01073 [Lactobacillus]_fermentum
tatgagagtttgatcctggctcaggatgaacgctggcggtgtgcctaatacatgcaagtcgaacgcgttggcccaattgattgatggtgcttgcacctgattgattttggtcgccaacgagtggcggacgggtgagtaacacgtaggtaacctgcccagaagcgggggacaacatttggaaacagatgctaataccgcataacagcgttgttcgcatgaacaacgcttaaaagatggcttctcgctatcacttctggatggacctgcggtgcattagcttgttggtggggtaatggcctaccaaggcgatgatgcatagccgagttgagagactgatcggccacaatgggactgagacacggcccatactcctacgggaggcagcagtagggaatcttccacaatgggcgcaagcctgatggagcaacaccgcgtgagtgaagaagggtttcggctcgtaaagctctgttgttaaagaagaacacgtatgagagtaactgttcatacgttgacggtatttaaccagaaagtcacggctaactacgtgccagcagccgcggtaatacgtaggtggcaagcgttatccggatttattgggcgtaaagagagtgcaggcggttttctaagtctgatgtgaaagccttcggcttaaccggagaagtgcatcggaaactggataacttgagtgcagaagagggtagtggaactccatgtgtagcggtggaatgcgtagatatatggaagaacaccagtggcgaaggcggctacctggtctgcaactgacgctgagactcgaaagcatgggtagcgaacaggattagataccctggtagtccatgccgtaaacgatgagtgctaggtgttggagggtttccgcccttcagtgccggagctaacgcattaagcactccgcctggggagtacgaccgcaaggttgaaactcaaaggaattgacgggggcccgcacaagcggtggagcatgtggtttaattcgaagctacgcgaagaaccttaccaggtcttgacatcttgcgccaaccctagagatagggcgtttccttcgggaacgcaatgacaggtggtgcatggtcgtcgtcagctcgtgtcgtgagatgttgggttaagtcccgcaacgagcgcaacccttgttactagttgccagcattaagttgggcactctagtgagactgccggtgacaaaccggaggaaggtggggacgacgtcagatcatcatgccccttatgacctgggctacacacgtgctacaatggacggtacaacgagtcgcgaactcgcgagggcaagcaaatctcttaaaaccgttctcagttcggactgcaggctgcaactcgcctgcacgaagtcggaatcgctagtaatcgcggatcagcatgccgcggtgaatacgttcccgggccttgtacacaccgcccgtcacaccatgagagtttgtaacacccaaagtcggtggggtaaccttttaggagccagccgcctaaggtgggacagatgattagggtgaagtcgtaacaaggtagccgtaggagaacctgcggctggatcacctcctt

SEQ ID NO: 344 - DNA, 1572 bp, artificial sequence
  >GCF_001742205.1_01102 [Lactobacillus]_fermentum
tatgagagtttgatcctggctcaggatgaacgctggcggtgtgcctaatacatgcaagtcgaacgcgttggcccaattgattgatggtgcttgcacctgattgattttggtcgccaacgagtggcggacgggtgagtaacacgtaggtaacctgcccagaagcgggggacaacatttggaaacagatgctaataccgcataacagcgttgttcgcatgaacaacgcttaaaagatggcttctcgctatcacttctggatggacctgcggtgcattagcttgttggtggggtaacggcctaccaaggcgatgatgcatagccgagttgagagactgatcggccacaatgggactgagacacggcccatactcctacgggaggcagcagtagggaatcttccacaatgggcgcaagcctgatggagcaacaccgcgtgagtgaagaagggtttcggctcgtaaagctctgttgttaaagaagaatacgtatgagagtaactgttcatacgttgacggtatttaaccagaaagtcacggctaactacgtgccagcagccgcggtaatacgtaggtggcaagcgttatccggatttattgggcgtaaagagagtgcaggcggttttctaagtctgatgtgaaagccttcggcttaaccggagaagtgcatcggaaactggataacttgagtgcagaagagggtagtggaactccatgtgtagcggtggaatgcgtagatatatggaagaacaccagtggcgaaggcggctacctggtctgcaactgacgctgagactcgaaagcatgggtagcgaacaggattagataccctggtagtccatgccgtaaacgatgagtgctaggtgttggagggtttccgcccttcagtgccggagctaacgcattaagcactccgcctggggagtacgaccgcaaggttgaaactcaaaggaattgacgggggcccgcacaagcggtggagcatgtggtttaattcgaagctacgcgaagaaccttaccaggtcttgacatcttgcgccaaccctagagatagggcgtttccttcgggaacgcaatgacaggtggtgcatggtcgtcgtcagctcgtgtcgtgagatgttgggttaagtcccgcaacgagcgcaacccttgttactagttgccagcattaagttgggcactctagtgagactgccggtgacaaaccggaggaaggtggggacgacgtcagatcatcatgccccttatgacctgggctacacacgtgctacaatggacggtacaacgagtcgcgaactcgcgagggcaagcaaatctcttaaaaccgttctcagttcggactgcaggctgcaactcgcctgcacgaagtcggaatcgctagtaatcgcggatcagcatgccgcggtgaatacgttcccgggccttgtacacaccgcccgtcacaccatgagagtttgtaacacccaaagtcggtggggtaaccttttaggagccagccgcctaaggtgggacagatgattagggtgaagtcgtaacaaggtagccgtaggagaacctgcggctggatcacctcctt

SEQ ID NO: 345 - DNA, 1524 bp, artificial sequence
  >GCF_001808385.1_01104 Rothia_dentocariosa
acggagagtttgattctggctcaggacgaacgctggcggcgtgcttaacacatgcaagtcgaacgatgaagcctagcttgctaggtggattagtggcgaacgggtgagtaatacgtgagtgacctacctttgactctgggataagcctgggaaactgggtctaataccggatacgaccaatctccgcatggggtgttggtggaaagcgttatggagtggttttagatgggctcacggcctatcagcttgttggtgaggtaatggcttaccaaggcgacgacgggtagccggcctgagagggtgaccggccacactgggactgagacacggcccagactcctacgggaggcagcagtggggaatattgcacaatgggcgcaagcctgatgcagcgacgccgcgtgagggatgacggccttcgggttgtaaacctctgttagcatcgaagaagcgaaagtgacggtaggtgcagagaaagcgccggctaactacgtgccagcagccgcggtaatacgtagggcgcgagcgttgtccggaattattgggcgtaaagagcttgtaggcggttggtcgcgtctgctgtgaaaggctggggcttaaccctggttttgcagtgggtacgggctaactagagtgcagtaggggagactggaattcctggtgtagcggtggaatgcgcagatatcaggaggaacaccgatggcgaaggcaggtctctgggctgtaactgacgctgagaagcgaaagcatggggagcgaacaggattagataccctggtagtccatgccgtaaacgttgggcactaggtgtgggggacattccacgttttccgcgccgtagctaacgcattaagtgccccgcctggggagtacggccgcaaggctaaaactcaaagaaattgacgggggcccgcacaagcggcggagcatgcggattaattcgatgcaacgcgaagaaccttaccaaggcttgacatatactggactgcgtcagagatggcgtttcccttcggggctggtatacaggtggtgcatggttgtcgtcagctcgtgtcgtgagatgttgggttaagtcccgcaacgagcgcaaccctcgttctatgttgccagcacgtgatggtggggactcataggagactgccggggtcaactcggaggaaggtggggatgacgtcaaatcatcatgccccttatgtcttgggcttcacgcatgctacaatggccggtacagagggttgcgatactgtgaggtggagctaatccctaaaagccggtctcagttcggattggggtctgcaactcgaccccatgaagtcggagtcgctagtaatcgcagatcagcaacgctgcggtgaatacgttcccgggccttgtacacaccgcccgtcaagtcacgaaagttggtaacacccgaagccggtggcctaaccctggtggggggagccgtcgaaggtgggactggcgattgggactaagtcgtaacaaggtagccgtaccggaaggtgcggctggatcacctccttt

SEQ ID NO: 346 - DNA, 1546 bp, artificial sequence
  >GCF_001808725.1_00155 Streptococcus_parasanguinis
taatgagagtttgatcctggctcaggatgaacgctggcggcgtgcctaatacatgcaagtagaacgctgaagcttggtgcttgcaccgagcggatgagttgcgaacgggtgagtaacgcgtaggtaacctgcctcttagcgggggataactattggaaacgatagctaataccgcataaaagtcgatatcgcatgatgttgatttgaaaggtgcaattgcatcactaagagatggacctgcgttgtattagctagttggtgaggtaacggctcaccaaggcgacgatacatagccgacctgagagggtgatcggccacactgggactgagacacggcccagactcctacgggaggcagcagtagggaatcttcggcaatgggggcaaccctgaccgagcaacgccgcgtgagtgaagaaggttttcggatcgtaaagctctgttgtaagagaagaacgagtgtgagagtggaaagttcacactgtgacggtaacttaccagaaagggacggctaactacgtgccagcagccgcggtaatacgtaggtcccgagcgttatccggatttattgggcgtaaagcgagcgcaggcggttagataagtctgaagttaaaggctgtggcttaaccatagtacgctttggaaactgtttaacttgagtgcagaaggggagagtggaattccatgtgtagcggtgaaatgcgtagatatatggaggaacaccggtggcgaaagcggctctctggtctgtaactgacgctgaggctcgaaagcgtggggagcaaacaggattagataccctggtagtccacgccgtaaacgatgagtgctaggtgttgggtcctttccgggactcagtgccgcagctaacgcattaagcactccgcctggggagtacgaccgcaaggttgaaactcaaaggaattgacgggggcccgcacaagcggtggagcatgtggtttaattcgaagcaacgcgaagaaccttaccaggtcttgacatccctctgaccgctctagagatagagttttccttcgggacagaggtgacaggtggtgcatggttgtcgtcagctcgtgtcgtgagatgttgggttaagtcccgcaacgagcgcaacccctattgttagttgccatcattgagttgggcactctagcgagactgccggtaataaaccggaggaaggtggggatgacgtcaaatcatcatgccccttatgacctgggctacacacgtgctacaatggctggtacaacgagtcgcgagtcggtgacggcaagctaatctcttaaagccagtctcagttcggattgtaggctgcaactcgcctacatgaagtcggaatcgctagtaatcgcggatcagcacgccgcggtgaatacgttcccgggccttgtacacaccgcccgtcacaccacgagagtttgtaacacccgaagtcggtgaggtaaccgtaaggagccagccgcctaaggtgggatagatgattggggtgaagtcgtaacaaggtagccgtatcggaaggtgcggctggatcacctccttt

SEQ ID NO: 347 - DNA, 1545 bp, artificial sequence
  >GCF_001808745.1_00008 Streptococcus_parasanguinis
aatgagagtttgatcctggctcaggatgaacgctggcggcgtgcctaatacatgcaagtagaacgctgaagcttggtgcttgcaccgagcggatgagttgcgaacgggtgagtaacgcgtaggtaacctgcctcttagcgggggataactattggaaacgatagctaataccgcataaaagtcgatatcgcatgatattgatttgaaaggtgcaattgcatcactaagagatggacctgcgttgtattagctagttggtgaggtaacggctcaccaaggcgacgatacatagccgacctgagagggtgatcggccacactgggactgagacacggcccagactcctacgggaggcagcagtagggaatcttcggcaatgggggcaaccctgaccgagcaacgccgcgtgagtgaagaaggttttcggatcgtaaagctctgttgtaagagaagaacgagtgtgagagtggaaagttcacactgtgacggtaacttaccagaaagggacggctaactacgtgccagcagccgcggtaatacgtaggtcccgagcgttatccggatttattgggcgtaaagcgagcgcaggcggttagataagtctgaagttaaaggctgtggcttaaccatagtacgctttggaaactgtttaacttgagtgcagaaggggagagtggaattccatgtgtagcggtgaaatgcgtagatatatggaggaacaccggtggcgaaagcggctctctggtctgtaactgacgctgaggctcgaaagcgtggggagcaaacaggattagataccctggtagtccacgccgtaaacgatgagtgctaggtgttgggtcctttccgggactcagtgccgcagctaacgcattaagcactccgcctggggagtacgaccgcaaggttgaaactcaaaggaattgacgggggcccgcacaagcggtggagcatgtggtttaattcgaagcaacgcgaagaaccttaccaggtcttgacatccctctgaccgctctagagatagagttttccttcgggacagaggtgacaggtggtgcatggttgtcgtcagctcgtgtcgtgagatgttgggttaagtcccgcaacgagcgcaacccctattgttagttgccatcatttagttgggcactctagcgagactgccggtaataaaccggaggaaggtggggatgacgtcaaatcatcatgccccttatgacctgggctacacacgtgctacaatggctggtacaacgagtcgcgagtcggtgacggcaagctaatctcttaaagccagtctcagttcggattgtaggctgcaactcgcctacatgaagtcggaatcgctagtaatcgcggatcagcacgccgcggtgaatacgttcccgggccttgtacacaccgcccgtcacaccacgagagtttgtaacacccgaagtcggtgaggtaaccgtaaggagccagccgcctaaggtgggatagatgattggggtgaagtcgtaacaaggtagccgtatcggaaggtgcggctggatcacctccttt

SEQ ID NO: 348 - DNA, 1543 bp, artificial sequence
  >GCF_001808865.1_00555 Streptococcus_infantis_group
aatgagagtttgatcctggctcaggacgaacgctggcggcgtgcctaatacatgcaagtagaacgctgaaggaggagcttgcttctccggatgagttgcgaacgggtgagtaacgcgtaggtaacctgcctggtagcgggggataactattggaaacgatagctaataccgcataacagtagatattgcatgatatctgcttgaaaggtgcaattgcatcactaccagatggacctgcgttgtattagctagttggtgaggtaacggctcaccaaggcgacgatacatagccgacctgagagggtgatcggccacactgggactgagacacggcccagactcctacgggaggcagcagtagggaatcttcggcaatggacggaagtctgaccgagcaacgccgcgtgagtgaagaaggttttcggatcgtaaagctctgttgtaagagaagaacgagtgtgagagtggaaagttcacactgtgacggtatcttaccagaaagggacggctaactacgtgccagcagccgcggtaatacgtaggtcccgagcgttgtccggatttattgggcgtaaagcgagcgcaggcggttagataagtctgaagttaaaggctgtggcttaaccatagtacgctttggaaactgtttaacttgagtgcaagaggggagagtggaattccatgtgtagcggtgaaatgcgtagatatatggaggaacaccggtggcgaaagcggctctctggcttgtaactgacgctgaggctcgaaagcgtggggagcaaacaggattagataccctggtagtccacgccgtaaacgatgagtgctaggtgttagaccctttccggggtttagtgccgcagctaacgcattaagcactccgcctggggagtacgaccgcaaggttgaaactcaaaggaattgacgggggcccgcacaagcggtggagcatgtggtttaattcgaagcaacgcgaagaaccttaccaggtcttgacatccctctgaccgctctagagatagagctttccttcgggacagaggtgacaggtggtgcatggttgtcgtcagctcgtgtcgtgagatgttgggttaagtcccgcaacgagcgcaacccctattgttagttgccatcattcagttgggcactctagcgagactgccggtaataaaccggaggaaggtggggatgacgtcaaatcatcatgccccttatgacctgggctacacacgtgctacaatggctggtacaacgagtcgcaagtcggtgacggcaagctaatctcttaaagccagtctcagttcggattgtaggctgcaactcgcctacatgaagtcggaatcgctagtaatcgcggatcagcacgccgcggtgaatacgttcccgggccttgtacacaccgcccgtcacaccacgagagtttgtaacacccgaagtcggtgaggtaaccttttaggagccagccgcctaaggtgggatagatgattggggtgaagtcgtaacaaggtagccgtatcggaaggtgcggctggatcacctcctt

SEQ ID NO: 349 - DNA, 1525 bp, artificial sequence
  >GCF_001808955.1_00220 Rothia_mucilaginosa
acggagagtttgattctggctcaggacgaacgctggcggcgtgcttaacacatgcaagtcgaacgatgaagcctagcttgctaggtggattagtggcgaacgggtgagtaatacgtgagtaacctacctttaactctgggataagcccgggaaactgggtctaataccggatacgaccaatctccgcatggggtgttggtggaaagcgttatgtagtggttatagatgggctcacggcctatcagcttgttggtgaggtaacggctcaccaaggcgacgacgggtagccggcctgagagggtgaccggccacactgggactgagacacggcccagactcctacgggaggcagcagtggggaatattgcacaatgggcgcaagcctgatgcagcgacgccgcgtgagggatgacggccttcgggttgtaaacctctgttagcagggaagaagagaaattgacggtacctgcagagaaagcgccggctaactacgtgccagcagccgcggtaatacgtagggcgcgagcgttgtccggaattattgggcgtaaagagcttgtaggcggtttgtcgcgtctgctgtgaaaggccggggcttaaccccgtgtattgcagtgggtacgggcagactagagtgcagtaggggagactggaactcctggtgtagcggtggaatgcgcagatatcaggaagaacaccgatggcgaaggcaggtctctgggctgtaactgacgctgagaagcgaaagcatggggagcgaacaggattagataccctggtagtccatgccgtaaacgttgggcactaggtgtgggggacattccacgttttccgcgccgtagctaacgcattaagtgccccgcctggggagtacggccgcaaggctaaaactcaaagaaattgacgggggcccgcacaagcggcggagcatgcggattaattcgatgcaacgcgaagaaccttaccaaggcttgacatatactggaccgcatcagagatggtgtttcccttcggggctggtatacaggtggtgcatggttgtcgtcagctcgtgtcgtgagatgttgggttaagtcccgcaacgagcgcaaccctcgttctatgttgccagcacgttatggtggggactcataggagactgccggggtcaactcggaggaaggtggggatgacgtcaaatcatcatgccccttatgtcttgggcttcacgcatgctacaatggccggtacagagggttgcgatactgtgaggtggagctaatccctaaaagccggtctcagttcggattggggtctgcaactcgaccccatgaagtcggagtcgctagtaatcgcagatcagcaacgctgcggtgaatacgttcccgggccttgtacacaccgcccgtcaagtcacgaaagttggtaacacccaaagccggtggcctaacctttttggagggagccgtctaaggtgggattggcgattgggactaagtcgtaacaaggtagccgtaccggaaggtgcggctggatcacctccttt

SEQ ID NO: 350 - DNA, 1524 bp, artificial sequence
  >GCF_001809525.1_00325 Rothia_dentocariosa
acggagagtttgattctggctcaggacgaacgctggcggcgtgcttaacacatgcaagtcgaacgatgaagcctagcttgctaggtggattagtggcgaacgggtgagtaatacgtgagtgacctacctttgactctgggataagcctgggaaactgggtctaataccggatacgaccaatctccgcatggggtgttggtggaaagcgttatggagtggttttagatgggctcacggcctatcagcttgttggtgaggtaatggcttaccaaggcgacgacgggtagccggcctgagagggtgaccggccacactgggactgagacacggcccagactcctacgggaggcagcagtggggaatattgcacaatgggcgcaagcctgatgcagcgacgccgcgtgagggatgacggccttcgggttgtaaacctctgttagcatcgaagaagcgaaagtgacggtaggtgcagagaaagcgccggctaactacgtgccagcagccgcggtaatacgtagggcgcgagcgttgtccggaattattgggcgtaaagagcttgtaggcggttggtcgcgtctgctgtgaaaggctggggcttaaccctggttttgcagtgggtacgggctaactagagtgcagtaggggagactggaattcctggtgtagcggtggaatgcgcagatatcaggaggaacaccgatggcgaaggcaggtctctgggctgtaactgacgctgagaagcgaaagcatggggagcgaacaggattagataccctggtagtccatgccgtaaacgttgggcactaggtgtgggggacattccacgttttccgcgccgtagctaacgcattaagtgccccgcctggggagtacggccgcaaggctaaaactcaaagaaattgacgggggcccgcacaagcggcggagcatgcggattaattcgatgcaacgcgaagaaccttaccaaggcttgacatatactggactgcgtcagagatggcgtttcccttcggggctggtatacaggtggtgcatggttgtcgtcagctcgtgtcgtgagatgttgggttaagtcccgcaacgagcgcaaccctcgttctatgttgccagcacgtgatggtggggactcataggagactgccggggtcaactcggaggaaggtggggatgacgtcaaatcatcatgccccttatgtcttgggcttcacgcatgctacaatggccggtacagagggttgcgatactgtgaggtggagctaatccctaaaagccggtctcagttcggattggggtctgcaactcgaccccatgaagtcggagtcgctagtaatcgcagatcagcaacgctgcggtgaatacgttcccgggccttgtacacaccgcccgtcaagtcacgaaagttggtaacacccgaagccggtggcctaacccttgtggggggagccgtcgaaggtgggactggcgattgggactaagtcgtaacaaggtagccgtaccggaaggtgcggctggatcacctccttt

SEQ ID NO: 351 - DNA, 809 bp, artificial sequence
  >GCF_001810635.1_00152 Rothia_dentocariosa
cggctaactacgtgccagcagccgcggtaatacgtagggcgcgagcgttgtccggaattattgggcgtaaagagcttgtaggcggttggtcgcgtctgctgtgaaaggctggggcttaaccctggttttgcagtgggtacgggctaactagagtgcagtaggggagactggaattcctggtgtagcggtggaatgcgcagatatcaggaggaacaccgatggcgaaggcaggtctctgggctgtaactgacgctgagaagcgaaagcatggggagcgaacaggattagataccctggtagtccatgccgtaaacgttgggcactaggtgtgggggacattccacgttttccgcgccgtagctaacgcattaagtgccccgcctggggagtacggccgcaaggctaaaactcaaagaaattgacgggggcccgcacaagcggcggagcatgcggattaattcgatgcaacgcgaagaaccttaccaaggcttgacatatactggactgcgtcagagatggcgtttcccttcggggctggtatacaggtggtgcatggttgtcgtcagctcgtgtcgtgagatgttgggttaagtcccgcaacgagcgcaaccctcgttctatgttgccagcacgtgatggtggggactcataggagactgccggggttaactcggaggaaggtggggatgacgtcaaatcatcatgccccttatgtcttgggcttcacgcatgctacaatggccggtacagagggttgcgatactgtgaggtggagctaatccctaaaagccggtctcagttcggattgg

SEQ ID NO: 352 - DNA, 1524 bp, artificial sequence
  >GCF_001810775.1_00513 Rothia_mucilaginosa
acggagagtttgattctggctcaggacgaacgctggcggcgtgcttaacacatgcaagtcgaacgatgaagcctagcttgctaggtggattagtggcgaacgggtgagtaatacgtgagtaacctacctttaactctgggataagcccgggaaactgggtctaataccggatacgaccaatctccgcatggggtgttggtggaaagcgttatgtagtggttatagatgggctcacggcctatcagcttgttggtgaggtaacggctcaccaaggcgacgacgggtagccggcctgagagggtgaccggccacactgggactgagacacggcccagactcctacgggaggcagcagtggggaatattgcacaatgggcgcaagcctgatgcagcgacgccgcgtgagggatgacggccttcgggttgtaaacctctgttagcagggaagaagagagattgacggtacctgcagagaaagcgccggctaactacgtgccagcagccgcggtaatacgtagggcgcgagcgttgtccggaattattgggcgtaaagagcttgtaggcggtttgtcgcgtctgctgtgaaaggccggagcttaactccgtgtattgcagtgggtacgggcagactagagtgcagtaggggagactggaattcctggtgtagcggtggaatgcgcagatatcaggaggaacaccgatggcgaaggcaggtctctgggctgtaactgacgctgagaagcgaaagcatggggagcgaacaggattagataccctggtagtccatgccgtaaacgttgggcactaggtgtgggggacattccacgttttccgcgccgtagctaacgcattaagtgccccgcctggggagtacggccgcaaggctaaaactcaaagaaattgacgggggcccgcacaagcggcggagcatgcggattaattcgatgcaacgcgaagaaccttaccaaggcttgacatatactggaccgcatcagagatggtgtttcccttcggggctggtatacaggtggtgcatggttgtcgtcagctcgtgtcgtgagatgttgggttaagtcccgcaacgagcgcaaccctcgttctatgttgccagcacgttatggtggggactcataggagactgccggggtcaactcggaggaaggtggggatgacgtcaaatcatcatgccccttatgtcttgggcttcacgcatgctacaatggccggtacagagggttgcgatactgtgaggtggagctaatccctaaaagccggtctcagttcggattggggtctgcaactcgaccccatgaagtcggagtcgctagtaatcgcagatcagcaacgctgcggtgaatacgttcccgggccttgtacacaccgcccgtcaagtcacgaaagttggtaacacccaaagccggtggcctaaccttttggagggagccgtctaaggtgggattggcgattgggactaagtcgtaacaaggtagccgtaccggaaggtgcggctggatcacctccttt

SEQ ID NO: 353 - DNA, 1553 bp, artificial sequence
  >GCF_001811085.1_00430 Streptococcus_gordonii
aatgagagtttgatcctggctcaggacgaacgctggcggcgtgcctaatacatgcaagtagaacgcacagtttataccgtagcttgctacaccatagactgtgagttgcgaacgggtgagtaacgcgtaggtaacctgcctggtagcgggggataactattggaaacgatagctaataccgcataatattaattattgcatgataattgattaaaaggtgcaattgcaccactaccagatggacctgcgttgtattagctagtaggtgaggtaacggctcacctaggcgacgatacatagccgacctgagagggtgatcggccacactgggactgagacacggcccagactcctacgggaggcagcagtagggaatcttcggcaatggacgaaagtctgaccgagcaacgccgcgtgagtgaagaaggttttcggatcgtaaagctctgttgtaagagaagaacgggtgtgagagtggaaagttcacactgtgacggtatcttaccagaaagggacggctaactacgtgccagcagccgcggtaatacgtaggtcccgagcgttgtccggatttattgggcgtaaagcgagcgcaggcggttagataagtctgaagttaaaggctgtggcttaaccatagtacgctttggaaactgtttaacttgagtgcagaaggggagagtggaattccatgtgtagcggtgaaatgcgtagatatatggaggaacaccggtggcgaaagcggctctctggtctgtaactgacgctgaggctcgaaagcgtggggagcgaacaggattagataccctggtagtccacgccgtaaacgatgagtgctaggtgttaggccctttccggggcttagtgccgcagctaacgcattaagcactccgcctggggagtacgaccgcaaggttgaaactcaaaggaattgacgggggcccgcacaagcggtggagcatgtggtttaattcgaagcaacgcgaagaaccttaccaggtcttgacatcccgatgcccgctctagagatagagttttacttcggtacatcggtgacaggtggtgcatggttgtcgtcagctcgtgtcgtgagatgttgggttaagtcccgcaacgagcgcaacccttattgttagttgccatcattcagttgggcactctagcgagactgccggtaataaaccggaggaaggtggggatgacgtcaaatcatcatgccccttatgacctgggctacacacgtgctacaatggctggtacaacgagtcgcaagtcggtgacggcaagctaatctcttaaagccagtctcagttcggattgtaggctgcaactcgcctacatgaagtcggaatcgctagtaatcgcggatcagcacgccgcggtgaatacgttcccgggccttgtacacaccgcccgtcacaccacgagagtttgtaacacccgaagtcggtgaggtaaccttttaggagccagccgcctaaggtgggatagatgattggggtgaagtcgtaacaaggtagccgtatcggaaggtgcggctggatcacctcctt

SEQ ID NO: 354 - DNA, 1264 bp, artificial sequence
  >GCF_001811305.1_00005 Streptococcus_infantis_group
aatgagagtttgatcctggctcaggacgaacgctggcggcgtgcctaatacatgcaagtagaacgctgaaggaggagcttgcttctccggatgagttgcgaacgggtgagtaacgcgtaggtaacctgcctggtagcgggggataactattggaaacgatagctaataccgcataacagtagatattgcatgatatctgcttgaaaggtgcaattgcatcactaccagatggacctgcgttgtattagctagttggtggggtaacggctcaccaaggcgacgatacatagccgacctgagagggtgatcggccacactgggactgagacacggcccagactcctacgggaggcagcagtagggaatcttcggcaatggacggaagtctgaccgagcaacgccgcgtgagtgaagaaggttttcggatcgtaaagctctgttgtaagagaagaacgagtgtgagagtggaaagttcacactgtgacggtatcttaccagaaagggacggctaactacgtgccagcagccgcggtaatacgtaggtcccgagcgttgtccggatttattgggcgtaaagcgagcgcaggcggttagataagtctgaagttaaaggctgtggcttaaccatagtacgctttggaaactgtttaacttgagtgcaagaggggagagtggaattccatgtgtagcggtgaaatgcgtagatatatggaggaacaccggtggcgaaagcggctctctggcttgtaactgacgctgaggctcgaaagcgtggggagcaaacaggattagataccctggtagtccacgccgtaaacgatgagtgctaggtgttagaccctttccggggtttagtgccgcagctaacgcattaagcactccgcctggggagtacgaccgcaaggttgaaactcaaaggaattgacgggggcccgcacaagcggtggagcatgtggtttaattcgaagcaacgcgaagaaccttaccaggtcttgacatccctctgaccactctagagatagagttttccttcgggacagaggtgacaggtggtgcatggttgtcgtcagctcgtgtcgtgagatgttgggttaagtcccgcaacgagcgcaacccctattgttagttgccatcattcagttgggcactctagcgagactgccggtaataaaccggaggaaggtggggatgacgtcaaatcatcatgccccttatgacctgggctacacacgtgctacaatggctggtacaacgagtcgcaagt

SEQ ID NO: 355 - DNA, 1328 bp, artificial sequence
  >GCF_001811505.1_00043 Streptococcus_infantis_group
catcactaccagatggacctgcgttgtattagctagttggtgaggtaacggctcaccaaggcgacgatacatagccgacctgagagggtgatcggccacactgggactgagacacggcccagactcctacgggaggcagcagtagggaatcttcggcaatggacggaagtctgaccgagcaacgccgcgtgagtgaagaaggttttcggatcgtaaagctctgttgtaagagaagaacgagtgtgagagtggaaagttcacactgtgacggtatcttaccagaaagggacggctaactacgtgccagcagccgcggtaatacgtaggtcccgagcgttgtccggatttattgggcgtaaagcgagcgcaggcggttagataagtctgaagttaaaggctgtggcttaaccatagtacgctttggaaactgtttaacttgagtgcaagaggggagagtggaattccatgtgtagcggtgaaatgcgtagatatatggaggaacaccggtggcgaaagcggctctctggcttgtaactgacgctgaggctcgaaagcgtggggagcaaacaggattagataccctggtagtccacgccgtaaacgatgagtgctaggtgttagaccctttccggggtttagtgccgcagctaacgcattaagcactccgcctggggagtacgaccgcaaggttgaaactcaaaggaattgacgggggcccgcacaagcggtggagcatgtggtttaattcgaagcaacgcgaagaaccttaccaggtcttgacatccctctgatcgctctagagatagagttttccttcgggacagaggtgacaggtggtgcatggttgtcgtcagctcgtgtcgtgagatgttgggttaagtcccgcaacgagcgcaacccctattgttagttgccatcattcagttgggcactctagcgagactgccggtaataaaccggaggaaggtggggatgacgtcaaatcatcatgccccttatgacctgggctacacacgtgctacaatggctggtacaacgagtcgcaagccggtgacggcaagctaatctcttaaagccagtctcagttcggattgtaggctgcaactcgcctacatgaagtcggaatcgctagtaatcgcggatcagcacgccgcggtgaatacgttcccgggccttgtacacaccgcccgtcacaccacgagagtttgtaacacccgaagtcggtgaggtaaccttttaggagccagccgcctaaggtgggatagatgattggggtgaagtcgtaacaaggtagccgtatcggaaggtgcggctggatcacctccttt

SEQ ID NO: 356 - DNA, 1157 bp, artificial sequence
  >GCF_001812015.1_00054 Streptococcus_parasanguinis
ctgaccgagcaacgccgcgtgagtgaagaaggttttcggatcgtaaagctctgttgtaagagaagaacgagtgtgagagtggaaagttcacactgtgacggtaacttaccagaaagggacggctaactacgtgccagcagccgcggtaatacgtaggtcccgagcgttatccggatttattgggcgtaaagcgagcgcaggcggttagataagtctgaagttaaaggctgtggcttaaccatagtacgctttggaaactgtttaacttgagtgcagaaggggagagtggaattccatgtgtagcggtgaaatgcgtagatatatggaggaacaccggtggcgaaagcggctctctggtctgtaactgacgctgaggctcgaaagcgtggggagcaaacaggattagataccctggtagtccacgccgtaaacgatgagtgctaggtgttgggtcctttccggggctcagtgccgcagctaacgcattaagcactccgcctggggagtacgaccgcaaggttgaaactcaaaggaattgacgggggcccgcacaagcggtggagcatgtggtttaattcgaagcaacgcgaagaaccttaccaggtcttgacatccctctgaccgctctagagatagagttttccttcgggacagaggtgacaggtggtgcatggttgtcgtcagctcgtgtcgtgagatgttgggttaagtcccgcaacgagcgcaacccctattgttagttgccatcattgagttgggcactctagcgagactgccggtaataaaccggaggaaggtggggatgacgtcaaatcatcatgccccttatgacctgggctacacacgtgctacaatggctggtacaacgagtcgcgagtcggtgacggcaagctaatctcttaaagccagtctcagttcggattgtaggctgcaactcgcctacatgaagtcggaatcgctagtaatcgcggatcagcacgccgcggtgaatacgttcccgggccttgtacacaccgcccgtcacaccacgagagtttgtaacacccgaagtcggtgaggtaaccgtaaggagccagccgcctaaggtgggatagatgattggggtgaagtcgtaacaaggtagccgtatcggaaggtgcggctggatcacctccttt

SEQ ID NO: 357 - DNA, 1524 bp, artificial sequence
  >GCF_001812085.1_00002 Rothia_mucilaginosa
acggagagtttgattctggctcaggacgaacgctggcggcgtgcttaacacatgcaagtcgaacgatgaagcctagcttgctaggtggattagtggcgaacgggtgagtaatacgtgagtaacctacctttaactctgggataagcctgggaaactgggtctaataccggatacgaccaatctccgcatggggtgttggtggaaagcgttatgtagtggttatagatgggctcacggcctatcagcttgttggtgaggtaacggctcaccaaggcgacgacgggtagccggcctgagagggtgaccggccacactgggactgagacacggcccagactcctacgggaggcagcagtggggaatattgcacaatgggcgcaagcctgatgcagcgacgccgcgtgagggatgacggccttcgggttgtaaacctctgttagcagggaagaagagaaattgacggtacctgcagagaaagcgccggctaactacgtgccagcagccgcggtaatacgtagggcgcgagcgttgtccggaattattgggcgtaaagagcttgtaggcggtttgtcgcgtctgctgtgaaaggccggggcttaaccccgtgtattgcagtgggtacgggcagactagagtgcagtaggggagactggaattcctggtgtagcggtggaatgcgcagatatcaggaggaacaccgatggcgaaggcaggtctctgggctgtaactgacgctgagaagcgaaagcatggggagcgaacaggattagataccctggtagtccatgccgtaaacgttgggcactaggtgtgggggacattccacgttttccgcgccgtagctaacgcattaagtgccccgcctggggagtacggccgcaaggctaaaactcaaagaaattgacgggggcccgcacaagcggcggagcatgcggattaattcgatgcaacgcgaagaaccttaccaaggcttgacatatactggaccgcatcagagatggtgtttcccttcggggctggtatacaggtggtgcatggttgtcgtcagctcgtgtcgtgagatgttgggttaagtcccgcaacgagcgcaaccctcgttctatgttgccagcacgttatggtggggactcataggagactgccggggtcaactcggaggaaggtggggatgacgtcaaatcatcatgccccttatgtcttgggcttcacgcatgctacaatggccggtacagagggttgcgatactgtgaggtggagctaatccctaaaagccggtctcagttcggattggggtctgcaactcgaccccatgaagtcggagtcgctagtaatcgcagatcagcaacgctgcggtgaatacgttcccgggccttgtacacaccgcccgtcaagtcacgaaagttggtaacacccaaagccggtggcctaaccttttggagggagccgtctaaggtgggattggcgattgggactaagtcgtaacaaggtagccgtaccggaaggtgcggctggatcacctccttt

SEQ ID NO: 358 - DNA, 1526 bp, artificial sequence
  >GCF_001812205.1_00134 Rothia_mucilaginosa
acggagagtttgattctggctcaggacgaacgctggcggcgtgcttaacacatgcaagtcgaacgatgaagcctagcttgctaggtggattagtggcgaacgggtgagtaatacgtgagtaacctacctttaactctgggataagcctgggaaactgggtctaataccggatacgaccaatctccgcatggggtgttggtggaaagcgttatgtagtggttatagatgggctcacggcctatcagcttgttggtgaggtaacggctcaccaaggcgacgacgggtagccggcctgagagggtgaccggccacactgggactgagacacggcccagactcctacgggaggcagcagtggggaatattgcacaatgggcgcaagcctgatgcagcgacgccgcgtgagggatgacggccttcgggttgtaaacctctgttagcagggaagaagagagattgacggtacctgcagagaaagcgccggctaactacgtgccagcagccgcggtaatacgtagggcgcgagcgttgtccggaattattgggcgtaaagagcttgtaggcggtttgtcgcgtctgctgtgaaaggccggagcttaactccgtgtattgcagtgggtacgggcagactagagtgcagtaggggagactggaattcctggtgtagcggtggaatgcgcagatatcaggaggaacaccgatggcgaaggcaggtctctgggctgtaactgacgctgagaagcgaaagcatggggagcgaacaggattagataccctggtagtccatgccgtaaacgttgggcactaggtgtggggaacattccacgttttccgcgccgtagctaacgcattaagtgccccgcctggggagtacggccgcaaggctaaaactcaaagaaattgacgggggcccgcacaagcggcggagcatgcggattaattcgatgcaacgcgaagaaccttaccaaggcttgacatatactggaccgcatcagagatggtgtttcccttcggggctggtatacaggtggtgcatggttgtcgtcagctcgtgtcgtgagatgttgggttaagtcccgcaacgagcgcaaccctcgttctatgttgccagcacgttatggtggggactcataggagactgccggggtcaactcggaggaaggtggggatgacgtcaaatcatcatgccccttatgtcttgggcttcacgcatgctacaatggccggtacagagggttgcgatactgtgaggtggagctaatccctaaaagccggtctcagttcggattggggtctgcaactcgaccccatgaagtcggagtcgctagtaatcgcagatcagcaacgctgcggtgaatacgttcccgggccttgtacacaccgcccgtcaagtcacgaaagttggtaacacccaaagccggtggcctaacccttttgggagggagccgtctaaggtgggattggcgattgggactaagtcgtaacaaggtagccgtaccggaaggtgcggctggatcacctccttt

SEQ ID NO: 359 - DNA, 1526 bp, artificial sequence
  >GCF_001812775.1_00002 Rothia_mucilaginosa
acggagagtttgattctggctcaggacgaacgctggcggcgtgcttaacacatgcaagtcgaacgatgaagcctagcttgctaggtggattagtggcgaacgggcgagtaatacgtgagtaacctacctttaactctgggataagcctgggaaactgggtctaataccggatacgaccaatctccgcatggagtgttggtggaaagcgttatgtagtggttatagatgggctcacggcctatcagcttgttggtgaggtaacggctcaccaaggcgacgacgggtagccggcctgagagggtgaccggccacactgggactgagacacggcccagactcctacgggaggcagcagtggggaatattgcacaatgggcgcaagcctgatgcagcgacgccgcgtgagggatgacggccttcgggttgtaaacctctgttagcagggaagaagagagattgacggtacctgcagagaaagcgccggctaactacgtgccagcagccgcggtaatacgtagggcgcgagcgttgtccggaattattgggcgtaaagagcttgtaggcggtttgtcgcgtctgctgtgaaaggccggggcttaaccccgtgtattgcagtgggtacgggcagactagagtgcagtaggggagactggaactcctggtgtagcggtggaatgcgcagatatcaggaagaacaccgatggcgaaggcaggtctctgggctgtaactgacgctgagaagcgaaagcatggggagcgaacaggattagataccctggtagtccatgccgtaaacgttgggcactaggtgtgggggacattccacgttttccgcgccgtagctaacgcattaagtgccccgcctggggagtacggccgcaaggctaaaactcaaagaaattgacgggggcccgcacaagcggcggagcatgcggattaattcgatgcaacgcgaagaaccttaccaaggcttgacatatactggaccgcatcagagatggtgtttcccttcggggctggtatacaggtggtgcatggttgtcgtcagctcgtgtcgtgagatgttgggttaagtcccgcaacgagcgcaaccctcgttctatgttgccagcacgttatggtggggactcataggagactgccggggtcaactcggaggaaggtggggatgacgtcaaatcatcatgccccttatgtcttgggcttcacgcatgctacaatggccggtacagagggttgcgatactgtgaggtggagctaatccctaaaagccggtctcagttcggattggggtctgcaactcgaccccatgaagtcggagtcgctagtaatcgcagatcagcaacgctgcggtgaatacgttcccgggccttgtacacaccgcccgtcaagtcacgaaagttggtaacacccaaagccggtggcctaacccttcggggagggagccgtctaaggtgggattggcgattgggactaagtcgtaacaaggtagccgtaccggaaggtgcggctggatcacctccttt

SEQ ID NO: 360 - DNA, 1316 bp, artificial sequence
  >GCF_001813105.1_00749 Streptococcus_parasanguinis
gatggacctgcgttgtattagctagttggtgaggtaacggctcaccaaggcgacgatacatagccgacctgagagggtgatcggccacactgggactgagacacggcccagactcctacgggaggcagcagtagggaatcttcggcaatgggggcaaccctgaccgagcaacgccgcgtgagtgaagaaggttttcggatcgtaaagctctgttgtaagagaagaacgagtgtgagagtggaaagttcacactgtgacggtaacttaccagaaagggacggctaactacgtgccagcagccgcggtaatacgtaggtcccgagcgttatccggatttattgggcgtaaagcgagcgcaggcggttagataagtctgaagttaaaggctgtggcttaaccatagtacgctttggaaactgtttaacttgagtgcagaaggggagagtggaattccatgtgtagcggtgaaatgcgtagatatatggaggaacaccggtggcgaaagcggctctctggtctgtaactgacgctgaggctcgaaagcgtggggagcaaacaggattagataccctggtagtccacgccgtaaacgatgagtgctaggtgttgggtcctttccgggactcagtgccgcagctaacgcattaagcactccgcctggggagtacgaccgcaaggttgaaactcaaaggaattgacgggggcccgcacaagcggtggagcatgtggtttaattcgaagcaacgcgaagaaccttaccaggtcttgacatccctctgaccgctctagagatagagttttccttcgggacagaggtgacaggtggtgcatggttgtcgtcagctcgtgtcgtgagatgttgggttaagtcccgcaacgagcgcaacccctattgttagttgccatcattgagttgggcactctagcgagactgccggtaataaaccggaggaaggtggggatgacgtcaaatcatcatgccccttatgacctgggctacacacgtgctacaatggctggtacaacgagtcgcgagtcggtgacggcaagctaatctcttaaagccagtctcagttcggattgtaggctgcaactcgcctacatgaagtcggaatcgctagtaatcgcggatcagcacgccgcggtgaatacgttcccgggccttgtacacaccgcccgtcacaccacgagagtttgtaacacccgaagtcggtgaggtaaccgtaaggagccagccgcctaaggtgggatagatgattggggtgaagtcgtaacaaggtagccgtatcggaaggtgcggctggatcacctccttt

SEQ ID NO: 361 - DNA, 1546 bp, artificial sequence
  >GCF_001813295.1_01138 Streptococcus_parasanguinis
taatgagagtttgatcctggctcaggatgaacgctggcggcgtgcctaatacatgcaagtagaacgctgaagcttggtgcttgcaccgagcggatgagttgcgaacgggtgagtaacgcgtaggtaacctgcctcttagcgggggataactattggaaacgatagctaataccgcataaaagtcgacattgcatgatgttgatttgaaaggtgcaaatgcatcactaagagatggacctgcgttgtattagctagttggtgaggtaacggctcaccaaggcgacgatacatagccgacctgagagggtgatcggccacactgggactgagacacggcccagactcctacgggaggcagcagtagggaatcttcggcaatgggggcaaccctgaccgagcaacgccgcgtgagtgaagaaggttttcggatcgtaaagctctgttgtaagagaagaacgagtgtgagagtggaaagttcacactgtgacggtaacttaccagaaagggacggctaactacgtgccagcagccgcggtaatacgtaggtcccgagcgttatccggatttattgggcgtaaagcgagcgcaggcggttagataagtctgaagttaaaggctgtggcttaaccatagtacgctttggaaactgtttaacttgagtgcagaaggggagagtggaattccatgtgtagcggtgaaatgcgtagatatatggaggaacaccggtggcgaaagcggctctctggtctgtaactgacgctgaggctcgaaagcgtggggagcaaacaggattagataccctggtagtccacgccgtaaacgatgagtgctaggtgttgggtcctttccgggactcagtgccgcagctaacgcattaagcactccgcctggggagtacgaccgcaaggttgaaactcaaaggaattgacgggggcccgcacaagcggtggagcatgtggtttaattcgaagcaacgcgaagaaccttaccaggtcttgacatccctctgaccgctctagagatagagttttccttcgggacagaggtgacaggtggtgcatggttgtcgtcagctcgtgtcgtgagatgttgggttaagtcccgcaacgagcgcaacccctattgttagttgccatcattgagttgggcactctagcgagactgccggtaataaaccggaggaaggtggggatgacgtcaaatcatcatgccccttatgacctgggctacacacgtgctacaatggctggtacaacgagtcgcgagtcggtgacggcaagctaatctcttaaagccagtctcagttcggattgtaggctgcaactcgcctacatgaagtcggaatcgctagtaatcgcggatcagcacgccgcggtgaatacgttcccgggccttgtacacaccgcccgtcacaccacgagagtttgtaacacccgaagtcggtgaggtaaccgtaaggagccagccgcctaaggtgggatagatgattggggtgaagtcgtaacaaggtagccgtatcggaaggtgcggctggatcacctccttt

SEQ ID NO: 362 - DNA, 1545 bp, artificial sequence
  >GCF_001813525.1_00035 Streptococcus_parasanguinis
aatgagagtttgatcctggctcaggatgaacgctggcggcgtgcctaatacatgcaagtagaacgctgaagcttggtgcttgcaccgagcggatgagttgcgaacgggtgagtaacgcgtaggtaacctgcctcttagcgggggataactattggaaacgatagctaataccgcataaaagtcgatatcgcatgatattgatttgaaaggtgcaattgcatcactaagagatggacctgcgttgtattagctagttggtgaggtaacggctcaccaaggcgacgatacatagccgacctgagagggtgatcggccacactgggactgagacacggcccagactcctacgggaggcagcagtagggaatcttcggcaatgggggcaaccctgaccgagcaacgccgcgtgagtgaagaaggttttcggatcgtaaagctctgttgtaagagaagaacgagtgtgagagtggaaagttcacactgtgacggtaacttaccagaaagggacggctaactacgtgccagcagccgcggtaatacgtaggtcccgagcgttatccggatttattgggcgtaaagcgagcgcaggcggttagataagtctgaagttaaaggctgtggcttaaccatagtacgctttggaaactgtttaacttgagtgcagaaggggagagtggaattccatgtgtagcggtgaaatgcgtagatatatggaggaacaccggtggcgaaagcggctctctggtctgtaactgacgctgaggctcgaaagcgtggggagcaaacaggattagataccctggtagtccacgccgtaaacgatgagtgctaggtgttgggtcctttccgggactcagtgccgtagctaacgcattaagcactccgcctggggagtacgaccgcaaggttgaaactcaaaggaattgacgggggcccgcacaagcggtggagcatgtggtttaattcgaagcaacgcgaagaaccttaccaggtcttgacatccctctgaccgctctagagatagagttttccttcgggacagaggtgacaggtggtgcatggttgtcgtcagctcgtgtcgtgagatgttgggttaagtcccgcaacgagcgcaacccctattgttagttgccatcattcagttgggcactctagcgagactgccggtaataaaccggaggaaggtggggatgacgtcaaatcatcatgccccttatgacctgggctacacacgtgctacaatggctggtacaacgagtcgcgagtcggtgacggcaagctaatctcttaaagccagtctcagttcggattgtaggctgcaactcgcctacatgaagtcggaatcgctagtaatcgcggatcagcacgccgcggtgaatacgttcccgggccttgtacacaccgcccgtcacaccacgagagtttgtaacacccgaagtcggtgaggtaaccgtaaggagccagccgcctaaggtgggatagatgattggggtgaagtcgtaacaaggtagccgtatcggaaggtgcggctggatcacctccttt

SEQ ID NO: 363 - DNA, 1526 bp, artificial sequence
  >GCF_001813725.1_00234 Rothia_mucilaginosa
acggagagtttgattctggctcaggacgaacgctggcggcgtgcttaacacatgcaagtcgaacgatgaagcctagcttgctaggtggattagtggcgaacgggtgagtaatacgtgagtaacctacctttaactctgggataagcctgggaaactgggtctaataccggatacgaccaatctccgcatggggtgttggtggaaagcgttatgtagtggttatcgatgggctcacggcctatcagcttgttggtgaggtaacggctcaccaaggcgacgacgggtagccggcctgagagggtgaccggccacactgggactgagacacggcccagactcctacgggaggcagcagtggggaatattgcacaatgggcgcaagcctgatgcagcgacgccgcgtgagggatgacggccttcgggttgtaaacctctgttagcagggaagaagagagattgacggtacctgcagagaaagcgccggctaactacgtgccagcagccgcggtaatacgtagggcgcgagcgttgtccggaattattgggcgtaaagagcttgtaggcggtttgtcgcgtctgctgtgaaaggccggagcttaactccgtgtattgcagtgggtacgggcagactagagtgcagtaggggagactggaattcctggtgtagcggtggaatgcgcagatatcaggaggaacaccgatggcgaaggcaggtctctgggctgtaactgacgctgagaagcgaaagcatggggagcgaacaggattagataccctggtagtccatgccgtaaacgttgggcactaggtgtgggggacattccacgttttccgcgccgtagctaacgcattaagtgccccgcctggggagtacggccgcaaggctaaaactcaaagaaattgacgggggcccgcacaagcggcggagcatgcggattaattcgatgcaacgcgaagaaccttaccaaggcttgacatatactggaccgcatcagagatggtgtttcccttcggggctggtatacaggtggtgcatggttgtcgtcagctcgtgtcgtgagatgttgggttaagtcccgcaacgagcgcaaccctcgttctatgttgccagcacgttatggtggggactcataggagactgccggggtcaactcggaggaaggtggggatgacgtcaaatcatcatgccccttatgtcttgggcttcacgcatgctacaatggccggtacagagggttgcgatactgtgaggtggagctaatccctaaaagccggtctcagttcggattggggtctgcaactcgaccccatgaagtcggagtcgctagtaatcgcagatcagcaacgctgcggtgaatacgttcccgggccttgtacacaccgcccgtcaagtcacgaaagttggtaacacccaaagccggtggcctaacccttttgggagggagccgtctaaggtgggattggcgattgggactaagtcgtaacaaggtagccgtaccggaaggtgcggctggatcacctccttt

SEQ ID NO: 364 - DNA, 1544 bp, artificial sequence
  >GCF_001814215.1_00047 Streptococcus_infantis_group
aatgagagtttgatcctggctcaggacgaacgctggcggcgtgcctaatacatgcaagtagaacgctgaaggaggagcttgctctttccggatgagttgcgaacgggtgagtaacgcgtaggtaacctgcctggtagcgggggataactattggaaacgatagctaataccgcataagagtagatatcgcatgatagctgcttgaaaggtgcaattgcaccactaccagatggacctgcgttgtattagctagttggtgaggtaacggctcaccaaggcaacgatacatagccgacctgagagggtgatcggccacactgggactgagacacggcccagactcctacgggaggcagcagtagggaatcttcggcaatggacggaagtctgaccgagcaacgccgcgtgagtgaagaaggttttcggatcgtaaagctctgttgtaagagaagaacgagtgtgagagtggaaagttcacactgtgacggtatcttaccagaaagggacggctaactacgtgccagcagccgcggtaatacgtaggtcccgagcgttgtccggatttattgggcgtaaagcgagcgcaggcggttagataagtctgaagttaaaggctgtggcttaaccatagtacgctttggaaactgtttaacttgagtgcaagaggggagagtggaattccatgtgtagcggtgaaatgcgtagatatatggaggaacaccggtggcgaaagcggctctctggcttgtaactgacgctgaggctcgaaagcgtggggagcaaacaggattagataccctggtagtccacgccgtaaacgatgagtgctaggtgttagaccctttccggggtttagtgccgtagctaacgcattaagcactccgcctggggagtacgaccgcaaggttgaaactcaaaggaattgacgggggcccgcacaagcggtggagcatgtggtttaattcgaagcaacgcgaagaaccttaccaggtcttgacatccctctgaccgctctagagatagagttttccttcgggacagaggtgacaggtggtgcatggttgtcgtcagctcgtgtcgtgagatgttgggttaagtcccgcaacgagcgcaacccctattgttagttgccatcattcagttgggcactctagcgagactgccggtaataaaccggaggaaggtggggatgacgtcaaatcatcatgccccttatgacctgggctacacacgtgctacaatggttggtacaacgagtcgcaagccggtgacggcaagctaatctcttaaagccaatctcagttcggattgtaggctgcaactcgcctacatgaagtcggaatcgctagtaatcgcggatcagcacgccgcggtgaatacgttcccgggccttgtacacaccgcccgtcacaccacgagagtttgtaacacccgaagtcggtgaggtaaccttttaggagccagccgcctaaggtgggatagatgattggggtgaagtcgtaacaaggtagccgtatcggaaggtgcggctggatcacctcctt

SEQ ID NO: 365 - DNA, 1526 bp, artificial sequence
  >GCF_001814485.1_00090 Rothia_mucilaginosa
acggagagtttgattctggctcaggacgaacgctggcggcgtgcttaacacatgcaagtcgaacgatgaagcctagcttgctaggtggattagtggcgaacgggtgagtaatacgtgagtaacctacctttaactctgggataagcccgggaaactgggtctaataccggatacgaccaatctccgcatggggtgttggtggaaagcgttatgtagtggttatagatgggctcacggcctatcagcttgttggtgaggtaacggctcaccaaggcgacgacgggtagccggcctgagagggtgaccggccacactgggactgagacacggcccagactcctacgggaggcagcagtggggaatattgcacaatgggcgcaagcctgatgcagcgacgccgcgtgagggatgacggccttcgggttgtaaacctctgttagcagggaagaagagagattgacggtacctgcagagaaagcgccggctaactacgtgccagcagccgcggtaatacgtagggcgcgagcgttgtccggaattattgggcgtaaagagcttgtaggcggtttgtcgcgtctgctgtgaaaggccggggcttaactccgtgtattgcagtgggtacgggcagactagagtgcagtaggggagactggaattcctggtgtagcggtggaatgcgcagatatcaggaggaacaccgatggcgaaggcaggtctctgggctgtaactgacgctgagaagcgaaagcatggggagcgaacaggattagataccctggtagtccatgccgtaaacgttgggcactaggtgtgggggacattccacgttttccgcgccgtagctaacgcattaagtgccccgcctggggagtacggccgcaaggctaaaactcaaagaaattgacgggggcccgcacaagcggcggagcatgcggattaattcgatgcaacgcgaagaaccttaccaaggcttgacatatactggaccgcatcagagatggtgtttcccttcggggctggtatacaggtggtgcatggttgtcgtcagctcgtgtcgtgagatgttgggttaagtcccgcaacgagcgcaaccctcgttctatgttgccagcacgttatggtggggactcataggagactgccggggtcaactcggaggaaggtggggatgacgtcaaatcatcatgccccttatgtcttgggcttcacgcatgctacaatggccggtacagagggttgcgatactgtgaggtggagctaatccctaaaagccggtctcagttcggattggggtctgcaactcgaccccatgaagtcggagtcgctagtaatcgcagatcagcaacgctgcggtgaatacgttcccgggccttgtacacaccgcccgtcaagtcacgaaagttggtaacacccaaagccggtggcctaacccttttgggagggagccgtctaaggtgggattggcgattgggactaagtcgtaacaaggtagccgtaccggaaggtgcggctggatcacctccttt

SEQ ID NO: 366 - DNA, 1526 bp, artificial sequence
  >GCF_001814645.1_00001 Rothia_mucilaginosa
acggagagtttgattctggctcaggacgaacgctggcggcgtgcttaacacatgcaagtcgaacgatgaagcctagcttgctaggtggattagtggcgaacgggtgagtaatacgtgagtaacctacctttaactctgggataagcctgggaaactgggtctaataccggatacgaccaatctccgcatggggtgttggtggaaagcgttatgtagtggttatagatgggctcacggcctatcagcttgttggtgaggtaacggctcaccaaggcgacgacgggtagccggcctgagagggtgaccggccacactgggactgagacacggcccagactcctacgggaggcagcagtggggaatattgcacaatgggcgcaagcctgatgcagcgacgccgcgtgagggatgacggccttcgggttgtaaacctctgttagcagggaagaagagagattgacggtacctgcagagaaagcgccggctaactacgtgccagcagccgcggtaatacgtagggcgcgagcgttgtccggaattattgggcgtaaagagcttgtaggcggtttgtcgcgtctgctgtgaaaggccggagcttaactccgtgtattgcagtgggtacgggcagactagagtgcagtaggggagactggaattcctggtgtagcggtggaatgcgcagatatcaggaggaacaccgatggcgaaggcaggtctctgggctgtaactgacgctgagaagcgaaagcatggggagcgaacaggattagataccctggtagtccatgccgtaaacgttgggcactaggtgtggggaacattccacgttttccgcgccgtagctaacgcattaagtgccccgcctggggagtacggccgcaaggctaaaactcaaagaaattgacgggggcccgcacaagcggcggagcatgcggattaattcgatgcaacgcgaagaaccttaccaaggcttgacatatactggaccgcatcagagatggtgtttcccttcggggctggtatacaggtggtgcatggttgtcgtcagctcgtgtcgtgagatgttgggttaagtcccgcaacgagcgcaaccctcgttctatgttgccagcacgttatggtggggactcataggagactgccggggtcaactcggaggaaggtggggatgacgtcaaatcatcatgccccttatgtcttgggcttcacgcatgctacaatggtcggtacagagggttgcgatactgtgaggtggagctaatccctaaaagccggtctcagttcggattggggtctgcaactcgaccccatgaagtcggagtcgctagtaatcgcagatcagcaacgctgcggtgaatacgttcccgggccttgtacacaccgcccgtcaagtcacgaaagttggtaacacccaaagccggtggcctaacccttttgggagggagccgtctaaggtgggattggcgattgggactaagtcgtaacaaggtagccgtaccggaaggtgcggctggatcacctccttt

SEQ ID NO: 367 - DNA, 1543 bp, artificial sequence
  >GCF_001814775.1_00127 Streptococcus_infantis_group
aatgagagtttgatcctggctcaggacgaacgctggcggcgtgcctaatacatgcaagtagaacgctgaaggaggagcttgcttctccggatgagttgcgaacgggtgagtaacgcgtaggtaacctgcctggtagcgggggataactattggaaacgatagctaataccgcataacagtagatattgcatgatatctgcttgaaaggtgcaattgcatcactaccagatggacctgcgttgtattagctagttggtggggtaacggctcaccaaggcgacgatacatagccgacctgagagggtgatcggccacactgggactgagacacggcccagactcctacgggaggcagcagtagggaatcttcggcaatggacggaagtctgaccgagcaacgccgcgtgagtgaagaaggttttcggatcgtaaagctctgttgtaagagaagaacgagtgtgagagtggaaagttcacactgtgacggtatcttaccagaaagggacggctaactacgtgccagcagccgcggtaatacgtaggtcccgagcgttgtccggatttattgggcgtaaagcgagcgcaggcggttagataagtctgaagttaaaggctgtggcttaaccatagtacgctttggaaactgtttaacttgagtgcaagaggggagagtggaattccatgtgtagcggtgaaatgcgtagatatatggaggaacaccggtggcgaaagcggctctctggcttgtaactgacgctgaggctcgaaagcgtggggagcaaacaggattagataccctggtagtccacgccgtaaacgatgagtgctaggtgttagaccctttccggggtttagtgccgtagctaacgcattaagcactccgcctggggagtacgaccgcaaggttgaaactcaaaggaattgacgggggcccgcacaagcggtggagcatgtggtttaattcgaagcaacgcgaagaaccttaccaggtcttgacatccctctgacctctctagagatagagatttccttcgggacagaggtgacaggtggtgcatggttgtcgtcagctcgtgtcgtgagatgttgggttaagtcccgcaacgagcgcaacccctattgttagttgccatcatttagttgggcactctagcgagactgccggtaataaaccggaggaaggtggggatgacgtcaaatcatcatgccccttatgacctgggctacacacgtgctacaatggctggtacaacgagtcgcaagtcggtgacgacaagctaatctcttaaagccagtctcagttcggattgtaggctgcaactcgcctacatgaagtcggaatcgctagtaatcgcggatcagcacgccgcggtgaatacgttcccgggccttgtacacaccgcccgtcacaccacgagagtttgtaacacccgaagtcggtgaggtaaccttttaggagccagccgcctaaggtgggatagatgattggggtgaagtcgtaacaaggtagccgtatcggaaggtgcggctggatcacctcctt

SEQ ID NO: 368 - DNA, 1433 bp, artificial sequence
  >GCF_001814995.1_00863 Rothia_mucilaginosa
acggagagtttgattctggctcaggacgaacgctggcggcgtgcttaacacatgcaagtcgaacgatgaagcctagcttgctaggtggattagtggcgaacgggtgagtaatacgtgagtaacctacctttaactctgggataagcctgggaaactgggtctaataccggatacgaccaatctccgcatggggtgttggtggaaagcgttatgtagtggttatagatgggctcacggcctatcagcttgttggtgaggtaacggctcaccaaggcgacgacgggtagccggcctgagagggtgaccggccacactgggactgagacacggcccagactcctacgggaggcagcagtggggaatattgcacaatgggcgcaagcctgatgcagcgacgccgcgtgagggatgacggccttcgggttgtaaacctctgttagcagggaagaagagagattgacggtacctgcagagaaagcgccggctaactacgtgccagcagccgcggtaatacgtagggcgcgagcgttgtccggaattattgggcgtaaagagcttgtaggcggtttgtcgcgtctgctgtgaaaggccggggcttaactccgtgtattgcagtgggtacgggcagactagagtgcagtaggggagactggaattcctggtgtagcggtggaatgcgcagatatcaggaggaacaccgatggcgaaggcaggtctctgggctgtaactgacgctgagaagcgaaagcatggggagcgaacaggattagataccctggtagtccatgccgtaaacgttgggcactaggtgtgggggacattccacgttttccgcgccgtagctaacgcattaagtgccccgcctggggagtacggccgcaaggctaaaactcaaagaaattgacgggggcccgcacaagcggcggagcatgcggattaattcgatgcaacgcgaagaaccttaccaaggcttgacatatactggaccgcatcagagatggtgtttcccttcggggctggtatacaggtggtgcatggttgtcgtcagctcgtgtcgtgagatgttgggttaagtcccgcaacgagcgcaaccctcgttctatgttgccagcacgtaatggtggggactcataggagactgccggggtcaactcggaggaaggtggggatgacgtcaaatcatcatgccccttatgtcttgggcttcacgcatgctacaatggccggtacagagggttgcgatactgtgaggtggagctaatccctaaaagccggtctcagttcggattggggtctgcaactcgaccccatgaagtcggagtcgctagtaatcgcagatcagcaacgctgcggtgaatacgttcccgggccttgtacacaccgcccgtcaagtcacgaaagttggtaacacccaaagccggtggcctaacctt

SEQ ID NO: 369 - DNA, 1351 bp, artificial sequence
  >GCF_001815045.1_00009 Streptococcus_parasanguinis
atgttgacttgaaaggtgcaattgcatcactaagagatggacctgcgttgtattagctagttggtgaggtaacggctcaccaaggcaacgatacatagccgacctgagagggtgatcggccacactgggactgagacacggcccagactcctacgggaggcagcagtagggaatcttcggcaatgggggcaaccctgaccgagcaacgccgcgtgagtgaagaaggttttcggatcgtaaagctctgttgtaagagaagaacgagtgtgagagtggaaagttcacactgtgacggtaacttaccagaaagggacggctaactacgtgccagcagccgcggtaatacgtaggtcccgagcgttatccggatttattgggcgtaaagcgagcgcaggcggttagataagtctgaagttaaaggctgtggcttaaccatagtacgctttggaaactgtttaacttgagtgcagaaggggagagtggaattccatgtgtagcggtgaaatgcgtagatatatggaggaacaccggtggcgaaagcggctctctggtctgtaactgacgctgaggctcgaaagcgtggggagcaaacaggattagataccctggtagtccacgccgtaaacgatgagtgctaggtgttgggtcctttccgggactcagtgccgcagctaacgcattaagcactccgcctggggagtacgaccgcaaggttgaaactcaaaggaattgacgggggcccgcacaagcggtggagcatgtggtttaattcgaagcaacgcgaagaaccttaccaggtcttgacatccctctgaccgctctagagatagagttttccttcgggacagaggtgacaggtggtgcatggttgtcgtcagctcgtgtcgtgagatgttgggttaagtcccgcaacgagcgcaacccctattgttagttgccatcattcagttgggcactctagcgagactgccggtaataaaccggaggaaggtggggatgacgtcaaatcatcatgccccttatgacctgggctacacacgtgctacaatggctggtacaacgagtcgcgagtcggtgacggcaagctaatctcttaaagccagtctcagttcggattgtaggctgcaactcgcctacatgaagtcggaatcgctagtaatcgcggatcagcacgccgcggtgaatacgttcccgggccttgtacacaccgcccgtcacaccacgagagtttgtaacacccgaagtcggtgaggtaaccatttggagccagccgcctaaggtgggatagatgattggggtgaagtcgtaacaaggtagccgtatcggaaggtgcggctggatcacctccttt

SEQ ID NO: 370 - DNA, 1526 bp, artificial sequence
  >GCF_001815755.1_00654 Rothia_mucilaginosa
acggagagtttgattctggctcaggacgaacgctggcggcgtgcttaacacatgcaagtcgaacgatgaagcctagcttgctaggtggattagtggcgaacgggtgagtaatacgtgagtaacctacctttaactctgggataagcccgggaaactgggtctaataccggatacgaccaatctccgcatggggtgttggtggaaagcgttatgtagtggttatagatgggctcacggcctatcagcttgttggtgaggtaacggctcaccaaggcgacgacgggtagccggcctgagagggtgaccggccacactgggactgagacacggcccagactcctacgggaggcagcagtggggaatattgcacaatgggcgcaagcctgatgcagcgacgccgcgtgagggatgacggccttcgggttgtaaacctctgttagcagggaagaagagagattgacggtacctgcagagaaagcgccggctaactacgtgccagcagccgcggtaatacgtagggcgcgagcgttgtccggaattattgggcgtaaagagcttgtaggcggtttgtcgcgtctgctgtgaaaggccggggcttaactccgtgtattgcagtgggtacgggcagactagagtgcagtaggggagactggaattcctggtgtagcggtggaatgcgcagatatcaggaggaacaccgatggcgaaggcaggtctctgggctgtaactgacgctgagaagcgaaagcatggggagcgaacaggattagataccctggtagtccatgccgtaaacgttgggcactaggtgtgggggacattccacgttttccgcgccgtagctaacgcattaagtgccccgcctggggagtacggccgcaaggctaaaactcaaagaaattgacgggggcccgcacaagcggcggagcatgcggattaattcgatgcaacgcgaagaaccttaccaaggcttgacatatactggaccgcatcagagatggtgtttcccttcggggctggtatacaggtggtgcatggttgtcgtcagctcgtgtcgtgagatgttgggttaagtcccgcaacgagcgcaaccctcgttctatgttgccagcacgttatggtggggactcataggagactgccggggtcaactcggaggaaggtggggatgacgtcaaatcatcatgccccttatgtcttgggcttcacgcatgctacaatggccggtacagagggttgcgatactgtgaggtggagctaatccctaaaagccggtctcagttcggattggggtctgcaactcgaccccatgaagtcggagtcgctagtaatcgcagatcagcaacgctgcggtgaatacgttcccgggccttgtacacaccgcccgtcaagtcacgaaagttggtaacacccaaagccggtggcctaacccttcggggagggagccgtctaaggtgggattggcgattgggactaagtcgtaacaaggtagccgtaccggaaggtgcggctggatcacctccttt

SEQ ID NO: 371 - DNA, 1544 bp, artificial sequence
  >GCF_001837205.1_00371 Streptococcus_salivarius_group
aatgagagtttgatcctggctcaggacgaacgctggcggcgtgcctaatacatgcaagtagaacgctgaagagaggagcttgctcttcttggatgagttgcgaacgggtgagtaacgcgtaggtaacctgccttgtagcgggggataactattggaaacgatagctaataccgcataacaatggatgactcatgtcatttatttgaaaggggcaaatgctccactacaagatggacctgcgttgtattagctagtaggtgaggtaacggctcacctaggcgacgatacatagccgacctgagagggtgatcggccacactgggactgagacacggcccagactcctacgggaggcagcagtagggaatcttcggcaatgggggcaaccctgaccgagcaacgccgcgtgagtgaagaaggttttcggatcgtaaagctctgttgtaagtcaagaacgagtgtgagagtggaaagttcacactgtgacggtagcttaccagaaagggacggctaactacgtgccagcagccgcggtaatacgtaggtcccgagcgttgtccggatttattgggcgtaaagcgagcgcaggcggtttgataagtctgaagttaaaggctgtggctcaaccatagttcgctttggaaactgtcaaacttgagtgcagaaggggagagtggaattccatgtgtagcggtgaaatgcgtagatatatggaggaacaccggtggcgaaagcggctctctggtctgtaactgacgctgaggctcgaaagcgtggggagcgaacaggattagataccctggtagtccacgccgtaaacgatgagtgctaggtgttggatcctttccgggattcagtgccgcagctaacgcattaagcactccgcctggggagtacgaccgcaaggttgaaactcaaaggaattgacgggggcccgcacaagcggtggagcatgtggtttaattcgaagcaacgcgaagaaccttaccaggtcttgacatcccgatgctatttctagagatagaaagttacttcggtacatcggtgacaggtggtgcatggttgtcgtcagctcgtgtcgtgagatgttgggttaagtcccgcaacgagcgcaacccctattgttagttgccatcattcagttgggcactctagcgagactgccggtaataaaccggaggaaggtggggatgacgtcaaatcatcatgccccttatgacctgggctacacacgtgctacaatggttggtacaacgagttgcgagtcggtgacggcaagctaatctcttaaagccaatctcagttcggattgtaggctgcaactcgcctacatgaagtcggaatcgctagtaatcgcggatcagcacgccgcggtgaatacgttcccgggccttgtacacaccgcccgtcacaccacgagagtttgtaacacccgaagtcggtgaggtaaccttttggagccagccgcctaaggtgggatagatgattggggtgaagtcgtaacaaggtagccgtatcggaaggtgcggctggatcacctcctt

SEQ ID NO: 372 - DNA, 1524 bp, artificial sequence
  >GCF_001837265.1_00002 Rothia_mucilaginosa
acggagagtttgattctggctcaggacgaacgctggcggcgtgcttaacacatgcaagtcgaacgatgaagcctagcttgctaggtggattagtggcgaacgggtgagtaatacgtgagtaacctacctttaactctgggataagcctgggaaactgggtctaataccggatacgaccaatctccgcatggggtgttggtggaaagcgttatgtagtggttatagatgggctcacggcctatcagcttgttggtgaggtaacggctcaccaaggcgacgacgggtagccggcctgagagggtgaccggccacactgggactgagacacggcccagactcctacgggaggcagcagtggggaatattgcacaatgggcgcaagcctgatgcagcgacgccgcgtgagggatgacggccttcgggttgtaaacctctgttagcagggaagaagagagattgacggtacctgcagagaaagcgccggctaactacgtgccagcagccgcggtaatacgtagggcgcgagcgttgtccggaattattgggcgtaaagagcttgtaggcggtttgtcgcgtctgctgtgaaaggccggggcttaaccccgtgtattgcagtgggtacgggcagactagagtgcagtaggggagactggaattcctggtgtagcggtggaatgcgcagatatcaggaggaacaccgatggcgaaggcaggtctctgggctgtaactgacgctgagaagcgaaagcatggggagcgaacaggattagataccctggtagtccatgccgtaaacgttgggcactaggtgtgggggacattccacgttttccgcgccgtagctaacgcattaagtgccccgcctggggagtacggccgcaaggctaaaactcaaagaaattgacgggggcccgcacaagcggcggagcatgcggattaattcgatgcaacgcgaagaaccttaccaaggcttgacatatactggaccgcatcagagatggtgtttcccttcggggctggtatacaggtggtgcatggttgtcgtcagctcgtgtcgtgagatgttgggttaagtcccgcaacgagcgcaaccctcgttctatgttgccagcacgtaatggtggggactcataggagactgccggggtcaactcggaggaaggtggggatgacgtcaaatcatcatgccccttatgtcttgggcttcacgcatgctacaatggccggtacagagggttgcgatactgtgaggtggagctaatccctaaaagccggtctcagttcggattggggtctgcaactcgaccccatgaagtcggagtcgctagtaatcgcagatcagcaacgctgcggtgaatacgttcccgggccttgtacacaccgcccgtcaagtcacgaaagttggtaacacccaaagccggtggcctaaccttttggagggagccgtctaaggtgggattggcgattgggactaagtcgtaacaaggtagccgtaccggaaggtgcggctggatcacctccttt

SEQ ID NO: 373 - DNA, 1526 bp, artificial sequence
  >GCF_001837295.1_00026 Rothia_mucilaginosa
acggagagtttgattctggctcaggacgaacgctggcggcgtgcttaacacatgcaagtcgaacgatgaagcctagcttgctaggtggattagtggcgaacgggtgagtaatacgtgagtaacctacctttaactctgggataagcctgggaaactgggtctaataccggatacgaccaatctccgcatggggtgttggtggaaagcgttatgtagtggttatagatgggctcacggcctatcagcttgttggtgaggtaacggctcaccaaggcgacgacgggtagccggcctgagagggtgaccggccacactgggactgagacacggcccagactcctacgggaggcagcagtggggaatattgcacaatgggcgcaagcctgatgcagcgacgccgcgtgagggatgacggccttcgggttgtaaacctctgttagcagggaagaagagagattgacggtacctgcagagaaagcgccggctaactacgtgccagcagccgcggtaatacgtagggcgcgagcgttgtccggaattattgggcgtaaagagcttgtaggcggtttgtcgcgtctgctgtgaaaggccggggcttaaccccgtgtattgcagtgggtacgggcagactagagtgcagtaggggagactggaattcctggtgtagcggtggaatgcgcagatatcaggaggaacaccgatggcgaaggcaggtctctgggctgtaactgacgctgagaagcgaaagcatggggagcgaacaggattagataccctggtagtccatgccgtaaacgttgggcactaggtgtgggggacattccacgttttccgcgccgtagctaacgcattaagtgccccgcctggggagtacggccgcaaggctaaaactcaaagaaattgacgggggcccgcacaagcggcggagcatgcggattaattcgatgcaacgcgaagaaccttaccaaggcttgacatatactggaccgcatcagagatggtgtttcccttcggggctggtatacaggtggtgcatggttgtcgtcagctcgtgtcgtgagatgttgggttaagtcccgcaacgagcgcaaccctcgttctatgttgccagcacgttatggtggggactcataggagactgccggggtcaactcggaggaaggtggggatgacgtcaaatcatcatgccccttatgtcttgggcttcacgcatgctacaatggccggtacagagggttgcgatactgtgaggtggagctaatccctaaaagccggtctcagttcggattggggtctgcaactcgaccccatgaagtcggagtcgctagtaatcgcagatcagcaacgctgcggtgaatacgttcccgggccttgtacacaccgcccgtcaagtcacgaaagttggtaacacccaaagccggtggcctaacccttttgggagggagccgtctaaggtgggattggcgattgggactaagtcgtaacaaggtagccgtaccggaaggtgcggctggatcacctccttt

SEQ ID NO: 374 - DNA, 1553 bp, artificial sequence
  >GCF_002073435.2_00141 Streptococcus_gordonii
aatgagagtttgatcctggctcaggacgaacgctggcggcgtgcctaatacatgcaagtagaacgcacagtttataccgtagcttgctacaccatagactgtgagttgcgaacgggtgagtaacgcgtaggtaacctgcctggtagcgggggataactattggaaacgatagctaataccgcataatattaattattgcatgataattaattgaaaggtgcaattgcaccactaccagatggacctgcgttgtattagctagtaggtgaggtaacggctcacctaggcgacgatacatagccgacctgagagggtgatcggccacactgggactgagacacggcccagactcctacgggaggcagcagtagggaatcttcggcaatggacgaaagtctgaccgagcaacgccgcgtgagtgaagaaggttttcggatcgtaaagctctgttgtaagagaagaacgggtgtgagagtggaaagttcacactgtgacggtatcttaccagaaagggacggctaactacgtgccagcagccgcggtaatacgtaggtcccgagcgttgtccggatttattgggcgtaaagcgagcgcaggcggttagataagtctgaagttaaaggctgtggcttaaccatagtacgctttggaaactgtttaacttgagtgcagaaggggagagtggaattccatgtgtagcggtgaaatgcgtagatatatggaggaacaccggtggcgaaagcggctctctggtctgtaactgacgctgaggctcgaaagcgtggggagcgaacaggattagataccctggtagtccacgccgtaaacgatgagtgctaggtgttaggccctttccggggcttagtgccgcagctaacgcattaagcactccgcctggggagtacgaccgcaaggttgaaactcaaaggaattgacgggggcccgcacaagcggtggagcatgtggtttaattcgaagcaacgcgaagaaccttaccaggtcttgacatcccgatgcccgctctagagatagagttttacttcggtacatcggtgacaggtggtgcatggttgtcgtcagctcgtgtcgtgagatgttgggttaagtcccgcaacgagcgcaacccttattgttagttgccatcattcagttggacactctagcgagactgccggtaataaaccggaggaaggtggggatgacgtcaaatcatcatgccccttatgacctgggctacacacgtgctacaatggctggtacaacgagtcgcaagtcggtgacggcaagctaatctcttaaagccagtctcagttcggattgtaggctgcaactcgcctacatgaagtcggaatcgctagtaatcgcggatcagcacgccgcggtgaatacgttcccgggccttgtacacaccgcccgtcacaccacgagagtttgtaacacccgaagtcggtgaggtaaccttttaggagccagccgcctaaggtgggatagatgattggggtgaagtcgtaacaaggtagccgtatcggaaggtgcggctggatcacctcctt

SEQ ID NO: 375 - DNA, 1544 bp, artificial sequence
  >GCF_002073515.1_00651 Streptococcus_salivarius_group
aatgagagtttgatcctggctcaggacgaacgctggcggcgtgcctaatacatgcaagtagaacgctgaagagaggagcttgctcttcttggatgagttgcgaacgggtgagtaacgcgtaggtaacctgccttgtagcgggggataactattggaaacgatagctaataccgcataacaatggatgacacatgtcatttatttgaaaggggcaattgctccactacaagatggacctgcgttgtattagctagtaggtgaggtaacggctcacctaggcgacgatacatagccgacctgagagggtgatcggccacactgggactgagacacggcccagactcctacgggaggcagcagtagggaatcttcggcaatgggggcaaccctgaccgagcaacgccgcgtgagtgaagaaggttttcggatcgtaaagctctgttgtaagtcaagaacgagtgtgagagtggaaagttcacactgtgacggtagcttaccagaaagggacggctaactacgtgccagcagccgcggtaatacgtaggtcccgagcgttgtccggatttattgggcgtaaagcgagcgcaggcggtttgataagtctgaagttaaaggctgtggctcaaccatagttcgctttggaaactgtcaaacttgagtgcagaaggggagagtggaattccatgtgtagcggtgaaatgcgtagatatatggaggaacaccggtggcgaaagcggctctctggtctgtaactgacgctgaggctcgaaagcgtggggagcgaacaggattagataccctggtagtccacgccgtaaacgatgagtgctaggtgttggatcctttccgggattcagtgccgcagctaacgcattaagcactccgcctggggagtacgaccgcaaggttgaaactcaaaggaattgacgggggcccgcacaagcggtggagcatgtggtttaattcgaagcaacgcgaagaaccttaccaggtcttgacatcccgatgctatttctagagatagaaagttacttcggtacatcggtgacaggtggtgcatggttgtcgtcagctcgtgtcgtgagatgttgggttaagtcccgcaacgagcgcaacccctattgttagttgccatcattcagttgggcactctagcgagactgccggtaataaaccggaggaaggtggggatgacgtcaaatcatcatgccccttatgacctgggctacacacgtgctacaatggttggtacaacgagttgcgagtcggtgacggcaagctaatctcttaaagccaatctcagttcggattgtaggctgcaactcgcctacatgaagtcggaatcgctagtaatcgcggatcagcacgccgcggtgaatacgttcccgggccttgtacacaccgcccgtcacaccacgagagtttgtaacacccgaagtcggtgaggtaaccttttggaaccagccgcctaaggtgggatagatgattggggtgaagtcgtaacaaggtagccgtatcggaaggtgcggctggatcacctcctt

SEQ ID NO: 376 - DNA, 1525 bp, artificial sequence; identical to SEQ ID NO: 60
  >GCF_002159215.1_01138 Alistipes_onderdonkii

SEQ ID NO: 377 - DNA, 876 bp, artificial sequence
  >GCF_002192435.1_02063 [Lactobacillus]_fermentum
tatgagagtttgatcctggctcaggatgaacgccggcggtgtgcctaatacatgcaagtcgaacgcgttggcccaattgattgatggtgcttgcacctgattgattttggttgccagcgagtggcggacgggtgagtaacacgtaggtaacctgcccagaagcgggggacaacatttggaaacagatgctaataccgcataacaacgttgttcgcatgaacaacgcttaaaagatggcttctcgctatcacttctggatggacctgcggtgcattagcttgttggtggggtaacggcctaccaaggcgatgatgcatagccgagttgagagactgatcggccacaatgggactgagacacggcccatactcctacgggaggcagcagtagggaatcttccacaatgggcgcaagcctgatggagcaacaccgcgtgagtgaagaagggtttcggctcgtaaagctctgttgttaaagaagaacacgtatgagagtaactgttcatacgttgacggtatttaaccagaaagtcacggctaactacgtgccagcagccgcggtaatacgtaggtggcaagcgttatccggatttattgggcgtaaagagagtgcaggcggttttctaagtctgatgtgaaagccttcggcttaaccggagaagtgcatcggaaactggataacttgagtgcagaagagggtagtggaactccatgtgtagcggtggaatgcgtagatatatggaagaacaccagtggcgaaggcggctacctggtctgcaactgacgctgagactcgaaagcatgggtagcgaacaggattagataccctggtagtccatgccgtaaacgatgagtgctaggtgttggagggtttctc

SEQ ID NO: 378 - DNA, 874 bp, artificial sequence
  >GCF_002192435.1_02097 [Lactobacillus]_fermentum
tatgagagtttgatcctggctcaggatgaacgccggcggtgtgcctaatacatgcaagtcgaacgcgttggtccaattgattgatggtgcttgcacctgattgattttggtcgccaacgagtggcggacgggtgagtaacacgtaggtaacctgcccagaagcgggggacaacatttggaaacagatgctaataccgcataacaacgttgttcgcatgaacaacgcttaaaagatggcttctcgctatcacttctggatggacctgcggtgcattagcttgttggtggggtaatggcctaccaaggcgatgatgcatagccgagttgagagactgatcggccacaatgggactgagacacggcccatactcctacgggaggcagcagtagggaatcttccacaatgggcgcaagcctgatggagcaacaccgcgtgagtgaagaagggtttcggctcgtaaagctctgttgttaaagaagaacacgtatgagagtaactgttcatacgttgacggtatttaaccagaaagtcacggctaactacgtgccagcagccgcggtaatacgtaggtggcaagcgttatccggatttattgggcgtaaagagagtgcaggcggttttttaagtctgatgtgaaagccttcggcttaaccggagaagtgcatcggaaactggataacttgagtgcagaagagggtagtggaactccatgtgtagcggtggaatgcgtagatatatggaagaacaccagtggcgaaggcggctacctggtctgcaactgacgctgagactcgaaagcatgggtagcgaacaggattagataccctggtagtccatgccgtaaacgatgagtgctaggtgttcgcatttttg

SEQ ID NO: 379 - DNA, 1573 bp, artificial sequence
  >GCF_002356135.1_00192 [Lactobacillus]_fermentum
tatgagagtttgatcctggctcaggatgaacgccggcggtgtgcctaatacatgcaagtcgaacgcgttggcccaattgattgacggtgcttgcacctgattgattttggtcgccaacgagtggcggacgggtgagtaacacgtaggtaacctgcccagaagcgggggacaacatttggaaacagatgctaataccgcataacagcgttgttcgcatgaacaacgcttaaaagatggcttctcgctatcacttctggatggacctgcggtgcattagcttgttggtggggtaacggcctaccaaggcgatgatgcatagccgagttgagagactgatcggccacaatgggactgagacacggcccatactcctacgggaggcagcagtagggaatcttccacaatgggcgcaagcctgatggagcaacaccgcgtgagtgaagaagggtttcggctcgtaaagctctgttgttaaagaagaacacgtatgagagtaactgttcatgcgttgacggtatttaaccagaaagtcacggctaactacgtgccagcagccgcggtaatacgtaggtggcaagcgttatccggatttattgggcgtaaagagagtgcaggcggttttctaagtctgatgtgaaagccttcggcttaaccggagaagtgcatcggaaactggataacttgagtgcagaagagggtagtggaactccatgtgtagcggtggaatgcgtagatatatggaagaacaccagtggcgaaggcggctacctggtctgcaactgacgctgagactcgaaagcatgggtagcgaacaggattagataccctggtagtccatgccgtaaacgatgagtgctaggtgttggagggtttccgcccttcagtgccggagctaacgcattaagcactccgcctggggagtacgaccgcaaggttgaaactcaaaggaattgacgggggcccgcacaagcggtggagcatgtggtttaattcgaagctacgcgaagaaccttaccaggtcttgacatcttgcgccaaccctagagatagggcgtttccttcgggaacgcaatgacaggtggtgcatggtcgtcgtcagctcgtgtcgtgagatgttgggttaagtcccgcaacgagcgcaacccttgttactagttgccagcattaagttgggcactctagtgagactgccggtgacaaaccggaggaaggtggggacgacgtcagatcatcatgccccttatgacctgggctacacacgtgctacaatggacggtacaacgagtcgcgaactcgcgagggcaagcaaatctcttaaaaccgttctcagttcggactgcaggctgcaactcgcctgcacgaagtcggaatcgctagtaatcgcggatcagcatgccgcggtgaatacgttcccgggccttgtacacaccgcccgtcacaccatgagagtttgtaacacccaaagtcggtggggtaaccttttaggagccagccgcctaaggtgggacagatgattagggtgaagtcgtaacaaggtagccgtaggagaacctgcggctggatcacctccttt

SEQ ID NO: 380 - DNA, 1524 bp, artificial sequence
  >GCF_002386365.1_01013 Rothia_mucilaginosa
acggagagtttgattctggctcaggacgaacgctggcggcgtgcttaacacatgcaagtcgaacgatgaagcctagcttgctaggtggattagtggcgaacgggtgagtaatacgtgagtaacctacctttaactctgggataagcccgggaaactgggtctaataccggatacgaccaatctccgcatggggtgttggtggaaagcgttatgtagtggttatagatgggctcacggcctatcagcttgttggtgaggtaacggctcaccaaggcgacgacgggtagccggcctgagagggtgaccggccacactgggactgagacacggcccagactcctacgggaggcagcagtggggaatattgcacaatgggcgcaagcctgatgcagcgacgccgcgtgagggatgacggccttcgggttgtaaacctctgttagcagggaagaagagagattgacggtacctgcagagaaagcgccggctaactacgtgccagcagccgcggtaatacgtagggcgcgagcgttgtccggaattattgggcgtaaagagcttgtaggcggtttgtcgcgtctgctgtgaaaggccggggcttaactccgtgtattgcagtgggtacgggcagactagagtgcagtaggggagactggaattcctggtgtagcggtggaatgcgcagatatcaggaggaacaccgatggcgaaggcaggtctctgggctgtaactgacgctgagaagcgaaagcatggggagcgaacaggattagataccctggtagtccatgccgtaaacgttgggcactaggtgtgggggacattccacgttttccgcgccgtagctaacgcattaagtgccccgcctggggagtacggccgcaaggctaaaactcaaagaaattgacgggggcccgcacaagcggcggagcatgcggattaattcgatgcaacgcgaagaaccttaccaaggcttgacatatactggaccgcatcagagatggtgtttcccttcggggctggtatacaggtggtgcatggttgtcgtcagctcgtgtcgtgagatgttgggttaagtcccgcaacgagcgcaaccctcgttctatgttgccagcacgttatggtggggactcataggagactgccggggtcaactcggaggaaggtggggatgacgtcaaatcatcatgccccttatgtcttgggcttcacgcatgctacaatggccggtacagagggttgcgatactgtgaggtggagctaatccctaaaagccggtctcagttcggattggggtctgcaactcgaccccatgaagtcggagtcgctagtaatcgcagatcagcaacgctgcggtgaatacgttcccgggccttgtacacaccgcccgtcaagtcacgaaagttggtaacacccaaagccggtggcctaaccttttggagggagccgtctaaggtgggattggcgattgggactaagtcgtaacaaggtagccgtaccggaaggtgcggctggatcacctccttt

SEQ ID NO: 381 - DNA, 1526 bp, artificial sequence
  >GCF_002834165.1_00458 [Ruminococcus]_bromii
ttagagagtttgatcctggctcaggacgaacgctggcggcgtgcctaacacatgcaagtcgaacggaactgttttgaaagatttcttcggaatgaatttgatttagtttagtggcggacgggtgagtaacgcgtgagtaacctgccttcaagagggggataacattctgaaaagaatgctaataccgcatgacatatcggaaccacatggttttgatatcaaagattttatcgcttgaagatggactcgcgtccgattagttagttggtgaggtaacggctcaccaagaccgcgatcggtagccggactgagaggttgaacggccacattgggactgagacacggcccagactcctacgggaggcagcagtgggggatattgcgcaatgggggcaaccctgacgcagcaacgccgcgtgaaggatgaaggttttcggattgtaaacttcttttattaaggacgaaacttgacggtacttaatgaataagctccggctaactacgtgccagcagccgcggtaatacgtagggagcaagcgttgtccggatttactgggtgtaaagggtgcgtaggcggctttgcaagtcagatgtgaaatctatgggctcaacccataaactgcatttgaaactgtagagcttgagtgaagtagaggcaggcggaattccccgtgtagcggtgaaatgcgtagagatggggaggaacaccagtggcgaaggcggcctgctgggctttaactgacgctgaggcacgaaagcgtgggtagcaaacaggattagataccctggtagtccacgctgtaaacgatgattactaggtgtggggggtctgaccccttccgtgccggagttaacacaataagtaatccacctggggagtacggccgcaaggttgaaactcaaaggaattgacgggggcccgcacaagcagtggagtatgtggtttaattcgaagcaacgcgaagaaccttaccaggtcttgacatccaactaacgaagtagagatacattaggtgcccttcggggaaagttgagacaggtggtgcatggttgtcgtcagctcgtgtcgtgagatgttgggttaagtcccgcaacgagcgcaacccttgctattagttgctacgcaagagcactctaataggactgccgttgacaaaacggaggaaggtggggacgacgtcaaatcatcatgccccttatgacctgggctacacacgtactacaatggatgttaacagagggaagcaagacagcgatgtggagcaaacccctaaaaacattctcagttcagattgcaggctgcaacccgcctgcatgaagatggaattgctagtaatcgcggatcagcatgccgcggtgaatacgttcccgggccttgtacacaccgcccgtcacaccatgggagccggtaatacccgaagtcagtagtccaacctcgtgaggacgctgccgaaggtaggattggcgactggggtgaagtcgtaacaaggtagccgtatcggaaggtgcggctggatcacctcctt

SEQ ID NO: 382 - DNA, 1527 bp, artificial sequence
  >GCF_002834225.1_01086 [Ruminococcus]_bromii
ttagagagtttgatcctggctcaggacgaacgctggcggcgtgcctaacacatgcaagtcgaacggaactgttttgaaagatttcttcggaatgaatttgatttagtttagtggcggacgggtgagtaacgcgtgagtaacctgccttcaagagggggataacattctgaaaagaatgctaataccgcatgacatatcggaaccacatggttctgatatcaaagattttatcgcttgaagatggactcgcgtccgattagttagttggtgaggtaacggctcaccaagaccgcgatcggtagccggactgagaggttgaacggccacattgggactgagacacggcccagactcctacgggaggcagcagtgggggatattgcgcaatgggggcaaccctgacgcagcaacgccgcgtgaaggatgaaggttttcggattgtaaacttcttttattaaggacgaaaaatgacggtacttaatgaataagctccggctaactacgtgccagcagccgcggtaatacgtagggagcaagcgttgtccggatttactgggtgtaaagggtgcgtaggcggctttgcaagtcagatgtgaaatctatgggctcaacccataaactgcatttgaaactgtagagcttgagtgaagtagaggcaggcggaattccccgtgtagcggtgaaatgcgtagagatggggaggaacaccagtggcgaaggcggcctgctgggctttaactgacgctgaggcacgaaagcgtgggtagcaaacaggattagataccctggtagtccacgctgtaaacgatgattactaggtgtggggggtctgaccccttccgtgccggagttaacacaataagtaatccacctggggagtacggccgcaaggttgaaactcaaaggaattgacgggggcccgcacaagcagtggagtatgtggtttaattcgaagcaacgcgaagaaccttaccaggtcttgacatccaactaacgaagtagagatacattaggtgcccttcggggaaagttgagacaggtggtgcatggttgtcgtcagctcgtgtcgtgagatgttgggttaagtcccgcaacgagcgcaacccttgctattagttgctacgcaagagcactctaataggactgccgttgacaaaacggaggaaggtggggacgacgtcaaatcatcatgccccttatgacctgggctacacacgtactacaatggatgttaacagagggaagcaagacagtgatgtggagcaaacccctaaaaacattctcagttcagattgcaggctgcaacccgcctgcatgaagatggaattgctagtaatcgcggatcagaatgccgcggtgaatacgttcccgggccttgtacacaccgcccgtcacaccatgggagccggtaatacccgaagtcagtagtccaacctcgtgaggacgctgccgaaggtaggattggcgactggggtgaagtcgtaacaaggtagccgtatcggaaggtgcggctggatcacctccttt

SEQ ID NO: 383 - DNA, 1527 bp, artificial sequence
  >GCF_002834235.1_00479 [Ruminococcus]_bromii
ttagagagtttgatcctggctcaggacgaacgctggcggcgtgcctaacacatgcaagtcgaacggaactgttttgaaagatttcttcggaatgaatttgatttagtttagtggcggacgggtgagtaacgcgtgagtaacctgccttcaagagggggataacattctgaaaagaatgctaataccgcatgacatatcggaaccacatggttctgatatcaaagattttatcgcttgaagatggactcgcgtccgattagttagttggtgaggtaacggctcaccaagactgcgatcggtagccggactgagaggttgaacggccacattgggactgagacacggcccagactcctacgggaggcagcagtgggggatattgcgcaatgggggcaaccctgacgcagcaacgccgcgtgaaggatgaaggttttcggattgtaaacttcttttattaaggacgaaaaatgacggtacttaatgaataagctccggctaactacgtgccagcagccgcggtaatacgtagggagcaagcgttgtccggatttactgggtgtaaagggtgcgtaggcggctttgcaagtcagatgtgaaatctatgggctcaacccataaactgcatttgaaactgtagagcttgagtgaagtagaggcaggcggaattccccgtgtagcggtgaaatgcgtagagatggggaggaacaccagtggcgaaggcggcctgctgggctttaactgacgctgaggcacgaaagcgtgggtagcaaacaggattagataccctggtagtccacgctgtaaacgatgattactaggtgtggggggtctgaccccttccgtgccggagttaacacaataagtaatccacctggggagtacggccgcaaggttgaaactcaaaggaattgacgggggcccgcacaagcagtggagtatgtggtttaattcgaagcaacgcgaagaaccttaccaggtcttgacatccaactaacgaagtagagatacattaggtgcccttcggggaaagttgagacaggtggtgcatggttgtcgtcagctcgtgtcgtgagatgttgggttaagtcccgcaacgagcgcaacccttgctattagttgctacgcaagagcactctaataggactgccgttgacaaaacggaggaaggtggggacgacgtcaaatcatcatgccccttatgacctgggctacacacgtactacaatggatgttaacagagggaagcaagacagcgatgtggagcaaacccctaaaaacattctcagttcagattgcaggctgcaacccgcctgcatgaagatggaattgctagtaatcgcggatcagcatgccgcggtgaatacgttcccgggccttgtacacaccgcccgtcacaccatgggagccggtaatacccgaagtcagtagtccaacctcgtgaggacgctgccgaaggtaggattggcgactggggtgaagtcgtaacaaggtagccgtatcggaaggtgcggctggatcacctccttt

SEQ ID NO: 384 - DNA, 1537 bp, artificial sequence
  >GCF_002847525.1_01311 Schaalia_odontolytica
tcggagagtttgatcctggctcaggacgaacgctggcggcgtgcttaacacatgcaagtcgaacgctgaagcccagcttgctgggtggatgagtggcgaacgggtgagtaacacgtgagtaacctgcccccttctttgggataacgcccggaaacgggtgctaatactggatattcactgatcttcgcatgggggttggtggaaaggttttttctggtgggggatgggctcgcggcctatcagcttgttggtggggtgatggcctaccaaggctttgacgggtagccggcctgagagggtgaccggtcacattgggactgagatacggcccagactcctacgggaggcagcagtggggaatattgcacaatgggcgaaagcctgatgcagcgacgccgcgtgagggatgacggccttcgggttgtaaacctctttcgctcatggtcaagccgcaactcaaggttgtggtgagggtagtgggtaaagaagcgccggctaactacgtgccagcagccgcggtaatacgtagggcgcgagcgttgtccggaattattgggcgtaaagggcttgtaggcggttggtcgcgtctgccgtgaaatcctctggcttaactgggggcgtgcggtgggtacgggctgacttgagtgcggtaggggagactggaactcctggtgtagcggtggaatgcgcagatatcaggaagaacaccggtggcgaaggcgggtctctgggccgttactgacgctgaggagcgaaagcgtggggagcgaacaggattagataccctggtagtccacgctgtaaacgttgggcactaggtgtgggggccacccgtggtttctgcgccgtagctaacgctttaagtgccccgcctggggagtacggccgcaaggctaaaactcaaaggaattgacgggggcccgcacaagcggcggagcatgcggattaattcgatgcaacgcgaagaaccttaccaaggcttgacatgcacggcgacactgcagagatgtggtggcatttagttggtcgtgtgcaggtggtgcatggttgtcgtcagctcgtgtcgtgagatgttgggttaagtcccgcaacgagcgcaacccttgccctatgttgccagcacgtgatggtggggactcgtgggggactgccggggttaactcggaggaaggtggggatgacgtcaaatcatcatgccccttatgtcttgggcttcacgcatgctacaatggttggtacagagggttgcgatatcgtgaggtggagcgaatcccttaaagccagtctcagttcggattggggtctgcaactcgaccccatgaaggtggagtcgctagtaatcgcagatcagcaacgctgcggtgaatacgttctcgggccttgtacacaccgcccgtcacgtcacgaaagttggtaacacccgaagcccatggcctaaccgtttttgcggggggagtggtcgaaggtgggattggcgattgggacgaagtcgtaacaaggtagccgtaccggaaggtgcggctggatcacctccttt

SEQ ID NO: 385 - DNA, 1524 bp, artificial sequence
  >GCF_002861015.1_01791 Rothia_mucilaginosa
acggagagtttgattctggctcaggacgaacgctggcggcgtgcttaacacatgcaagtcgaacgatgaagcctagcttgctaggtggattagtggcgaacgggtgagtaatacgtgagtaacctacctttaactctgggataagcctgggaaactgggtctaataccggatacgaccaatctccgcatggggtgttggtggaaagcgttatgtagtggttatagatgggctcacggcctatcagcttgttggtgaggtaacggctcaccaaggcgacgacgggtagccggcctgagagggtgaccggccacactgggactgagacacggcccagactcctacgggaggcagcagtggggaatattgcacaatgggcgcaagcctgatgcagcgacgccgcgtgagggatgacggccttcgggttgtaaacctctgttagcagggaagaagagaaattgacggtacctgcagagaaagcgccggctaactacgtgccagcagccgcggtaatacgtagggcgcgagcgttgtccggaattattgggcgtaaagagcttgtaggcggtttgtcgcgtctgctgtgaaaggccggagcttaactccgtgtattgcagtgggtacgggcagactagagtgcagtaggggagactggaattcctggtgtagcggtggaatgcgcagatatcaggaggaacaccgatggcgaaggcaggtctctgggctgtaactgacgctgagaagcgaaagcatggggagcgaacaggattagataccctggtagtccatgccgtaaacgttgggcactaggtgtgggggacattccacgttttccgcgccgtagctaacgcattaagtgccccgcctggggagtacggccgcaaggctaaaactcaaagaaattgacgggggcccgcacaagcggcggagcatgcggattaattcgatgcaacgcgaagaaccttaccaaggcttgacatatactggaccgcatcagagatggtgtttcccttcggggctggtatacaggtggtgcatggttgtcgtcagctcgtgtcgtgagatgttgggttaagtcccgcaacgagcgcaaccctcgttctatgttgccagcacgttatggtggggactcataggagactgccggggtcaactcggaggaaggtggggatgacgtcaaatcatcatgccccttatgtcttgggcttcacgcatgctacaatggccggtacagagggttgcgatactgtgaggtggagctaatccctaaaagccggtctcagttcggattggggtctgcaactcgaccccatgaagtcggagtcgctagtaatcgcagatcagcaacgctgcggtgaatacgttcccgggccttgtacacaccgcccgtcaagtcacgaaagttggtaacacccaaagccggtggcctaaccttttggagggagccgtctaaggtgggattggcgattgggactaagtcgtaacaaggtagccgtaccggaaggtgcggctggatcacctccttt

SEQ ID NO: 386 - DNA, 1524 bp, artificial sequence
  >GCF_002861025.1_00001 Rothia_dentocariosa
acggagagtttgattctggctcaggacgaacgctggcggcgtgcttaacacatgcaagtcgaacgatgaagcctagcttgctaggtggattagtggcgaacgggtgagtaatacgtgagtgacctacctttgactctgggataagcctgggaaactgggtctaataccggatacgaccaatctccgcatggggtgttggtggaaagcgttatggagtggttttagatgggctcacggcctatcagcttgttggtgaggtaatggcttaccaaggcgacgacgggtagccggcctgagagggtgaccggccacactgggactgagacacggcccagactcctacgggaggcagcagtggggaatattgcacaatgggcgcaagcctgatgcagcgacgccgcgtgagggatgacggccttcgggttgtaaacttctgttagcatcgaagaagcgaaagtgacggtaggtgcagagaaagcgccggctaactacgtgccagcagccgcggtaatacgtagggcgcgagcgttgtccggaattattgggcgtaaagagcttgtaggcggttggtcgcgtctgctgtgaaaggctggggcttaaccctggttttgcagtgggtacgggctaactagagtgcagtaggggagactggaattcctggtgtagcggtggaatgcgcagatatcaggaggaacaccgatggcgaaggcaggtctctgggctgtaactgacgctgagaagcgaaagcatggggagcgaacaggattagataccctggtagtccatgccgtaaacgttgggcactaggtgtgggggacattccacgttttccgcgccgtagctaacgcattaagtgccccgcctggggagtacggccgcaaggctaaaactcaaagaaattgacgggggcccgcacaagcggcggagcatgcggattaattcgatgcaacgcgaagaaccttaccaaggcttgacatatactggactgcgtcagagatggcgtttcccttcggggctggtatacaggtggtgcatggttgtcgtcagctcgtgtcgtgagatgttgggttaagtcccgcaacgagcgcaaccctcgttctatgttgccagcacgtgatggtggggactcataggagactgccggggttaactcggaggaaggtggggatgacgtcaaatcatcatgccccttatgtcttgggcttcacgcatgctacaatggccggtacagagggttgcgatactgtgaggtggagctaatccctaaaagccggtctcagttcggattggggtctgcaactcgaccccatgaagtcggagtcgctagtaatcgcagatcagcaacgctgcggtgaatacgttcccgggccttgtacacaccgcccgtcaagtcacgaaagttggtaacacccgaagccggtggcctaacccttgtggggggagccgtcgaaggtgggactggcgattgggactaagtcgtaacaaggtagccgtaccggaaggtgcggctggatcacctccttt

SEQ ID NO: 387 - DNA, 1534 bp, artificial sequence
  >GCF_002871975.1_01593 Actinomyces_graevenitzii
tttggagagtttgatcctggctcaggacgaacgctggcggcgtgcttaacacatgcaagtcgaacgaaaataccaagcttgcttggttgattagtggcgaacgggtgagtaacacgtgagtaacctgccccttactttctggataactgctcgaaagggtagctaatacgggatattctggccttcctgcatgggttggtttggaaaggttgttttttctggtgagggatgggctcgcggcctatcagcttgttggtggggtgatggcctaccaaggctttgacgggtagccggcctgagagggtggacggtcacactgggactgagatacggcccagactcctacgggaggcagcagtggggaatattgcacaatgggcgcaagcctgatgcagcgacgccgcgtgagggatgaaggccttcgggttgtaaacctctttcgtcagggaacaaggcactgcttttggtggtgttgagggtacctggataagaagcgccggctaactacgtgccagcagccgcggtaatacgtagggcgcaagcgttgtccggaattattgggcgtaaagagctcgtaggcggctggtcgcgtctgtcgtgaaaacttccggctcaaccgggggcttgcggtgggtacgggccggctagagtgcggtaggggtaactggaactcctggtgtagcggtggaatgcgcagatatcaggaagaacaccgatggcgaaggcaggttactgggccgttactgacgctgaggagcgaaagcgtggggagcgaacaggattagataccctggtagtccacgctgtaaacgttgggcactaggtgtgaggctcctttccgggggttttgcgccgtagctaacgcattaagtgccccgcctggggagtacggccgcaaggctaaaactcaaaggaattgacgggggcccgcacaagcggcggagcatgcggattaattcgatgcaacgcgaagaaccttaccaaggcttgacatgttaactgtggctctagagatagggtttacccttttgggtggttttcacaggtggtgcatggttgtcgtcagctcgtgtcgtgagatgttgggttaagtcccgcaacgagcgcaacccttgtcccgtgttgccagcacgttgtggtggggactcgcgggagactgccggggtcaactcggaggaaggtggggatgacgtcaaatcatcatgccccttatgtcttgggcttcacgcatgctacaatggctggtacagagggttgcgatactgtgaggtggagctaatcccttaaagctggtctcagttcggattggtgtctgcaactcgacaccatgaaggtggagtcgctagtaatcgcagatcagcaacgctgcggtgaatacgttctcgggccttgtacacaccgcccgtcacgtcacgaaagttggcaacaccccaagaccgtggctctacggggagcggttaaaggtggggctagcgattgggacgaagtcgtaacaaggtagccgtaccggaaggtgcggctggatcacctcctt

SEQ ID NO: 388 - DNA, 1528 bp, artificial sequence
  >GCF_002959615.1_02342 [Ruminococcus]_gnavus
aacgagagtttgatcctggctcaggatgaacgctggcggcgtgcttaacacatgcaagtcgagcgaagcaccttgacggatttcttcggattgaagccttggtgactgagcggcggacgggtgagtaacgcgtgggtaacctgcctcatacagggggataacagttggaaacggctgctaataccgcataagcgcacagtaccgcatggtacggtgtgaaaaactccggtggtatgagatggacccgcgtctgattaggtagttggtggggtaacggcctaccaagccgacgatcagtagccgacctgagagggtgatcggccacattgggactgagacacggcccaaactcctacgggaggcagcagtggggaatattgcacaatgggggaaaccctgatgcagcgacgccgcgtgagcgatgaagtatttcggtatgtaaagctctatcagcagggaagaaaatgacggtacctgactaagaagccccggctaactacgtgccagcagccgcggtaatacgtagggggcaagcgttatccggatttactgggtgtaaagggagcgtagacggcatggcaagccagatgtgaaagcccggggctcaaccccgggactgcatttggaactgtcaggctagagtgtcggagaggaaagcggaattcctagtgtagcggtgaaatgcgtagatattaggaggaacaccagtggcgaaggcggctttctggacgatgactgacgttgaggctcgaaagcgtggggagcaaacaggattagataccctggtagtccacgccgtaaacgatgaatactaggtgtcgggtggcaaagccattcggtgccgcagcaaacgcaataagtattccacctggggagtacgttcgcaagaatgaaactcaaaggaattgacggggacccgcacaagcggtggagcatgtggtttaattcgaagcaacgcgaagaaccttacctggtcttgacatccctctgaccgctctttaatcggagctttccttcgggacagaggagacaggtggtgcatggttgtcgtcagctcgtgtcgtgagatgttgggttaagtcccgcaacgagcgcaacccctatctttagtagccagcatttaagatgggcactctagagagactgccagggataacctggaggaaggtggggatgacgtcaaatcatcatgccccttatgaccagggctacacacgtgctacaatggcgtaaacaaagggaagcgagcccgcgagggggagcaaatcccaaaaataacgtctcagttcggattgtagtctgcaactcgactacatgaagctggaatcgctagtaatcgcgaatcagaatgtcgcggtgaatacgttcccgggtcttgtacacaccgcccgtcacaccatgggagtcagtaacgcccgaagtcagtgacccaaccgcaaggagggagctgccgaaggtgggaccgataactggggtgaagtcgtaacaaggtagccgtatcggaaggtgcggctggatcacctccttt

SEQ ID NO: 389 - DNA, 1523 bp, artificial sequence
  >GCF_002959715.1_00509 Bacteroides_caccae
atgaagagtttgatcctggctcaggatgaacgctagctacaggcttaacacatgcaagtcgaggggcatcagtttggtttgcttgcaaaccaaagctggcgaccggcgcacgggtgagtaacacgtatccaacctacctcatactcggggatagcctttcgaaagaaagattaatatccgatagcatatatttcccgcatgggttttatattaaagaaattcggtatgagatggggatgcgttccattagtttgttgggggggtaacggcccaccaagactacgatggataggggttctgagaggaaggtcccccacattggaactgagacacggtccaaactcctacgggaggcagcagtgaggaatattggtcaatggacgcgagtctgaaccagccaagtagcgtgaaggatgactgccctatgggttgtaaacttcttttatatgggaataaagtggtccacgtgtggacttttgtatgtaccatatgaataaggatcggctaactccgtgccagcagccgcggtaatacggaggatccgagcgttatccggatttattgggtttaaagggagcgtaggcggattgttaagtcagttgtgaaagtttgcggctcaaccgtaaaattgcagttgatactggcagtcttgagtgcagtagaggtgggcggaattcgtggtgtagcggtgaaatgcttagatatcacgaagaactccgattgcgaaggcagctcactggagtgtaactgacgctgatgctcgaaagtgtgggtatcaaacaggattagataccctggtagtccacacagtaaacgatgaatactcgctgtttgcgatatacagtaagcggccaagcgaaagcattaagtattccacctgggagtacgccggcaacggtgaaactcaaaggaattgacgggggcccgcacaagcggaggaacatgtggtttaattcgatgatacgcgaggaaccttacccgggcttaaattgcaaatgaattatggggaaacccatacgccgcaaggcatttgtgaaggtgctgcatggttgtcgtcagctcgtgccgtgaggtgtcggcttaagtgccataacgagcgcaacccttatcttcagttactaacaggtcatgctgaggactctggagagactgccgtcgtaagatgtgaggaaggtggggatgacgtcaaatcagcacggcccttacgtccggggctacacacgtgttacaatgggggtacagaaggccgctacctggtgacaggatgccaatcccaaaaacctctctcagttcggatcgaagtctgcaacccgacttcgtgaagctggattcgctagtaatcgcgcatcagccatggcgcggtgaatacgttcccgggccttgtacacaccgcccgtcaagccatgaaagccggggtacctgaagtacgtaaccgcaaggagcgtcctagggtaaaactggtaattggggctaagtcgtaacaaggtagccgtaccggaaggtggcggctggaacacctcctt

SEQ ID NO: 390 - DNA, 1525 bp, artificial sequence
  >GCF_002959715.1_00598 Bacteroides_caccae
atgaagagtttgatcctggctcaggatgaacgctagctacaggcttaacacatgcaagtcgaggggcatcagtttggtttgcttgcaaaccaaagctggcgaccggcgcacgggtgagtaacacgtatccaacctacctcatactcggggatagcctttcgaaagaaagattaatatccgatagcatatatttcccgcatgggttttatattaaagaaattcggtatgagatggggatgcgttccattagtttgttgggggggtaacggcccaccaagactacgatggataggggttctgagaggaaggtcccccacattggaactgagacacggtccaaactcctacgggaggcagcagtgaggaatattggtcaatggacgcgagtctgaaccagccaagtagcgtgaaggatgactgccctatgggttgtaaacttcttttatatgggaataaagtggtccacgtgtggacttttgtatgtaccatatgaataaggatcggctaactccgtgccagcagccgcggtaatacggaggatccgagcgttatccggatttattgggtttaaagggagcgtaggcggattgttaagtcagttgtgaaagtttgcggctcaaccgtaaaattgcagttgatactggcagtcttgagtgcagtagaggtgggcggaattcgtggtgtagcggtgaaatgcttagatatcacgaagaactccgattgcgaaggcagctcactggagtgtaactgacgctgatgctcgaaagtgtgggtatcaaacaggattagataccctggtagtccacacagtaaacgatgaatactcgctgtttgcgatatacagtaagcggccaagcgaaagcattaagtattccacctggggagtacgccggcaacggtgaaactcaaaggaattgacgggggcccgcacaagcggaggaacatgtggtttaattcgatgatacgcgaggaaccttacccgggcttaaattgcaaatgaattatggggaaacccatacgccgcaaggcatttgtgaaggtgctgcatggttgtcgtcagctcgtgccgtgaggtgtcggcttaagtgccataacgagcgcaacccttatcttcagttactaacaggtcatgctgaggactctggagagactgccgtcgtaagatgtgaggaaggtggggatgacgtcaaatcagcacggcccttacgtccggggctacacacgtgttacaatggggggtacagaaggccgctacctggtgacaggatgccaatcccaaaaacctctctcagttcggatcgaagtctgcaacccgacttcgtgaagctggattcgctagtaatcgcgcatcagccatggcgcggtgaatacgttcccgggccttgtacacaccgcccgtcaagccatgaaagccgggggtacctgaagtacgtaaccgcaaggagcgtcctagggtaaaactggtaattggggctaagtcgtaacaaggtagccgtaccggaaggtgcggctggaacacctcctt

SEQ ID NO: 391 - DNA, 1422 bp, artificial sequence
  >GCF_003096535.1_02548 Agathobaculum_butyriciproducens_group
tagtggcggacgggtgagtaacgcgtgagcaatctgcctttaagagggggataacagtcggaaacggctgctaataccgcataaagcatcaaattcgcatgtttttgatgccaaaggagcaatccgcttttagatgagctcgcgtctgattagctggttggcggggtaacggcccaccaaggcgacgatcagtagccggactgagaggttgaacggccacattgggactgagacacggcccagactcctacgggaggcagcagtggggaatattgcgcaatgggggaaaccctgacgcagcaacgccgcgtgattgaagaaggccttcgggttgtaaagatctttaatcagggacgaaacaaatgacggtacctgaagaataagctccggctaactacgtgccagcagccgcggtaatacgtagggagcaagcgttatccggatttactgggtgtaaagggcgcgcaggcgggccggtaagttggaagtgaaatctatgggcttaacccataaactgctttcaaaactgctggtcttgagtgatggagaggcaggcggaattccgtgtgtagcggtgaaatgcgtagatatacggaggaacaccagtggcgaaggcggcctgctggacattaactgacgctgaggcgcgaaagcgtggggagcaaacaggattagataccctggtagtccacgccgtaaacgatggatactaggtgtgggaggtattgaccccttccgtgccgcagttaacacaataagtatcccacctggggagtacggccgcaaggttgaaactcaaaggaattgacgggggcccgcacaagcagtggagtatgtggtttaattcgaagcaacgcgaagaaccttaccaggtcttgacatcccgatgaccgccttagagataaggcttttcttcggaacatcggtgacaggtggtgcatggttgtcgtcagctcgtgtcgtgagatgttgggttaagtcccgcaacgagcgcaacccttacggttagttgatacgcaagatcactctagccggactgccgttgacaaaacggaggaaggtggggacgacgtcaaatcatcatgccccttatgacctgggctacacacgtactacaatggcagtcatacagagggaagcaaaaccgcgaggtggagcaaatccctaaaagctgtcccagttcagattgcaggctgcaacccgcctgcatgaagtcggaattgctagtaatcgcggatcagcatgccgcggtgaatacgttcccgggccttgtacacaccgcccgtcacaccatgagagccgtcaatacccgaagtccgtagcctaaccgtaaggagggcgcggccgaaggtaggggtggtaattagggtgaagtcgtaacaaggtagccgtatcggaaggtgcggctggatcacctccttt

SEQ ID NO: 392 - DNA, 1528 bp, artificial sequence
  >GCF_003202935.1_00541 Agathobaculum_butyriciproducens_group
tttagagagtttgatcctggctcaggatgaacgctggcggcgtgcctaacacatgcaagtcgaacggagtcgttttggaaaatccttcgggattggaattctcgacttagtggcggacgggtgagtaacgcgtgagcaatctgcctttaagagggggataacagtcggaaacggctgctaataccgcataaagcatcaaattcgcatgtttttgatgccaaaggagcaatccgcttttagatgagctcgcgtctgattagctggttggcggggtaacggcccaccaaggcgacgatcagtagccggactgagaggttgaacggccacattgggactgagacacggcccagactcctacgggaggcagcagtggggaatattgcgcaatgggggaaaccctgacgcagcaacgccgcgtgattgaagaaggccttcgggttgtaaagatctttaatcagggacgaaataaatgacggtacctgaagaataagctccggctaactacgtgccagcagccgcggtaatacgtagggagcaagcgttatccggatttactgggtgtaaagggcgcgcaggcgggccggcaagttggaagtgaaatctatgggcttaacccataaactgctttcaaaactgctggtcttgagtgatggagaggcaggcggaattccgtgtgtagcggtgaaatgcgtagatatacggaggaacaccagtggcgaaggcggcctgctggacattaactgacgctgaggcgcgaaagcgtggggagcaaacaggattagataccctggtagtccacgccgtaaacgatggatactaggtgtgggaggtattgaccccttccgtgccgcagttaacacaataagtatcccacctggggagtacggccgcaaggttgaaactcaaaggaattgacgggggcccgcacaagcagtggagtatgtggtttaattcgaagcaacgcgaagaaccttaccaggtcttgacatcccgatgaccgccttagagataaggcttttcttcggaacatcggagacaggtggtgcatggttgtcgtcagctcgtgtcgtgagatgttgggttaagtcccgcaacgagcgcaacccttacggttagttgatacgcaagatcactctagccggactgccgttgacaaaacggaggaaggtggggacgacgtcaaatcatcatgcccttatgacctgggctacacacgtactacaatggcagtcatacagagggaagcaaaaccgcgaggtggagcaaatccctaaaagctgtcccagttcagattgcaggctgcaacccgcctgcatgaagtcggaattgctagtaatcgcggatcagcatgccgcggtgaatacgttcccgggccttgtacacaccgcccgtcacaccatgagagccgtcaatacccgaagtccgtagcctaaccgtaaggagggcgcggccgaaggtaggggtggtaattagggtgaagtcgtaacaaggtagccgtatcggaaggtgcggctggatcacctccttt

SEQ ID NO: 393 - DNA, 1530 bp, artificial sequence
  >GCF_003202935.1_00834 Agathobaculum_butyriciproducens_group
tttagagagtttgatcctggctcaggatgaacgctggcggcgtgcctaacacatgcaagtcgaacggaactattttggaaactccttcgggagcggaatctttagtttagtggcggacgggtgagtaacgcgtgagcaatctgcctttaagagggggataacagtcggaaacggctgctaataccgcataaagcattgaaaccgcatgattttgatgccaaaggagcaatccgcttttagatgagctcgcgtctgattagctggttggcggggtaacggcccaccaaggcgacgatcagtagccggactgagaggttgaacggccacattgggactgagacacggcccagactcctacgggaggcagcagtggggaatattgcgcaatgggggaaaccctgacgcagcaacgccgcgtgattgaagaaggccttcgggttgtaaagatctttaatcagggacgaaacaaatgacggtacctgaagaataagctccggctaactacgtgccagcagccgcggtaatacgtagggagcaagcgttatccggatttactgggtgtaaagggcgcgcaggcgggccggcaagttggaagtgaaatctatgggcttaacccataaactgctttcaaaactgctggtcttgagtgatggagaggcaggcggaattccgtgtgtagcggtgaaatgcgtagatatacggaggaacaccagtggcgaaggcggcctgctggacattaactgacgctgaggcgcgaaagcgtggggagcaaacaggattagataccctggtagtccacgccgtaaacgatggatactaggtgtgggaggtattgaccccttccgtgccgcagttaacacaataagtatcccacctggggagtacggccgcaaggttgaaactcaaaggaattgacgggggcccgcacaagcagtggagtatgtggtttaattcgaagcaacgcgaagaaccttaccaggtcttgacatcccgatgaccggttcagagatgagccttttcttcggaacatcggtgacaggtggtgcatggttgtcgtcagctcgtgtcgtgagatgttgggttaagtcccgcaacgagcgcaacccttacggttagttgatacgcaagatcactctagccggactgccgttgacaaaacggaggaaggtggggacgacgtcaaatcatcatgccccttatgacctgggctacacacgtactacaatggcagtcatacagagggaagcaaaaccgcgaggtggagcaaatccctaaaagctgtcccagttcagattgcaggctgcaacccgcctgcatgaagtcggaattgctagtaatcgcggatcagcatgccgcggtgaatacgttcccgggccttgtacacaccgcccgtcacaccatgagagccgtcaatacccgaagtccgtagcctaaccttcttggagggcgcggccgaaggtaggggtggtaattagggtgaagtcgtaacaaggtagccgtatcggaaggtgcggctggatcacctccttt

SEQ ID NO: 394 - DNA, 1529 bp, artificial sequence
  >GCF_003202935.1_00842 Agathobaculum_butyriciproducens_group
tttagagagtttgatcctggctcaggatgaacgctggcggcgtgcctaacacatgcaagtcgaacggagtcgttttggaaaatccttcgggattggaattctcgacttagtggcggacgggtgagtaacgcgtgagcaatctgcctttaagagggggataacagtcggaaacggctgctaataccgcataaagcatcaaattcgcatgtttttgatgccaaaggagcaatccgcttttagatgagctcgcgtctgattagctggttggcggggtaacggcccaccaaggcgacgatcagtagccggactgagaggttgaacggccacattgggactgagacacggcccagactcctacgggaggcagcagtggggaatattgcgcaatgggggaaaccctgacgcagcaacgccgcgtgattgaagaaggccttcgggttgtaaagatctttaatcagggacgaaataaatgacggtacctgaagaataagctccggctaactacgtgccagcagccgcggtaatacgtagggagcaagcgttatccggatttactgggtgtaaagggcgcgcaggcgggccggcaagttggaagtgaaatctatgggcttaacccataaactgctttcaaaactgctggtcttgagtgatggagaggcaggcggaattccgtgtgtagcggtgaaatgcgtagatatacggaggaacaccagtggcgaaggcggcctgctggacattaactgacgctgaggcgcgaaagcgtggggagcaaacaggattagataccctggtagtccacgccgtaaacgatggatactaggtgtgggaggtattgaccccttccgtgccgcagttaacacaataagtatcccacctggggagtacggccgcaaggttgaaactcaaaggaattgacgggggcccgcacaagcagtggagtatgtggtttaattcgaagcaacgcgaagaaccttaccaggtcttgacatcccgatgaccggttcagagatgagccttttcttcggaacatcggagacaggtggtgcatggttgtcgtcagctcgtgtcgtgagatgttgggttaagtcccgcaacgagcgcaacccttacggttagttgatacgcaagatcactctagccggactgccgttgacaaaacggaggaaggtggggacgacgtcaaatcatcatgccccttatgacctgggctacacacgtactacaatggcagtcatacagagggaagcaaaaccgcgaggtggagcaaatccctaaaagctgtcccagttcagattgcaggctgcaacccgcctgcatgaagtcggaattgctagtaatcgcggatcagcatgccgcggtgaatacgttcccgggccttgtacacaccgcccgtcacaccatgagagccgtcaatacccgaagtccgtagcctaaccgtaaggagggcgcggccgaaggtaggggtggtaattagggtgaagtcgtaacaaggtagccgtatcggaaggtgcggctggatcacctccttt

SEQ ID NO: 395 - DNA, 1529 bp, artificial sequence
  >GCF_003202935.1_00971 Agathobaculum_butyriciproducens_group
tttagagagtttgatcctggctcaggatgaacgctggcggcgtgcctaacacatgcaagtcgaacgaaactattttggaaactccttcgggagtggaatctttagtttagtggcggacgggtgagtaacgcgtgagcaatctgcctttaagagggggataacagtcggaaacggctgctaataccgcataaagcattaaattcgcatgtttttgatgccaaaggagcaatccgcttttagatgagctcgcgtctgattagctggttggcggggtaacggcccaccaaggcgacgatcagtagccggactgagaggttgaacggccacattgggactgagacacggcccagactcctacgggaggcagcagtggggaatattgcgcaatgggggaaaccctgacgcagcaacgccgcgtgattgaagaaggccttcgggttgtaaagatctttaatcagggacgaaacaaatgacggtacctgaagaataagctccggctaactacgtgccagcagccgcggtaatacgtagggagcaagcgttatccggatttactgggtgtaaagggcgcgcaggcgggccggtaagttggaagtgaaatctatgggcttaacccataaactgctttcaaaactgctggtcttgagtgatggagaggcaggcggaattccgtgtgtagcggtgaaatgcgtagatatacggaggaacaccagtggcgaaggcggcctgctggacattaactgacgctgaggcgcgaaagcgtggggagcaaacaggattagataccctggtagtccacgccgtaaacgatggatactaggtgtgggaggtattgaccccttccgtgccgcagttaacacaataagtatcccacctggggagtacggccgcaaggttgaaactcaaaggaattgacgggggcccgcacaagcagtggagtatgtggtttaattcgaagcaacgcgaagaaccttaccaggtcttgacatcccgatgaccgccttagagataaggcttttcttcggaacatcggagacaggtggtgcatggttgtcgtcagctcgtgtcgtgagatgttgggttaagtcccgcaacgagcgcaacccttacggttagttgatacgcaagatcactctagccggactgccgttgacaaaacggaggaaggtggggacgacgtcaaatcatcatgccccttatgacctgggctacacacgtactacaatggcagtcatacagagggaagcaaaaccgcgaggtggagcaaatccctaaaagctgtcccagttcagattgcaggctgcaacccgcctgcatgaagtcggaattgctagtaatcgcggatcagcatgccgcggtgaatacgttcccgggccttgtacacaccgcccgtcacaccatgagagccgtcaatacccgaagtccgtagcctaaccgtaaggagggcgcggccgaaggtaggggtggtaattagggtgaagtcgtaacaaggtagccgtatcggaaggtgcggctggatcacctccttt

SEQ ID NO: 396 - DNA, 1528 bp, artificial sequence
  >GCF_003202935.1_01184 Agathobaculum_butyriciproducens_group
tttagagagtttgatcctggctcaggatgaacgctggcggcgtgcctaacacatgcaagtcgaacggaactattttggaaactccttcgggagcggaatctttagtttagtggcggacgggtgagtaacgcgtgagcaatctgcctttaagagggggataacagtcggaaacggctgctaataccgcataaagcatcaaattcgcatgtttttgatgccaaaggagcaatccgcttttagatgagctcgcgtctgattagctggttggcggggtaacggcccaccaaggcgacgatcagtagccggactgagaggttgaacggccacattgggactgagacacggcccagactcctacgggaggcagcagtggggaatattgcgcaatgggggaaaccctgacgcagcaacgccgcgtgattgaagaaggccttcgggttgtaaagatctttaatcagggacgaaacaaatgacggtacctgaagaataagctccggctaactacgtgccagcagccgcggtaatacgtagggagcaagcgttatccggatttactgggtgtaaagggcgcgcaggcgggccggcaagttggaagtgaaatctatgggcttaacccataaactgctttcaaaactgctggtcttgagtgatggagaggcaggcggaattccgtgtgtagcggtgaaatgcgtagatatacggaggaacaccagtggcgaaggcggcctgctggacattaactgacgctgaggcgcgaaagcgtggggagcaaacaggattagataccctggtagtccacgccgtaaacgatggatactaggtgtgggaggtattgaccccttccgtgccgcagttaacacaataagtatcccacctggggagtacggccgcaaggttgaaactcaaaggaattgacggggcccgcacaagcagtggagtatgtggtttaattcgaagcaacgcgaagaaccttaccaggtcttgacatcccgatgaccggttcagagatgagccttttcttcggaacatcggtgacaggtggtgcatggttgtcgtcagctcgtgtcgtgagatgttgggttaagtcccgcaacgagcgcaacccttacggttagttgatacgcaagatcactctagccggactgccgttgacaaaacggaggaaggtggggacgacgtcaaatcatcatgccccttatgacctgggctacacacgtactacaatggcagtcatacagagggaagcaaaaccgcgaggtggagcaaatccctaaaagctgtcccagttcagattgcaggctgcaacccgcctgcatgaagtcggaattgctagtaatcgcggatcagcatgccgcggtgaatacgttcccgggccttgtacacaccgcccgtcacaccatgagagccgtcaatacccgaagtccgtagcctaaccgtaaggagggcgcggccgaaggtaggggtggtaattagggtgaagtcgtaacaaggtagccgtatcggaaggtgcggctggatcacctccttt

SEQ ID NO: 397 - DNA, 1529 bp, artificial sequence
  >GCF_003202935.1_01817 Agathobaculum_butyriciproducens_group
tttagagagtttgatcctggctcaggatgaacgctggcggcgtgcctaacacatgcaagtcgaacggaactattttggaaactccttcgggagcggaatctttagtttagtggcggacgggtgagtaacgcgtgagcaatctgcctttaagagggggataacagtcggaaacggctgctaataccgcataaagcatcaaattcgcatgtttttgatgccaaaggagcaatccgcttttagatgagctcgcgtctgattagctggttggcggggtaacggcccaccaaggcgacgatcagtagccggactgagaggttgaacggccacattgggactgagacacggcccagactcctacgggaggcagcagtggggaatattgcgcaatgggggaaaccctgacgcagcaacgccgcgtgattgaagaaggccttcgggttgtaaagatctttaatcagggacgaaacaaatgacggtacctgaagaataagctccggctaactacgtgccagcagccgcggtaatacgtagggagcaagcgttatccggatttactgggtgtaaagggcgcgcaggcgggccggtaagttggaagtgaaatctatgggcttaacccataaactgctttcaaaactgctggtcttgagtgatggagaggcaggcggaattccgtgtgtagcggtgaaatgcgtagatatacggaggaacaccagtggcgaaggcggcctgctggacattaactgacgctgaggcgcgaaagcgtggggagcaaacaggattagataccctggtagtccacgccgtaaacgatggatactaggtgtgggaggtattgaccccttccgtgccgcagttaacacaataagtatcccacctggggagtacggccgcaaggttgaaactcaaaggaattgacgggggcccgcacaagcagtggagtatgtggtttaattcgaagcaacgcgaagaaccttaccaggtcttgacatcccgatgaccggttcagagatgagccttttcttcggaacatcggagacaggtggtgcatggttgtcgtcagctcgtgtcgtgagatgttgggttaagtcccgcaacgagcgcaacccttacggttagttgatacgcaagatcactctagccggactgccgttgacaaaacggaggaaggtggggacgacgtcaaatcatcatgccccttatgacctgggctacacacgtactacaatggcagtcatacagagggaagcaaaaccgcgaggtggagcaaatccctaaaagctgtcccagttcagattgcaggctgcaacccgcctgcatgaagtcggaattgctagtaatcgcggatcagcatgccgcggtgaatacgttcccgggccttgtacacaccgcccgtcacaccatgagagccgtcaatacccgaagtccgtagcctaaccgcaaggagggcgcggccgaaggtaggggtggtaattagggtgaagtcgtaacaaggtagccgtatcggaaggtgcggctggatcacctccttt

SEQ ID NO: 398 - DNA, 1529 bp, artificial sequence
  >GCF_003202935.1_01876 Agathobaculum_butyriciproducens_group
tttagagagtttgatcctggctcaggatgaacgctggcggcgtgcctaacacatgcaagtcgaacggaactattttggaaactccttcgggagcggaatctttagtttagtggcggacgggtgagtaacgcgtgagcaatctgcctttaagagggggataacagtcggaaacggctgctaataccgcataaagcatcaaattcgcatgtttttgatgccaaaggagcaatccgcttttagatgagctcgcgtctgattagctggttggcggggtaacggcccaccaaggcgacgatcagtagccggactgagaggttgaacggccacattgggactgagacacggcccagactcctacgggaggcagcagtggggaatattgcgcaatgggggaaaccctgacgcagcaacgccgcgtgattgaagaaggccttcgggttgtaaagatctttaatcagggacgaaacaaatgacggtacctgaagaataagctccggctaactacgtgccagcagccgcggtaatacgtagggagcaagcgttatccggatttactgggtgtaaagggcgcgcaggcgggccggcaagttggaagtgaaatctatgggcttaacccataaactgctttcaaaactgctggtcttgagtgatggagaggcaggcggaattccgtgtgtagcggtgaaatgcgtagatatacggaggaacaccagtggcgaaggcggcctgctggacattaactgacgctgaggcgcgaaagcgtggggagcaaacaggattagataccctggtagtccacgccgtaaacgatggatactaggtgtgggaggtattgaccccttccgtgccgcagttaacacaataagtatcccacctggggagtacggccgcaaggttgaaactcaaaggaattgacgggggcccgcacaagcagtggagtatgtggtttaattcgaagcaacgcgaagaaccttaccaggtcttgacatcccgatgaccggttcagagatgagccttttcttcggaacatcggagacaggtggtgcatggttgtcgtcagctcgtgtcgtgagatgttgggttaagtcccgcaacgagcgcaacccttacggttagttgatacgcaagatcactctagccggactgccgttgacaaaacggaggaaggtggggacgacgtcaaatcatcatgccccttatgacctgggctacacacgtactacaatggcagtcatacagagggaagcaaaaccgcgaggtggagcaaatccctaaaagctgtcccagttcagattgcaggctgcaacccgcctgcatgaagtcggaattgctagtaatcgcggatcagcatgccgcggtgaatacgttcccgggccttgtacacaccgcccgtcacaccatgagagccgtcaatacccgaagtccgtagcctaaccgtaaggagggcgcggccgaaggtaggggtggtaattagggtgaagtcgtaacaaggtagccgtatcggaaggtgcggctggatcacctccttt

SEQ ID NO: 399 - DNA, 1544 bp, artificial sequence
  >GCF_003231475.1_00017 Streptococcus_salivarius_group
aatgagagtttgatcctggctcaggacgaacgctggcggcgtgcctaatacatgcaagtagaacgctgaagagaggagcttgctcttcttggatgagttgcgaacgggtgagtaacgcgtaggtaacctgccttgtagcgggggataactattggaaacgatagctaataccgcataacaatggatgacacatgtcatttatttgaaaggggcaattgctccactacaagatggacctgcgttgtattagctagtaggtgaggtaacggctcacctaggcgacgatacatagccgacctgagagggtgatcggccacactgggactgagacacggcccagactcctacgggaggcagcagtagggaatcttcggcaatgggggcaaccctgaccgagcaacgccgcgtgagtgaagaaggttttcggatcgtaaagctctgttgtaagtcaagaacgagtgtgagagtggaaaattcacactgtgacggtagcttaccagaaagggacggctaactacgtgccagcagccgcggtaatacgtaggtcccgagcgttgtccggatttattgggcgtaaagcgagcgcaggcggtttgataagtctgaagttaaaggctgtggctcaaccatagttcgctttggaaactgtcaaacttgagtgcagaaggggagagtggaattccatgtgtagcggtgaaatgcgtagatatatggaggaacaccggtggcgaaagcggctctctggtctgtaactgacgctgaggctcgaaagcgtggggagcgaacaggattagataccctggtagtccacgccgtaaacgatgagtgctaggtgttggatcctttccgggattcagtgccgcagctaacgcattaagcactccgcctggggagtacgaccgcaaggttgaaactcaaaggaattgacgggggcccgcacaagcggtggagcatgtggtttaattcgaagcaacgcgaagaaccttaccaggtcttgacatcccgatgctatttctagagatagaaagttacttcggtacatcggtgacaggtggtgcatggttgtcgtcagctcgtgtcgtgagatgttgggttaagtcccgcaacgagcgcaacccctattgttagttgccatcattcagttgggcactctagcgagactgccggtaataaaccggaggaaggtggggatgacgtcaaatcatcatgccccttatgacctgggctacacacgtgctacaatggttggtacaacgagttgcgagtcggtgacggcaagctaatctcttaaagccaatctcagttcggattgtaggctgcaactcgcctacatgaagtcggaatcgctagtaatcgcggatcagcacgccgcggtgaatacgttcccgggccttgtacacaccgcccgtcacaccacgagagtttgtaacacccgaagtcggtgaggtaaccttttggagccagccgcctaaggtgggatagatgattggggtgaagtcgtaacaaggtagccgtatcggaaggtgcggctggatcacctcctt

SEQ ID NO: 400 - DNA, 1572 bp, artificial sequence
  >GCF_003255875.1_00150 [Lactobacillus]_fermentum
tatgagagtttgatcctggctcaggatgaacgctggcggtgtgcctaatacatgcaagtcgaacgcgttggcccaattgattgatggtgcttgcacctgattgattttggtcgccaacgagtggcggacgggtgagtaacacgtaggtaacctgcccagaagcgggggacaacatttggaaacagatgctaataccgcataacaacgttgttcgcatgaacaacgcttaaaagatggcttctcgctatcacttctggatggacctgcggtgcattagcttgttggtggggtaatggcctaccaaggcgatgatgcatagccgagttgagagactgatcggccacaatgggactgagacacggcccatactcctacgggaggcagcagtagggaatcttccacaatgggcgcaagcctgatggagcaacaccgcgtgagtgaagaagggtttcggctcgtaaagctctgttgttaaagaagaacacgtatgagagtaactgttcatacgttgacggtatttaaccagaaagtcacggctaactacgtgccagcagccgcggtaatacgtaggtggcaagcgttatccggatttattgggcgtaaagagagtgcaggcggttttctaagtctgatgtgaaagccttcggcttaaccggagaagtgcatcggaaactggataacttgagtgcagaagagggtagtggaactccatgtgtagcggtggaatgcgtagatatatggaagaacaccagtggcgaaggcggctacctggtctgtaactgacgctgagactcgaaagcatgggtagcgaacaggattagataccctggtagtccatgccgtaaacgatgagtgctaggtgttggagggtttccgcccttcagtgccggagctaacgcattaagcactccgcctggggagtacgaccgcaaggttgaaactcaaaggaattgacgggggcccgcacaagcggtggagcatgtggtttaattcgaagctacgcgaagaaccttaccaggtcttgacatcttgcgccaaccctagagatagggcgtttccttcgggaacgcaatgacaggtggtgcatggtcgtcgtcagctcgtgtcgtgagatgttgggttaagtcccgcaacgagcgcaacccttgttactagttgccagcattaagttgggcactctagtgagactgccggtgacaaaccggaggaaggtggggacgacgtcagatcatcatgccccttatgacctgggctacacacgtgctacaatggacggtacaacgagtcgcgaactcgcgagggcaagcaaatctcttaaaaccgttctcagttcggactgcaggctgcaactcgcctgcacgaagtcggaatcgctagtaatcgcggatcagcatgccgcggtgaatacgttcccgggccttgtacacaccgcccgtcacaccatgagagtttgtaacacccaaagtcggtggggtaaccttttaggagccagccgcctaaggtgggacagatgattagggtgaagtcgtaacaaggtagccgtaggagaacctgcggctggatcacctcctt

SEQ ID NO: 401 - DNA, 1573 bp, artificial sequence
  >GCF_003255875.1_00259 [Lactobacillus]_fermentum
tatgagagtttgatcctggctcaggatgaacgccggcggtgtgcctaatacatgcaagtcgaacgcgttggcccaattgattgatggtgcttgcacctgattgattttggtcgccaacgagtggcggacgggtgagtaacacgtaggtaacctgcccagaagcgggggacaacatttggaaacagatgctaataccgcataacaacgttgttcgcatgaacaacgcttaaaagatggcttctcgctatcacttctggatggacctgcggtgcattagcttgttggtggggtaacggcctaccaaggcgatgatgcatagccgagttgagagactgatcggccacaatgggactgagacacggcccatactcctacgggaggcagcagtagggaatcttccacaatgggcgcaagcctgatggagcaacaccgcgtgagtgaagaagggtttcggctcgtaaagctctgttgttaaagaagaacacgtatgagagtaactgttcatacgttgacggtatttaaccagaaagtcacggctaactacgtgccagcagccgcggtaatacgtaggtggcaagcgttatccggatttattgggcgtaaagagagtgcaggcggttttctaagtctgatgtgaaagccttcggcttaaccggagaagtgcatcggaaactggataacttgagtgcagaagagggtagtggaactccatgtgtagcggtggaatgcgtagatatatggaagaacaccagtggcgaaggcggctacctggtctgcaactgacgctgagactcgaaagcatgggtagcgaacaggattagataccctggtagtccatgccgtaaacgatgagtgctaggtgttggagggtttccgcccttcagtgccggagctaacgcattaagcactccgcctggggagtacgaccgcaaggttgaaactcaaaggaattgacgggggcccgcacaagcggtggagcatgtggtttaattcgaagctacgcgaagaaccttaccaggtcttgacatcttgcgccaaccctagagatagggcgtttccttcgggaacgcaatgacaggtggtgcatggtcgtcgtcagctcgtgtcgtgagatgttgggttaagtcccgcaacgagcgcaacccttgttactagttgccagcattaagttgggcactctagtgagactgccggtgacaaaccggaggaaggtggggacgacgtcagatcatcatgccccttatgacctgggctacacacgtgctacaatggacggtacaacgagtcgcgaactcgcgagggcaagcaaatctcttaaaaccgttctcagttcggactgcagactgcaactcgcctgcacgaagtcggaatcgctagtaatcgcggatcagcatgccgcggtgaatacgttcccgggccttgtacacaccgcccgtcacaccatgagagtttgtaacacccaaagtcggtggggtaaccttttaggagccagccgcctaaggtgggacagatgattagggtgaagtcgtaacaaggtagccgtaggagaacctgcggctggatcacctccttt

SEQ ID NO: 402 - DNA, 1572 bp, Artificial Sequence
  >GCF_003255875.1_00581 [Lactobacillus]_fermentum
tatgagagtttgatcctggctcaggatgaacgccggcggtgtgcctaatacatgcaagtcgaacgcgttggcccaattgattgatggtgcttgcacctgattgattttggttgccaacgagtggcggacgggtgagtaacacgtaggtaacctacccagaagcgggggacaacatttggaaacagatgctaataccgcataacaacgttgttcgcatgaacaacgcttaaaagatggcttctcgctatcacttctggatggacctgcggtgcattagcttgttggtggggtaacggcctaccaaggcaatgatgcatagccgagttgagagactgatcggccacaatgggactgagacacggcccatactcctacgggaggcagcagtagggaatcttccacaatgggcgcaagcctgatggagcaacaccgcgtgagtgaagaagggtttcggctcgtaaagctctgttgttaaagaagaacacgtatgagagtaactgttcatacgttgacggtatttaaccagaaagtcacggctaactacgtgccagcagccgcggtaatacgtaggtggcgagcgttatccggatttattgggcgtaaagagagtgcaggcggttttctaagtctgatgtgaaagccttcggcttaaccggagaagtgcatcggaaactggataacttgagtgcagaagagggtagtggaactccatgtgtagcggtggaatgcgtagatatatggaagaacaccagtggcgaaggcggctacctggtctgcaactgacgctgagactcgaaagcatgggtagcgaacaggattagataccctggtagtccatgccgtaaacgatgagtgctaggtgttggagggtttccgcccttcagtgccggagctaacgcattaagcactccgcctggggagtacgaccgcaaggttgaaactcaaaggaattgacgggggcccgcacaagcggtggagcatgtggtttaattcgaagctacgcgaagaaccttaccaggtcttgacatcttgcgccaaccctagagatagggcgtttccttcgggaacgcaatgacaggtggtgcatggtcgtcgtcagctcgtgtcgtgagatgttgggttaagtcccgcaacgagcgcaacccttgttactagttgccagcattaagttgggcactctagtgagactgccggtgacaaaccggaggaaggtggggacgacgtcagatcatcatgccccttatgacctgggctacacacgtgctacaatggacggtacaacgagtcgcgaactcgcgagggcaagcaaatctcttaaaaccgttctcagttcggactgcaggctgcaactcgcctgcacgaagtcggaatcgctagtaatcgcggatcagcatgccgcggtgaatacgttcccgggccttgtacacaccgcccgtcacaccatgagagtttgtaacacccaaagtcggtggggtaaccttttaggagccagccgcctaaggtgggacagatgattagggtgaagtcgtaacaaggtagccgtaggagaacctgcggctggatcacctcctt

SEQ ID NO: 403 - DNA, 1573 bp, artificial sequence
  >GCF_003255875.1_01506 [Lactobacillus]_fermentum
tatgagagtttgatcctggctcaggatgaacgccggcggtgtgcctaatacatgcaagtcgaacgcgttggcccaattgattgatggtgcttgcacctgattgattttggtcgccaacgagtggcggacgggtgagtaacacgtaggtaacctgcccagaagcgggggacaacatttggaaacagatgctaataccgcataacagcgttgttcgcatgaacgacgcttaaaagatggcttctcgctatcacttctggatggacctgcggtgcattagcttgttggtggggtaacggcctaccaaggcgatgatgcatagccgagttgagagactgatcggccacaatgggactgagacacggcccatactcctacgggaggcagcagtagggaatcttccacaatgggcgcaagcctgatggagcaacaccgcgtgagtgaagaagggtttcggctcgtaaagctctgttgttaaagaagaacacgtatgagagtaactgttcatacgttgacggtatttaaccagaaagtcacggctaactacgtgccagcagccgcggtaatacgtaggtggcaagcgttatccggatttattgggcgtaaagagagtgcaggcggttttctaagtctgatgtgaaagccttcggcttaaccggagaagtgcatcggaaactggataacttgagtgcagaagagggtagtggaactccatgtgtagcggtggaatgcgtagatatatggaagaacaccagtggcgaaggcggctacctggtctgcaactgacgctgagactcgaaagcatgggtagcgaacaggattagataccctggtagtccatgccgtaaacgatgagtgctaggtgttggagggtttccgcccttcagtgccggagctaacgcattaagcactccgcctggggagtacgaccgcaaggttgaaactcaaaggaattgacgggggcccgcacaagcggtggagcatgtggtttaattcgaagctacgcgaagaaccttaccaggtcttgacatcttgcgccaaccctagagatagggcgtttccttcgggaacgcaatgacaggtggtgcatggtcgtcgtcagctcgtgtcgtgagatgttgggttaagtcccgcaacgagcgcaacccttgttactagttgccagcattaagttgggcactctagtgagactgccggtgacaaaccggaggaaggtggggacgacgtcagatcatcatgccccttatgacctgggctacacacgtgctacaatggacggtacaacgagtcgcgaactcgcgagggcaagcaaatctcttaaaaccgttctcagttcggactgcaggctgcaactcgcctgcacgaagtcggaatcgctagtaatcgcggatcagcatgccgcggtgaatacgttcccgggccttgtacacaccgcccgtcacaccatgagagtttgtaacacccaaagtcggtggggtaaccttttaggagccagccgcctaaggtgggacagatgattagggtgaagtcgtaacaaggtagccgtaggagaacctgcggctggatcacctccttt

SEQ ID NO: 404 - DNA, 1527 bp, artificial sequence
  >GCF_003287895.1_00040 Blautia_sp1
tcagagagtttgatcctggctcaggatgaacgctggcggcgtgcttaacacatgcaagtcgagcgaagcacttgccattgactcttcggaagatctggcaaatgactgagcggcggacgggtgagtaacgcgtgggtaacctgcctcatacaggggaataacagttagaaatggctgctaatgccgcataagcgcacagggccgcatggtctggtgtgaaaaactccggtggtatgagatggacccgcgtctgattaggtagttggcggggtaacggcccaccaagccgacgatcagtagccgacctgagagggtgaccggccacattgggactgagacacggcccagactcctacgggaggcagcagtggggaatattgcacaatggaggaaactctgatgcagcgacgccgcgtgaaggaagaagtatctcggtatgtaaacttctatcagcagggaagaaaatgacggtacctgactaagaagccccggctaactacgtgccagcagccgcggtaatacgtaggggcaagcgttatccggatttactgggtgtaaagggagcgtagacggacgggcaagtctgatgtgaaagcccggggcttaaccccgggactgcattggaaactgtccatcttgagtgccggagaggtaagcggaattcctagtgtagcggtgaaatgcgtagatattaggaggaacaccagtggcgaaggcggcttactggacggtaactgacgttgaggctcgaaagcgtggggagcaaacaggattagataccctggtagtccacgccgtaaacgatgaatactaggtgtcgggttgcaaagcaattcggtgccgcagcaaacgcagtaagtattccacctggggagtacgttcgcaagaatgaaactcaaaggaattgacggggacccgcacaagcggtggagcatgtggtttaattcgaagcaacgcgaagaaccttaccaagtcttgacatctgcctgaccgcaccttaaccggtgttttccttcgggacaggcaagacaggtggtgcatggttgtcgtcagctcgtgtcgtgagatgttgggttaagtcccgcaacgagcgcaacccctgtcctcagtagccagcagtccggctgggcactctggggagactgccggggataacccggaggaaggcggggacgacgtcaaatcatcatgccccttatgatttgggctacacacgtgctacaatggcgtaaacaaagggaagcaagagtgcgagcttaagcaaatcccaaaaataacgtcccagttcggactgcagtctgcaactcgactgcacgaagctggaatcgctagtaatcgcgaatcagaatgtcgcggtgaatacgttcccgggtcttgtacacaccgcccgtcacaccatgggagtcagtaacgcccgaagtcagtgacccaaccttagggagggagctgccgaaggcgggaccgataactggggtgaagtcgtaacaaggtagccgtatcggaaggtgcggctggatcacctccttt

SEQ ID NO: 405 - DNA, 1529 bp, artificial sequence
  >GCF_003287895.1_00657 Blautia_sp1
tcagagagtttgatcctggctcaggatgaacgctggcggcgtgcttaacacatgcaagtcgagcgaagcacttgccattgactcttcggaagatctggcaaatgactgagcggcggacgggtgagtaacgcgtgggtaacctgcctcatacaggggaataacagttagaaatggctgctaatgccgcataagcgcacagggccgcatggtctggtgtgaaaaactccggtggtatgagatggacccgcgtctgattaggtagttggcggggtaacggcccaccaagccgacgatcagtagccgacctgagagggtgaccggccacattgggactgagacacggcccagactcctacgggaggcagcagtggggaatattgcacaatggaggaaactctgatgcagcgacgccgcgtgaaggaagaagtatctcggtatgtaaacttctatcagcagggaagaaaatgacggtacctgactaagaagccccggctaactacgtgccagcagccgcggtaatacgtaggggcaagcgttatccggatttactgggtgtaaagggagcgtagacggacgggcaagtctgatgtgaaagcccggggcttaaccccgggactgcattggaaactgtccatcttgagtgccggagaggtaagcggaattcctagtgtagcggtgaaatgcgtagatattaggaggaacaccagtggggcgaaggcggcttactggacggtaactgacgttgaggctcgaaagcgtggggagcaaacaggattagataccctggtagtccacgccgtaaacgatgaatactaggtgtcgggttgcaaagcaattcggtgccgcagcaaacgcagtaagtattccacctggggagtacgttcgcaagaatgaaactcaaaggaattgacggggacccgcacaagcggtggagcatgtggtttaattcgaagcaacgcgaagaaccttaccaagtcttgacatctgcctgaccgcgccttaatcggtgttttccttcgggacaggcaagacaggtggtgcatggttgtcgtcagctcgtgtcgtgagatgttgggttaagtcccgcaacgagcgcaacccctgtcctcagtagccagcagtccggctgggcactctggggagactgccggggataacccggaggaaggcggggacgacgtcaaatcatcatgccccttatgatttgggctacacacgtgctacaatggcgtaaacaaagggaagcaagagtgcgagcttaagcaaatcccaaaaataacgtcccagttcggactgcagtctgcaactcgactgcacgaagctggaatcgctagtaatcgcgaatcagaatgtcgcggtgaatacgttcccgggtcttgtacacaccgcccgtcacaccatgggagtcagtaacgcccgaagtcagtgacccaaccttagggagggagctgccgaaggcgggaccgataactggggtgaagtcgtaacaaggtagccgtatcggaaggtgcggctggatcacctccttt

SEQ ID NO: 406 - DNA, 1528 bp, artificial sequence
  >GCF_003287895.1_02372 Blautia_sp1
tcagagagtttgatcctggctcaggatgaacgctggcggcgtgcttaacacatgcaagtcgagcgaagcacttgtcattgactcttcggaagatctggcaaatgactgagcggcggacgggtgagtaacgcgtgggtaacctgcctcatacaggggaataacagttagaaatggctgctaatgccgcataagcgcacaggaccgcatggtctggtgtgaaaaactccggtggtatgagatggacccgcgtctgattaggtagttggcggggtaacggcccaccaagccgacgatcagtagccgacctgagagggtgaccggccacattgggactgagacacggcccagactcctacgggaggcagcagtggggaatattgcacaatggaggaaactctgatgcagcgacgccgcgtgaaggaagaagtatctcggtatgtaaacttctatcagcagggaagaaaatgacggtacctgactaagaagccccggctaactacgtgccagcagccgcggtaatacgtagggggcaagcgttatccggatttactgggtgtaaagggagcgtagacggacgggcaagtctgatgtgaaagcccggggcttaaccccgggactgcattggaaactgtccatcttgagtgccggagaggtaagcggaattcctagtgtagcggtgaaatgcgtagatattaggaggaacaccagtggcgaaggcggcttactggacggtaactgacgttgaggctcgaaagcgtggggagcaaacaggattagataccctggtagtccacgccgtaaacgatgaatactaggtgtcgggttgcaaagcaattcggtgccgcagcaaacgcagtaagtattccacctggggagtacgttcgcaagaatgaaactcaaaggaattgacggggacccgcacaagcggtggagcatgtggtttaattcgaagcaacgcgaagaaccttaccaagtcttgacatctgcctgaccgcgccttaaccggtgttttccttcgggacaggcaagacaggtggtgcatggttgtcgtcagctcgtgtcgtgagatgttgggttaagtcccgcaacgagcgcaacccctgtcctcagtagccagcagtccggctgggcactctggggagactgccggggataacccggaggaaggcggggacgacgtcaaatcatcatgccccttatgatttgggctacacacgtgctacaatggcgtaaacaaagggaagcaagagtgcgagcttaagcaaatcccaaaaataacgtcccagttcggactgcagtctgcaactcgactgcacgaagctggaatcgctagtaatcgcgaatcagaatgtcgcggtgaatacgttcccgggtcttgtacacaccgcccgtcacaccatgggagtcagtaacgcccgaagtcagtgacccaaccttagggagggagctgccgaaggcgggaccgataactggggtgaagtcgtaacaaggtagccgtatcggaaggtgcggctggatcacctccttt

SEQ ID NO: 407 - DNA, 1522 bp, artificial sequence
  >GCF_003287895.1_02946 Blautia_sp1
tcagagagtttgatcctggctcaggatgaacgctggcggcgtgcttaacacatgcaagtcgagcgaagcacttgtcattgactcttcggaagatctggcaaatgactgagcggcggacgggtgagtaacgcgtgggtaacctgcctcatacaggggaataacagttagaaatggctgctaatgccgcataagcgcacaggaccgcatggtctggtgtgaaaaactccggtggtatgagatggacccgcgtctgattaggtagttggcggggtaacggcccaccaagccgacgatcagtagccgacctgagagggtgaccggccacattgggactgagacacggcccagactcctacgggaggcagcagtggggaatattgcacaatggaggaaactctgatgcagcgacgccgcgtgaaggaagaagtatctcggtatgtaaacttctatcagcagggaagaaaatgacggtacctgactaagaagccccggctaactacgtgccagcagccgcggtaatacgtaggggcaagcgttatccggatttactgggtgtaaagggagcgtagacggacgggcaagtctgatgtgaaagcccggggcttaaccccgggactgcattggaaactgtccatcttgagtgccggagaggtaagcggaattctagtgtagcggtgaaatgcgtagatattaggaggaacaccagtggcgaaggcggcttactggacggtaactgacgttgaggctcgaaagcgtggggagcaaacaggattagataccctggtagtccacgccgtaaacgatgaatactaggtgtcgggttgcaaagcaattcggtgccgcagcaaacgcagtaagtattccacctggggagtacgttcgcaagaatgaaactcaaaggaattgacggggacccgcacaagcggtggagcatgtggtttaattcgaagcaacgcgaagaaccttaccaagtcttgacatctgcctgaccgcgccttaaccggtgttttccttcgggacaggcaagacaggtggtgcatggtgtcgtcagctcgtgtcgtgagatgttgggttaagtcccgcaacgagcgcaacccctgtcctcagtagccagcagtccggctggcactctggggagactgccggggataacccggaggaaggcggggacgacgtcaaatcatcatgccccttatgatttgggctacacacgtgctacaatggcgtaaacaaagggagcagagtgcgagcttaagcaaatcccaaaaataacgtcccagttcggactgcagtctgcaactcgactgcacgaagctggaatcgctagtaatcgcgaatcagaatgtcgcggtgaatacgttcccgggtcttgtacacaccgcccgtcacaccatgggagtcagtaacgcccgaagtcagtgacccaaccttagggagggagctgccgaaggcgggaccgataactggggtgaagtcgtaacaaggtagccgtatcggaaggtgcggctggatcacctccttt

SEQ ID NO: 408 - DNA, 1525 bp, artificial sequence
  >GCF_003287895.1_03174 Blautia_sp1
tcagagagtttgatcctggctcaggatgaacgctggcggcgtgcttaacacatgcaagtcgagcgaagcacttgccattgactcttcggaagatctggcaaatgactgagcggcggacgggtgagtaacgcgtgggtaacctgcctcatacaggggaataacagttagaaatggctgctaatgccgcataagcgcacagggccgcatggtctggtgtgaaaaactccggtggtatgagatggacccgcgtctgattaggtagttggcggggtaacggcccaccaagccgacgatcagtagccgacctgagagggtgaccggccacattgggactgagacacggcccagactcctacgggaggcagcagtggggaatattgcacaatggaggaaactctgatgcagcgacgccgcgtgaaggaagaagtatctcggtatgtaaacttctatcagcagggaagaaaatgacggtacctgactaagaagccccggctaactacgtgccagcagccgcggtaatacgtagggggcaagcgttatccggatttactgggtgtaaagggagcgtagacggacgggcaagtctgatgtgaaagcccggggcttaaccccgggactgcattggaaactgtccatcttgagtgccggagaggtaagcggaattcctagtgtagcggtgaaatgcgtagatattaggaggaacaccagtggcgaaggcggcttactggacggtaactgacgttgaggctcgaaagcgtggggagcaaacaggattagataccctggtagtccacgccgtaaacgatgaatactaggtgtcgggttgcaaagcaattcggtgccgcagcaaacgcagtaagtattccacctggggagtacgttcgcaagaatgaaactcaaaggaattgacggggacccgcacaagcggtggagcatgtggtttaattcgaagcaacgcgaagaaccttaccaagtcttgacatctgcctgaccgcaccttaaccggtgttttccttcgggacaggcaagacaggtggtgcatggttgtcgtcagctcgtgtcgtgagatgttgggttaagtcccgcaacgagcgcaacccctgtcctcagtagccagcagtccggctgggcactctggggagactgccggggataacccggaggaaggcggggacgacgtcaaatcatcatgccccttatgatttgggctacacacgtgctacaatggcgtaaacaaagggaagcaagagtgcgagcttaagcaaatcccaaaaataacgtcccagttcggactgcagtctgcaactcgactgcacgaagctggaatcgctagttaatcgcgaatcagaatgtcgcggtgaatacgttcccgggtcttgtacacacccgcccgtcacaccatggagtcagtaacgcccgaagtcagtgacccaaccttagggaggagctgccgaaggcgggaccgataactgggtgaagtcgtacaaggtagccgtatcggaagtgcggctggatcacctccttt

SEQ ID NO: 409 - DNA, 1527 bp, artificial sequence
  >GCF_003324155.1_03121 Blautia_luti_group
tcagagagtttgatcctggctcaggatgaacgctggcggcgtgcttaacacatgcaagtcgaacgggaaaccttttattgaagcttcggcagatttggattgtttctagtggcggacgggtgagtaacgcgtgggtaacctgccttatacagggggataacagtcagaaatgattgctaataccgcataagcgcacagagctgcatggctcggtgtgaaaaactccggtggtataagatggacccgcgttggattagctagttggtgaggtaacggcccaccaaggcgacgatccatagccggcctgagagggtgaacggccacattgggactgagacacggcccagactcctacgggaggcagcagtggggaatattgcacaatgggggaaaccctgatgcagcgacgccgcgtgaaggaagaagtatctcggtatgtaaacttctatcagcagggaagaaaatgacggtacctgactaagaagccccggctaactacgtgccagcagccgcggtaatacgtagggggcaagcgttatccggatttactgggtgtaaagggagcgtagacggatggacaagtctgatgtgaaaggctggggctcaaccccgggactgcattggaaactgcccgtcttgagtgccggagaggtaagcggaattcctagtgtagcggtgaaatgcgtagatattaggaggaacaccagtggcgaaggcggcttactggacggtaactgacgttgaggctcgaaagcgtggggagcaaacaggattagataccctggtagtccacgcggtaaacgatgaatgctaggtgtcggggagcaaagctcttcggtgccgccgcaaacgcattaagcattccacctggggagtacgttcgcaagaatgaaactcaaaggaattgacggggacccgcacaagcggtggagcatgtggtttaattcgaagcaacgcgaagaaccttaccaagtcttgacatccctctgaccggaacttaaccgttcctttccttcgggacagaggagacaggtggtgcatggttgtcgtcagctcgtgtcgtgagatgttgggttaagtcccgcaacgagcgcaacccctatccccagtagccagcggttcggccgggcactctgaggagactgccagggataacctggaggaaggcggggatgacgtcaaatcatcatgccccttatgatttgggctacacacgtgctacaatggcgtaaacaaagggaagcgaacccgcgagggtgggcaaatcccaaaaataacgtcccagttcggactgtagtctgcaacccgactacacgaagctggaatcgctagtaatcgcggatcagaatgccgcggtgaatacgttcccgggtcttgtacacaccgcccgtcacaccatgggagtcagtaacgcccgaagtcagtgacctaaccgcaaggaaggagctgccgaaggcgggaccgatgactggggtgaagtcgtaacaaggtagccgtatcggaaggtgcggctggatcacctccttt

SEQ ID NO: 410 - DNA, 1519 bp, artificial sequence
  >GCF_003363675.1_03325 Bacteroides_intestinalis
atgaagagtttgatcctggctcaggatgaacgctagctacaggcttaacacatgcaagtcgaggggcagcatgacttagcaataggttgatggcgaccggcgcacgggtgagtaacacgtatccaacctgccgattattccgggatagcctttcgaaagaaagattaatactggatagcataacgagaaggcatcttcttgttattaaagaatttcgataatcgatggggatgcgttccattagtttgttggcggggtaacggcccaccaagacatcgatggataggggttctgagaggaaggtcccccacattggaactgagacacggtccaaactcctacgggaggcagcagtgaggaatattggtcaatggacgagagtctgaaccagccaagtagcgtgaaggatgactgccctatgggttgtaaacttcttttatatgggaataaagtgagccacgtgtggctttttgtatgtaccatacgaataaggatcggctaactccgtgccagcagccgcggtaatacggaggatccgagcgttatccggatttattgggtttaaagggagcgtaggcggattattaagtcagttgtgaaagtttgcggctcaaccgtaaaattgcagttgatactggtagtcttgagtgcagcagaggtaggcggaattcgtggtgtagcggtgaaatgcttagatatcacgaagaactccgattgcgaaggcagcttactggactgtaactgacgctgatgctcgaaagtgtgggtatcaaacaggattagataccctggtagtccacacagtaaacgatgaatactcgctgtttgcgatatacggcaagcggccaagcgaaagcattaagtattccacctggggagtacgccggcaacggtgaaactcaaaggaattgacgggggcccgcacaagcggaggaacatgtggtttaattcgatgatacgcgaggaaccttacccgggcttaaattgcaactgacggatttggaaacagatcttccttcgggcagttgtgaaggtgctgcatggttgtcgtcagctcgtgccgtgaggtgtcggcttaagtgccataacgagcgcaacccttatctttagttactaacaggtcatgctgaggactctagagagactgccgtcgtaagatgtgaggaaggtggggatgacgtcaaatcagcacggcccttacgtccggggctacacacgtgttacaatggggggtacagaaggcagctacacagcgatgtgatgctaatcccaaaagcctctctcagttcggattggagtctgcaacccgactccatgaagctggattcgctagtaatcgcgcatcagccacggcgcggtgaatacgttcccgggccttgtacacaccgcccgtcaagccatgaaagccgggggtacctgaagtacgtaaccgcaaggagcgtcctagggtaaaactggtaattggggctaagtcgtaacaaggtagccgtaccggaaggtgcggctggaacacctcctt

SEQ ID NO: 411 - DNA, 1514 bp, artificial sequence
  >GCF_003433855.1_03563 [Coprococcus]_catus
atgagagtttgatcctggctcaggatgaacgctggcggcgtgcttaacacatgcaagtcgaacggacgatgaagagcttgcttttcagagttagtggcggacgggtgagtaacgcgtgggtaacctgcctcatacagggggatagcagctggaaacggctgataaaaccgcataagcgcacagcatcgcatgatgcagtgtgaaaaactccggtggtatgagatggacccgcgtctgattagcttgttggtgaggtaacggcccaccaaggcgacgatcagtagccggcctgagagggtgaccggccacattgggactgagacacggcccaaactcctacgggaggcagcagtggggaatattgcacaatgggggaaaccctgatgcagcgacgccgcgtgaaggaagaagtatctcggtatgtaaacttctatcagcagggaagataatgacggtacctgactaagaagccccggctaactacgtgccagcagccgcggtaatacgtagggggcaagcgttatccggatttactgggtgtaaagggagcgtaggcggcggagcaagtcagaagtgaaagcccggggctcaaccccgggacggcttttgaaactgccctgcttgatttcaggagaggtaagcggaattcctagtgtagcggtgaaatgcgtagatattaggaggaacaccagtggcgaaggcggcttactggactgacaatgacgctgaggctcgaaagcgtggggagcaaacaggattagataccctggtagtccacgccgtaaacgatgaatactaggtgtcgggggtcataagactttcggtgccgcagcaaacgcaataagtattccacctggggagtacgttcgcaagaatgaaactcaaaggaattgacggggacccgcacaagcggtggagcatgtggtttaattcgaagcaacgcgaagaaccttaccaggccttgacatcccggtgaccgtcccgtaatggggacctctcttcggagcaccggtgacaggtggtgcatggttgtcgtcagctcgtgtcgtgagatgttgggttaagtcccgcaacgagcgcaacccctatgttcagtagccagcaggtaaagctgggcactctggacagactgccggggataacccggaggaaggcggggatgacgtcaaatcatcatgccccttacggcctgggctacacacgtgctacaatggcgtaaacaaagggaagcgagagggtgacctggagcgaatcccaaaaataacgtcccagttcggactgtagtctgcaacccgactacacgaagctggaatcgctagtaatcgcgaatcagcatgtcgcggtgaatacgttcccgggtcttgtacacaccgcccgtcacaccatgggagttggaaatgcccgaagtcagtgacctaaccgcaagggaggagctgccgaaggtggagccgatgactggggtgaagtcgtaacaaggtagccgtatcggaaggtgcggctggatcacctccttt

SEQ ID NO: 412 - DNA, 1492 bp, artificial sequence
  >GCF_003434235.1_00001 [Coprococcus]_catus
atgagagtttgatcctggctcaggatgaacgctggcggcgtgcttaacacatgcaagtcgaacggacgatgaagagcttgcttttcaaagttagtggcggacgggtgagtaacgcgtgggtaacctgcctcatacagggggatagcagctggaaacggctgataaaaccgcataagcgcacagcatcgcatgatgcagtgtgaaaaactccggtggtatgagatggacccgcgtctgattagcttgttggtgaggtaacggcccaccaaggcgacgatcagtagccggcctgagagggtgaccggccacattgggactgagacacggcccaaactcctacgggaggcagcagtggggaatattgcacaatgggggaaaccctgatgcagcgacgccgcgtgaaggaagaagtatctcggtatgtaaacttctatcagcagggaagataatgacggtacctgactaagaagccccggctaactacgtgccagcagccgcggtaatacgtagggggcaagcgttatccggatttactgggtgtaaagggagcgtaggcggcggagcaagtcagaagtgaaagcccggggctcaaccccgggacggcttttgaaactgccctgcttgatttcaggagaggtaagcggaattcctagtgtagcggtgaaatgcgtagatattaggaggaacaccagtggcgaaggcggcttactggactgacaatgacgctgaggctcgaaagcgtggggagcaaacaggattagataccctggtagtccacgccgtaaacgatgaatactaggtgtcgggggtcataagactttcggtgccgcagcaaacgcaataagtattccacctggggagtacgttcgcaagaatgaaactcaaaggaattgacggggacccgcacaagcggtggagcatgtggtttaattcgaagcaacgcgaagaaccttaccaggccttgacatcccggtgaccgtcccgtaatggggacctctcttcggagcaccggtgacaggtggtgcatggttgtcgtcagctcgtgtcgtgagatgttgggttaagtcccgcaacgagcgcaacccctatgttcagtagccagcaggtaaggctgggcactctggacagactgccggggataacccggaggaaggcggggatgacgtcaaatcatcatgccccttacggcctgggctacacacgtgctacaatggcgtaaacaaagggaagcgagagggtgacctggagcgaatcccaaaaataacgtcccagttcggactgtagtctgcaacccgactacacgaagctggaatcgctagtaatcgcgaatcagcatgtcgcggtgaatacgttcccgggtcttgtacacaccgcccgtcacaccatgggagttggaaatgcccgaagtcagtgacctaaccgcaagggaggagctgccgaaggtggagccgatgactggggtgaagtcgtaacaaggtagccgtatcggaag

SEQ ID NO: 413 - DNA, 1527 bp, artificial sequence
  >GCF_003434755.1_03408 Agathobaculum_butyriciproducens_group
tttagagagtttgatcctggctcaggatgaacgctggcggcgtgcctaacacatgcaagtcgaacggagtcgttttggaaatctcttcggagatggaattctcgacttagtggcggacgggtgagtaacgcgtgagcaatctgcctttaagagggggataacagtcggaaacggctgctaataccgcataaagcatcaaattcgcatgtttttgatgccaaaggagcaatccgcttttagatgagctcgcgtctgattagctggttggcggggtaacggcccaccaaggcgacgatcagtagccggactgagaggttgaacggccacattgggactgagacacggcccagactcctacgggaggcagcagtggggaatattgcgcaatgggggaaaccctgacgcagcaacgccgcgtgattgaagaaggcctcgggttgtaaagatctttaatcagggacgaaacaaatgacggtacctgaagaataagctccggctaactacgtgccagcagccgcggtaatacgtagggagcaagcgttatccggatttactgggtgtaaagggcgcgcaggcgggccggcaagttggaagtgaaatctatgggcttaacccataaactgctttcaaaactgctggtcttgagtgatggagaggcaggcggaattccgtgtgtagcggtgaaatgcgtagatatacggaggaacaccagtggcgaaggcggcctgctggacattaactgacgctgaggcgcgaaagcgtggggagcaaacaggattagataccctggtagtccacgccgtaaacgatggatactaggtgtgggaggtattgaccccttccgtgccgcagttaacacaataagtatcccacctggggagtacggccgcaaggttgaaactcaaaggaattgacgggggcccgcacaagcagtggagtatgtggtttaattcgaagcaacgcgaagaaccttaccaggtcttgacatcccgatgaccgccttagagataaggcttttcttcggaacatcggtgacaggtggtgcatggttgtcgtcagctcgtgtcgtgagatgttgggttaagtcccgcaacgagcgcaacccttacggttagttgatacgcaagatcactctagccggactgccgttgacaaaacggaggaaggtggggacgacgtcaaatcatcatgccccttatgacctgggctacacacgtactacaatggcagtcatacagagggaagcaaaaccgcgaggtggagcaaatccctaaaagctgtcccagttcagattgcaggctgcaacccgcctgcatgaagtcggaattgctagtaatcgcggatcagcatgccgcggtgaatacgttcccgggccttgtacacaccgcccgtcacaccatgagagccgtcaatacccgagtccgtagcctaaccgtaaggagggcgcggccgaaggtaggggtggtaattagggtgaagtcgtaacaaggtagccgtatcggaaggtgcggctggatcacctccttt

SEQ ID NO: 414 - DNA, 1526 bp, artificial sequence
  >GCF_003435865.1_01492 [Ruminococcus]_bromii
ttagagagtttgatcctggctcaggacgaacgctggcggcgtgcctaacacatgcaagtcgaacggaactgttttgaaagatttcttcggaatgaatttgatttagtttagtggcggacgggtgagtaacgcgtgagtaacctgccttcaagagggggataacattctgaaaaggatgctaataccgcatgacatatcggaaccacatggttctgatatcaaagattttatcgcttgaagatggactcgcgtccgattagttagttggtgaggtaacggctcaccaagaccgcgatcggtagccggactgagaggttgaacggccacattgggactgagacacggcccagactcctacgggaggcagcagtgggggatattgcgcaatgggggcaaccctgacgcagcaacgccgcgtgaaggatgaaggttttcggattgtaaacttcttttattaaggacgaaatttgacggtacttaatgaataagctccggctaactacgtgccagcagccgcggtaatacgtagggagcaagcgttgtccggatttactgggtgtaaagggtgcgtaggcggctttgcaagtcagatgtgaaatctatgggctcaacccataaactgcatttgaaactgtagagcttgagtgaagtagaggcaggcggaattccccgtgtagcggtgaaatgcgtagagatggggaggaacaccagtggcgaaggcggcctgctgggctttaactgacgctgaggcacgaaagcgtgggtagcaaacaggattagataccctggtagtccacgctgtaaacgatgattactaggtgtggggggtctgaccccttccgtgccggagttaacacaataagtaatccacctggggagtacggccgcaaggttgaaactcaaaggaattgacgggggcccgcacaagcagtggagtatgtggtttaattcgaagcaacgcgaagaaccttaccaggtcttgacatccaactaacgaagtagagatacattaggtgcccttcggggaaagttgagacaggtggtgcatggttgtcgtcagctcgtgtcgtgagatgttgggttaagtcccgcaacgagcgcaacccttgctattagttgctacgcaagagcactctaataggactgccgttgacaaaacggaggaaggtggggacgacgtcaaatcatcatgccccttatgacctgggctacacacgtactacaatggatgttaacagagggaagcaagacagcgatgtggagcaaacccctaaaaacattctcagttcagattgcaggctgcaacccgcctgcatgaagatggaattgctagtaatcgcggatcagcatgccgcggtgaatacgttcccgggccttgtacacaccgcccgtcacaccatgggagccggtaatacccgaagtcagtagtccaacctcgtgaggacgctgccgaaggtaggattggcgactggggtgaagtcgtaacaaggtagccgtatcggaaggtgcggctggatcacctcctt

SEQ ID NO: 415 - DNA, 1527 bp, artificial sequence
  >GCF_003435955.1_01623 [Ruminococcus]_bromii
ttagagagtttgatcctggctcaggacgaacgctggcggcgtgcctaacacatgcaagtcgaacggaactgttttgaaagatttcttcggaatgaatttgatttagtttagtggcggacgggtgagtaacgcgtgagtaacctgccttcaagagggggataacattctgaaaagaatgctaataccgcatgatatatcggaaccacatggttttgatatcaaagattttatcgcttgaagatggactcgcgtccgattagttagttggtgaggtaacggctcaccaagaccgcgatcggtagccggactgagaggttgaacggccacattgggactgagacacggcccagactcctacgggaggcagcagtgggggatattgcgcaatgggggcaaccctgacgcagcaacgccgcgtgaaggatgaaggttttcggattgtaaacttcttttattaaggacgaaaaatgacggtacttaatgaataagctccggctaactacgtgccagcagccgcggtaatacgtagggagcaagcgttgtccggatttactgggtgtaaagggtgcgtaggcggctttgcaagtcagatgtgaaatctatgggctcaacccataaactgcatttgaaactgtagagcttgagtgaagtagaggcaggcggaattccccgtgtagcggtgaaatgcgtagagatggggaggaacaccagtggcgaaggcggcctgctgggctttaactgacgctgaggcacgaaagcgtgggtagcaaacaggattagataccctggtagtccacgctgtaaacgatgattactaggtgtggggggtctgaccccttccgtgccggagttaacacaataagtaatccacctggggagtacggccgcaaggttgaaactcaaaggaattgacgggggcccgcacaagcagtggagtatgtggtttaattcgaagcaacgcgaagaaccttaccaggtcttgacatccaactaacgaagtagagatacattaggtgcccttcggggaaagttgagacaggtggtgcatggttgtcgtcagctcgtgtcgtgagatgttgggttaagtcccgcaacgagcgcaacccttgctattagttgctacgcaagagcactctaataggactgccgttgacaaaacggaggaaggtggggacgacgtcaaatcatcatgccccttatgacctgggctacacacgtactacaatggatgttaacagagggaagcaagacagcgatgtggagcaaacccctaaaaacattctcagttcagattgcaggctgcaacccgcctgcatgaagatggaattgctagtaatcgcggatcagcatgccgcggtgaatacgttcccgggccttgtacacaccgcccgtcacaccatgggagccggtaatacccgaagtcagtagtccaacctcgtgaggacgctgccgaaggtaggattggcgactggggtgaagtcgtaacaaggtagccgtatcggaaggtgcggctggatcacctccttt

SEQ ID NO: 416 - DNA, 1524 bp, artificial sequence
  >GCF_003436175.1_00146 Bacteroides_dorei_group
atgaagagtttgatcctggctcaggatgaacgctagctacaggcttaacacatgcaagtcgaggggcagcatggtcttagcttgctaaggccgatggcgaccggcgcacgggtgagtaacacgtatccaacctgccgtctactcttggacagccttctgaaaggaagattaatacaagatggcatcatgagtccgcatgttcacatgattaaaggtattccggtagacgatggggatgcgttccattagatagtaggcggggtaacggcccacctagtcttcgatggataggggttctgagaggaaggtcccccacattggaactgagacacggtccaaactcctacgggaggcagcagtgaggaatattggtcaatgggcgagagcctgaaccagccaagtagcgtgaaggatgactgccctatgggttgtaaacttcttttataaaggaataaagtcgggtatgtatacccgtttgcatgtactttatgaataaggatcggctaactccgtgccagcagccgcggtaatacggaggatccgagcgttatccggatttattgggtttaaagggagcgtagatggatgtttaagtcagttgtgaaagtttgcggctcaaccgtaaaattgcagttgatactggatatcttgagtgcagttgaggcaggcggaattcgtggtgtagcggtgaaatgcttagatatcacgaagaactccgattgcgaaggcagcctgctaagctgcaactgacattgaggctcgaaagtgtgggtatcaaacaggattagataccctggtagtccacacggtaaacgatgaatactcgctgtttgcgatatactgcaagcggccaagcgaaagcgttaagtattccacctggggagtacgccggcaacggtgaaactcaaaggaattgacgggggcccgcacaagcggaggaacatgtggtttaattcgatgatacgcgaggaaccttacccgggcttaaattgcagatgaattacggtgaaagccgtaagccgcaaggcatctgtgaaggtgctgcatggttgtcgtcagctcgtgccgtgaggtgtcggcttaagtgccataacgagcgcaacccttgttgtcagttactaacaggttctgctgaggactctgacaagactgccatcgtaagatgtgaggaaggtggggatgacgtcaaatcagcacggcccttacgtccggggctacacacgtgttacaatggggggtacagagggccgctaccacgcgagtggatgccaatccccaaaacctctctcagttcggactggagtctgcaacccgactccacgaagctggattcgctagtaatcgcgcatcagccacggcgcggtgaatacgttcccgggccttgtacacaccgcccgtcaagccatgggagccgggggtacctgaagtgcgtaaccgcgaggagcgccctagggtaaaactggtgactggggctaagtcgtaacaaggtagccgtaccggaaggtgcggctggaacacctcctt

SEQ ID NO: 417 - DNA, 1367 bp, artificial sequence
  >GCF_003436535.1_02793 [Ruminococcus]_gnavus
cagttggaaacggctgctaataccgcataagcgcacagtaccgcatggtatggtgtgaaaaactccggcggtatgagatggacccgcgtctgattaggtagttggtggggtaacggcctaccaagccgacgatcagtagccgacctgagagggtgaccggccacattgggactgagacacggcccaaactcctacgggaggcagcagtggggaatattgcacaatgggggaaaccctgatgcagcgacgccgcgtgagcgatgaagtatttcggtatgtaaagctctatcagcagggaagaaaatgacggtacctgactaagaagccccggctaactacgtgccagcagccgcggtaatacgtagggggcaagcgttatccggatttactgggtgtaaagggagcgtagacggcatggcaagccagatgtgaaagcccggggctcaaccccgggactgcatttggaactgtcaggctagagtgtcggagaggaaagcggaattcctagtgtagcggtgaaatgcgtagatattaggaggaacaccagtggcgaaggcggctttctggacgatgactgacgttgaggctcgaaagcgtggggagcaaacaggattagataccctggtagtccacgccgtaaacgatgaatactaggtgtcgggtggcaaagccattcggtgccgcagcaaacgcaataagtattccacctggggagtacgttcgcaagaatgaaactcaaaggaattgacggggacccgcacaagcggtggagcatgtggtttaattcgaagcaacgcgaagaaccttacctggtcttgacatccctctgaccgctctttaatcggagctttccttcgggacagaggagacaggtggtgcatggttgtcgtcagctcgtgtcgtgagatgttgggttaagtcccgcaacgagcgcaacccctatctttagtagccagcattttggatgggcactctagagagactgccagggataacctggaggaaggtggggatgacgtcaaatcatcatgccccttatgaccagggctacacacgtgctacaatggcgtaaacaaagggaagcgagcccgcgagggggagcaaatcccaaaaataacgtctcagttcggattgtagtctgcaactcgactacatgaagctggaatcgctagtaatcgcgaatcagaatgtcgcggtgaatacgttcccgggtcttgtacacaccgcccgtcacaccatgggagtcagtaacgcccgaagtcagtgacccaaccgcaaggagggagctgccgaaggtgggaccgataactggggtgaagtcgtaacaaggtagccgtatcggaaggtgcggctggatcacctccttt

SEQ ID NO: 418 - DNA, 1519 bp, artificial sequence
  >GCF_003436685.1_00001 Bacteroides_intestinalis
atgaagagtttgatcctggctcaggatgaacgctagctacaggcttaacacatgcaagtcgaggggcagcatgacctagcaataggttgatggcgaccggcgcacgggtgagtaacacgtatccaacctgccgattattccgggatagcctttcgaaagaaagattaatactggatagcataacgagaaggcatcttcttgttattaaagaatttcgataatcgatggggatgcgttccattagtttgttggcggggtaacggcccaccaagacatcgatggataggggttctgagaggaaggtcccccacattggaactgagacacggtccaaactcctacgggaggcagcagtgaggaatattggtcaatggacgagagtctgaaccagccaagtagcgtgaaggatgactgccctatgggttgtaaacttcttttatatgggaataaagtgggccacgtgtggctttttgtatgtaccatacgaataaggatcggctaactccgtgccagcagccgcggtaatacggaggatccgagcgttatccggatttattgggtttaaagggagcgtaggcggattattaagtcagttgtgaaagtttgcggctcaaccgtaaaattgcagttgatactggtagtcttgagtgcagcagaggtaggcggaattcgtggtgtagcggtgaaatgcttagatatcacgaagaactccgattgcgaaggcagcttactggactgtaactgacgctgatgctcgaaagtgtgggtatcaaacaggattagataccctggtagtccacacagtaaacgatgaatactcgctgtttgcgatatacagcaagcggccaagcgaaagcattaagtattccacctggggagtacgccggcaacggtgaaactcaaaggaattgacgggggcccgcacaagcggaggaacatgtggtttaattcgatgatacgcgaggaaccttacccgggcttaaattgcaactgacggatttggaaacagatcttccttcgggcagttgtgaaggtgctgcatggttgtcgtcagctcgtgccgtgaggtgtcggcttaagtgccataacgagcgcaacccttatctttagttactaacaggtcatgctgaggactctagagagactgccgtcgtaagatgtgaggaaggtggggatgacgtcaaatcagcacggcccttacgtccggggctacacacgtgttacaatggggggtacagaaggcagctacacagcgatgtgatgctaatcccaaaagcctctctcagttcggattggagtctgcaacccgactccatgaagctggattcgctagtaatcgcgcatcagccacggcgcggtgaatacgttcccgggccttgtacacaccgcccgtcaagccatgaaagccgggggtacctgaagtacgtaaccgcaaggagcgtcctagggtaaaactggtaattggggctaagtcgtaacaaggtagccgtaccggaaggtgcggctggaacacctcctt

SEQ ID NO: 419 - DNA, 1524 bp, artificial sequence
  >GCF_003437415.1_04427 Bacteroides_dorei_group
atgaagagtttgatcctggctcaggatgaacgctagctacaggcttaacacatgcaagtcgaggggcagcatggtcttagcttgctaaggccgatggcgaccggcgcacgggtgagtaacacgtatccaacctgccgtctactcttggacagccttctgaaaggaagattaatacaagatggcatcatgagttcacatgttcacatgattaaaggtattccggtagacgatggggatgcgttccattagatagtaggcggggtaacggcccacctagtcttcgatggataggggttctgagaggaaggtcccccacattggaactgagacacggtccaaactcctacgggaggcagcagtgaggaatattggtcaatgggcgagagcctgaaccagccaagtagcgtgaaggatgactgccctatgggttgtaaacttcttttataaaggaataaagtcgggtatgcatacccgtttgcatgtactttatgaataaggatcggctaactccgtgccagcagccgcggtaatacggaggatccgagcgttatccggatttattgggtttaaagggagcgtagatggatgtttaagtcagttgtgaaagtttgcggctcaaccgtaaaattgcagttgatactggatatcttgagtgcagttgaggcaggcggaattcgtggtgtagcggtgaaatgcttagatatcacgaagaactccgattgcgaaggcagcctgctaagctgcaactgacattgaggctcgaaagtgtgggtatcaaacaggattagataccctggtagtccacacggtaaacgatgaatactcgctgtttgcgatatacagcaagcggccaagcgaaagcgttaagtattccacctggggagtacgccggcaacggtgaaactcaaaggaattgacgggggcccgcacaagcggaggaacatgtggtttaattcgatgatacgcgaggaaccttacccgggcttaaattgcagatgaattacggtgaaagccgtaagccgcaaggcatctgtgaaggtgctgcatggttgtcgtcagctcgtgccgtgaggtgtcggcttaagtgccataacgagcgcaacccttgttgtcagttactaacaggttctgctgaggactctgacaagactgccatcgtaagatgtgaggaaggtggggatgacgtcaaatcagcacggcccttacgtccggggctacacacgtgttacaatggggggtacagagggccgctaccacgcgagtggatgccaatcccaaaaacctctctcagttcggactggagtctgcaacccgactccacgaagctggattcgctagtaatcgcgcatcagccacggcgcggtgaatacgttcccgggccttgtacacaccgcccgtcaagccatgggagccgggggtacctgaagtgcgtaaccgcgaggagcgccctagggtaaaactggtgactggggctaagtcgtaacaaggtagccgtaccggaaggtgcggctggaacacctcctt

SEQ ID NO: 420 - DNA, 1525 bp, artificial sequence
  >GCF_003438235.1_01181 Bacteroides_dorei_group
atgaagagtttgatcctggctcaggatgaacgctagctacaggcttaacacatgcaagtcgaggggcagcatggtcttagcttgctaaggccgatggcgaccggcgcacgggtgagtaacacgtatccaacctgccgtctactcttgggcagccttctgaaaggaagattaatacaagatggcatcatgagtccgcatgttcacatgattaaaggtattccggtagacgatggggatgcgttccattagatagtaggcggggtaacggcccacctagtcttcgatggataggggttctgagaggaaggtcccccacattggaactgagacacggtccaaactcctacgggaggcagcagtgaggaatattggtcaatgggcgagagcctgaaccagccaagtagcgtgaaggatgactgccctatgggttgtaaacttcttttataaaggaataaagtcgggtatgcatacccgtttgcatgtactttatgaataaggatcggctaactccgtgccagcagccgcggtaatacggaggatccgagcgttatccggatttattgggtttaaagggagcgtagatggatgtttaagtcagttgtgaaagtttgcggctcaaccgtaaaattgcagttgatactggatatcttgagtgcagttgaggcaggcggaattcgtggtgtagcggtgaaatgcttagatatcacgaagaactccgattgcgaaggcagcctgctaagctgcaactgacattgaggctcgaaagtgtgggtatcaaacaggattagataccctggtagtccacacggtaaacgatgaatactcgctgtttgcgatatacggcaagcggccaagcgaaagcgttaagtattccacctggggagtacgccggcaacggtgaaactcaaaggaattgacgggggcccgcacaagcggaggaacatgtggtttaattcgatgatacgcgaggaaccttacccgggcttaaattgcagatgaattacggtgaaagccgtaagccgcaaggcatctgtgaaggtgctgcatggttgtcgtcagctcgtgccgtgaggtgtcggcttaagtgccataacgagcgcaacccttgttgtcagttactaacaggttccgctgaggactctgacaagactgccatcgtaagatgtgaggaaggtggggatgacgtcaaatcagcacggcccttacgtccggggctacacacgtgttacaatggggggtacagagggccgctaccacgcgagtggatgccaatccccaaaacctctctcagttcggactggagtctgcaacccgactccacgaagctggattcgctagtaatcgcgcatcagccacggcgcggtgaatacgttcccgggccttgtacacaccgcccgtcaagccatgggagccgggggtacctgaagtgcgtaaccgcgaggagcgccctagggtaaaactggtgactggggctaagtcgtaacaaggtagccgtaccggaaggtgcggctggaacacctccttt

SEQ ID NO: 421 - DNA, 1454 bp, artificial sequence
  >GCF_003438245.1_01716 Streptococcus_australis
  misc_feature (1)..(1): n is a, c, g, or t
ntgagttgcgaacgggtgagtaacgcgtaggtaacctgcctggtagcgggggataactattggaaacgatagctaataccgcataacagtagatattgcatgatatctgcttgaaaggtgcaaatgcatcactaccagatggacctgcgttgtattagctagttggtgaggtaacggctcaccaaggcgacgatacatagccgacctgagagggtgatcggccacactgggactgagacacggcccagactcctacgggaggcagcagtagggaatcttcggcaatggggggaaccctgaccgagcaacgccgcgtgagtgaagaaggttttcggatcgtaaagctctgttgtaagagaagaacgagtgtgagagtggaaagttcacactgtgacggtatcttaccagaaagggacggctaactacgtgccagcagccgcggtaatacgtaggtcccgagcgttatccggatttattgggcgtaaagcgagcgcaggcggttagataagtctgaagttaaaggctgtggcttaaccatagtacgctttggaaactgtttaacttgagtgcagaaggggagagtggaattccatgtgtagcggtgaaatgcgtagatatatggaggaacaccggtggcgaaagcggctctctggtctgtaactgacgctgaggctcgaaagcgtggggagcaaacaggattagataccctggtagtccacgccgtaaacgatgagtgctaggtgttgggtcctttccgggactcagtgccgcagctaacgcattaagcactccgcctggggagtacgaccgcaaggttgaaactcaaaggaattgacgggggcccgcacaagcggtggagcatgtggtttaattcgaagcaacgcgaagaaccttaccaggtcttgacatccctctgaccgctctagagatagagttttccttcgggacagaggtgacaggtggtgcatggttgtcgtcagctcgtgtcgtgagatgttgggttaagtcccgcaacgagcgcaacccctattgttagttgccatcattcagttgggcactctagcgagactgccggtaataaaccggaggaaggtggggatgacgtcaaatcatcatgccccttatgacctgggctacacacgtgctacaatggttggtacaacgagtcgcaagtcggtgacggcaagctaatctcttaaagccagtctcagttcggattgtaggctgcaactcgcctacatgaagtcggaatcgctagtaatcgcggatcagcacgccgcggtgaatacgttcccgggccttgtacacaccgcccgtcacaccacgagagtttgtaacacccgaagtcggtgaggtaaccttttaggagccagccgcctaaggtgggatagatgattggggtgaagtcgtaacaaggtagccgtatcggaaggtgcggctggatcacctccttt

SEQ ID NO: 422 - DNA, 1525 bp, artificial sequence
  >GCF_003438765.1_02168 Bacteroides_dorei_group
atgaagagtttgatcctggctcaggatgaacgctagctacaggcttaacacatgcaagtcgaggggcagcatggtcttagcttgctaaggccgatggcgaccggcgcacgggtgagtaacacgtatccaacctgccgtctactcttggacagccttctgaaaggaagattaatacaagatggcatcatgagtccacatgttcacatgattaaaggtattccggtagacgatggggatgcgttccattagatagtaggcggggtaacggcccacctagtcttcgatggataggggttctgagaggaaggtcccccacattggaactgagacacggtccaaactcctacgggaggcagcagtgaggaatattggtcaatgggcgagagcctgaaccagccaagtagcgtgaaggatgactgccctatgggttgtaaacttcttttataaaggaataaagtcgggtatgcatacccgtttgcatgtactttatgaataaggatcggctaactccgtgccagcagccgcggtaatacggaggatccgagcgttatccggatttattgggtttaaagggagcgtagatggatgtttaagtcagttgtgaaagtttgcggctcaaccgtaaaattgcagttgatactggatatcttgagtgcagttgaggcaggcggaattcgtggtgtagcggtgaaatgcttagatatcacgaagaactccgattgcgaaggcagcctgctaagctgcaactgacattgaggctcgaaagtgtgggtatcaaacaggattagataccctggtagtccacacggtaaacgatgaatactcgctgtttgcgatatacagcaagcggccaagcgaaagcgttaagtattccacctggggagtacgccggcaacggtgaaactcaaaggaattgacgggggcccgcacaagcggaggaacatgtggtttaattcgatgatacgcgaggaaccttacccgggcttaaattgcagatgaattacggtgaaagccgtaagccgcaaggcatctgtgaaggtgctgcatggttgtcgtcagctcgtgccgtgaggtgtcggcttaagtgccataacgagcgcaacccttgttgtcagttactaacaggttccgctgaggactctgacaagactgccatcgtaagatgtgaggaaggtggggatgacgtcaaatcagcacggcccttacgtccggggctacacacgtgttacaatggggggtacagagggccgctaccacgcgagtggatgccaatcccaaaaacctctctcagttcggactggagtctgcaacccgactccacgaagctggattcgctagtaatcgcgcatcagccacggcgcggtgaatacgttcccgggccttgtacacaccgcccgtcaagccatgggagccgggggtacctgaagtgcgtaaccgcgaggagcgccctagggtaaaactggtgactggggctaagtcgtaacaaggtagccgtaccggaaggtgcggctggaacacctccttt

SEQ ID NO: 423 - DNA, 1525 bp, artificial sequence
  >GCF_003457755.1_01500 Bacteroides_dorei_group
atgaagagtttgatcctggctcaggatgaacgctagctacaggcttaacacatgcaagtcgaggggcagcatggtcttagcttgctaaggccgatggcgaccggcgcacgggtgagtaacacgtatccaacctgccgtctactcttggacagccttctgaaaggaagattaatacaagatggcatcatgagtccgcatgttcacatgattaaaggtattccggtagacgatggggatgcgttccattagatagtaggcggggtaacggcccacctagtcttcgatggataggggttctgagaggaaggtcccccacattggaactgagacacggtccaaactcctacgggaggcagcagtgaggaatattggtcaatgggcgagagcctgaaccagccaagtagcgtgaaggatgactgccctatgggttgtaaacttcttttataaaggaataaagtcgggtatgcatacccgtttgcatgtactttatgaataaggatcggctaactccgtgccagcagccgcggtaatacggaggatccgagcgttatccggatttattgggtttaaagggagcgtagatggatgtttaagtcagttgtgaaagtttgcggctcaaccgtaaaattgcagttgatactggatatcttgagtgcagttgaggcaggcggaattcgggggggagcggtgaaatgcttagatatcacgaagaactccgattgcgaaggcagcctgctaagctgcaactgacattgaggctcgaaagtgtgggtatcaaacaggattagataccctggtagtccacacggtaaacgatgaatactcgctgtttgcgatatacggcaagcggccaagcgaaagcgttaagtattccacctggggagtacgccggcaacggtgaaactcaaaggaattgacgggggcccgcacaagcggaggaacatgtggtttaattcgatgatacgcgaggaaccttacccgggcttaaattgcagatgaattacggtgaaagccgtaagccgcaaggcatctgtgaaggtgctgcatggttgtcgtcagctcgtgccgtgaggtgtcggcttaagtgccataacgagcgcaacccttgttgtcagttactaacaggttccgctgaggactctgacaagactgccatcgtaagatgtgaggaaggtggggatgacgtcaaatcagcacggcccttacgtccggggctacacacgtgttacaatggggggtacagagggccgctaccacgcgagtggatgccaatccccaaaacctctctcagttcggactggagtctgcaacccgactccacgaagctggattcgctagtaatcgcgcatcagccacggcgcggtgaatacgttcccgggccttgtacacaccgcccgtcaagccatgggagccgggggtacctgaagtgcgtaaccgcgaggagcgccctagggtaaaactggtgactggggctaagtcgtaacaaggtagccgtaccggaaggtgcggctggaacacctccttt

SEQ ID NO: 424 - DNA, 1544 bp, artificial sequence
  >GCF_003458645.1_01363 Streptococcus_salivarius_group
aatgagagtttgatcctggctcaggacgaacgctggcggcgtgcctaatacatgcaagtagaacgctgaagagaggagcttgctcttcttggatgagttgcgaacgggtgagtaacgcgtaggtaacctgccttgtagcgggggataactattggaaacgatagctaataccgcataacaatggatgacccatgtcatttatttgaaaggggcaaatgctccactacaagatggacctgcgttgtattagctagtaggtgaggtaacggctcacctaggcgacgatacatagccgacctgagagggtgatcggccacactgggactgagacacggcccagactcctacgggaggcagcagtagggaatcttcggcaatgggggcaaccctgaccgagcaacgccgcgtgagtgaagaaggttttcggatcgtaaagctctgttgtaagtcaagaacgagtgtgagagtggaaagttcacactgtgacggtagcttaccagaaagggacggctaactacgtgccagcagccgcggtaatacgtaggtcccgagcgttgtccggatttattgggcgtaaagcgagcgcaggcggtttgataagtctgaagttaaaggctgtggctcaaccatagttcgctttggaaactgtcaaacttgagtgcagaaggggagagtggaattccatgtgtagcggtgaaatgcgtagatatatggaggaacaccggtggcgaaagcggctctctggtctgtaactgacgctgaggctcgaaagcgtggggagcgaacaggattagataccctggtagtccacgccgtaaacgatgagtgctaggtgttggatcctttccgggattcagtgccgcagctaacgcattaagcactccgcctggggagtacgaccgcaaggttgaaactcaaaggaattgacgggggcccgcacaagcggtggagcatgtggtttaattcgaagcaacgcgaagaaccttaccaggtcttgacatcccgatgctatttctagagatagaaagttacttcggtacatcggtgacaggtggtgcatggttgtcgtcagctcgtgtcgtgagatgttgggttaagtcccgcaacgagcgcaacccctattgttagttgccatcattcagttgggcactctagcgagactgccggtaataaaccggaggaaggtggggatgacgtcaaatcatcatgccccttatgacctgggctacacacgtgctacaatggttggtacaacgagttgcgagtcggtgacggcaagctaatctcttaaagccaatctcagttcggattgtaggctgcaactcgcctacatgaagtcggaatcgctagtaatcgcggatcagcacgccgcggtgaatacgttcccgggccttgtacacaccgcccgtcacaccacgagagtttgtaacacccgaagtcggtgaggtaaccttttggagccagccgcctaaggtgggatagatgattggggtgaagtcgtaacaaggtagccgtatcggaaggtgcggctggatcacctcctt

SEQ ID NO: 425 - DNA, 1526 bp, artificial sequence
  >GCF_003459405.1_01677 [Ruminococcus]_bromii
ttagagagtttgatcctggctcaggacgaacgctggcggcgtgcctaacacatgcaagtcgaacggaactgttttgaaagatttcttcggaatgaatttgatttagtttagtggcggacgggtgagtaacgcgtgagtaacctgccttcaagagggggataacattctgaaaagaatgctaataccgcatgacatatcggaatcacatggttctgatatcaaagattttatcgcttgaagatggactcgcgtccgattagttagttggtgaggtaacggctcaccaagaccgcgatcggtagccggactgagaggttgaacggccacattgggactgagacacggcccagactcctacgggaggcagcagtgggggatattgcgcaatgggggcaaccctgacgcagcaacgccgcgtgaaggatgaaggttttcggattgtaaacttcttttattaaggacgaaaaatgacggtacttaatgaatagctccggctaactacgtgccagcagccgcggtaatacgtagggagcaagcgttgtccggatttactgggtgtaaagggtgcgtaggcggctttgcaagtcagatgtgaaatctatgggctcaacccataaactgcatttgaaactgtagagcttgagtgaagtagaggcaggcggaattccccgtgtagcggtgaaatgcgtagagatggggaggaacaccagtggcgaaggcggcctgctgggctttaactgacgctgaggcacgaaagcgtgggtagcaaacaggattagataccctggtagtccacgctgtaaacgatgattactaggtgtggggggtctgaccccttccgtgccggagttaacacaataagtaatccacctggggagtacggccgcaaggttgaaactcaaaggaattgacgggggcccgcacaagcagtggagtatgtggtttaattcgaagcaacgcgaagaaccttaccaggtcttgacatccaactaacgaagtagagatacattaggtgcccttcggggaaagttgagacaggtggtgcatggttgtcgtcagctcgtgtcgtgagatgttgggttaagtcccgcaacgagcgcaacccttgctattagttgctacgcaagagcactctaataggactgccgttgacaaaacggaggaaggtggggacgacgtcaaatcatcatgccccttatgacctgggctacacacgtactacaatggatgttaacagagggaagcaagacagcgatgtggagcaaacccctaaaaacattctcagttcagattgcaggctgcaacccgcctgcatgaagatggaattgctagtaatcgcggatcagcatgccgcggtgaatacgttcccgggccttgtacacaccgcccgtcacaccatgggagccggtaatacccgaagtcagtagtccaacctcgtgaggacgctgccgaaggtaggattggcgactggggtgaagtcgtaacaaggtagccgtatcggaaggtgcggctggatcacctccttt

SEQ ID NO: 426 - DNA, 1524 bp, artificial sequence
  >GCF_003459535.1_02015 Bacteroides_dorei_group
atgaagagtttgatcctggctcaggatgaacgctagctacaggcttaacacatgcaagtcgaggggcagcatggtcttagcttgctaaggccgatggcgaccggcgcacgggtgagtaacacgtatccaacctgccgtctactcttggacagccttctgaaaggaagattaatacaagatggcatcatgagttcgcatgttcacatgattaaaggtattctggtagacgatggggatgcgttccattagatagtaggcggggtaacggcccacctagtcttcgatggataggggttctgagaggaaggtcccccacattggaactgagacacggtccaaactcctacgggaggcagcagtgaggaatattggtcaatgggcgcaggcctgaaccagccaagtagcgtgaaggatgactgccctatgggttgtaaacttcttttataaaggaataaagtcgggtatgcatacccgtttgcatgtactttatgaataaggatcggctaactccgtgccagcagccgcggtaatacggaggatccgagcgttatccggatttattgggtttaaagggagcgtagatggatgtttaagtcagttgtgaaagtttgcggctcaaccgtaaaattgcagttgatactggatatcttgagtgcagttgaggcaggcggaattcgtggtgtagcggtgaaatgcttagatatcacgaagaactccgattgcgaaggcagcctgctaagctgcaactgacattgaggctcgaaagtgtgggtatcaaacaggattagataccctggtagtccacacggtaaacgatgaatactcgctgtttgcgatatacagcaagcggccaagcgaaagcgttaagtattccacctggggagtacgccggcaacggtgaaactcaaaggaattgacgggggcccgcacaagcggaggaacatgtggtttaattcgatgatacgcgaggaaccttacccgggcttaaattgcagatgaattacggtgaaagccgtaagccgcaaggcatctgtgaaggtgctgcatggttgtcgtcagctcgtgccgtgaggtgtcggcttaagtgccataacgagcgcaacccttgttgtcagttactaacaggttccgctgaggactctgacaagactgccatcgtaagatgtgaggaaggtggggatgacgtcaaatcagcacggcccttacgtccggggctacacacgtgttacaatggggggtacagagggccgctaccacgcgagtggatgccaatcccaaaaacctctctcagttcggactggagtctgcaacccgactccacgaagctggattcgctagtaatcgcgcatcagccacggcgcggtgaatacgttcccgggccttgtacacaccgcccgtcaagccatgggagccgggggtacctgaagtgcgtaaccgcgaggagcgccctagggtaaaactggtgactggggctaagtcgtaacaaggtagccgtaccggaaggtgcggctggaacacctcctt

SEQ ID NO: 427 - DNA, 1525 bp, artificial sequence
  >GCF_003460305.1_00078 Bacteroides_dorei_group
atgaagagtttgatcctggctcaggatgaacgctagctacaggcttaacacatgcaagtcgaggggcagcatggtcttagcttgctaaggccgatggcgaccggcgcacgggtgagtaacacgtatccaacctgccgtctactcttggacagccttctgaaaggaagattaatacaagatggcatcatgagtccgcatgttcacatgattaaaggtattccggtagacgatggggatgcgttccattagatagtaggcggggtaacggcccacctagtcttcgatggataggggttctgagaggaaggtcccccacattggaactgagacacggtccaaactcctacgggaggcagcagtgaggaatattggtcaatgggcgagagcctgaaccagccaagtagcgtgaaggatgactgccctatgggttgtaaacttcttttataaaggaataaagtcgggtatggatacccgtttgcatgtactttatgaataaggatcggctaactccgtgccagcagccgcggtaatacggaggatccgagcgttatccggatttattgggtttaaagggagcgtagatggatgtttaagtcagttgtgaaagtttgcggctcaaccgtaaaattgcagttgatactggatatcttgagtgcagttgaggcaggcggaattcgtggtgtagcggtgaaatgcttagatatcacgaagaactccgattgcgaaggcagcctgctaagctgcaactgacattgaggctcgaaagtgtgggtatcaaacaggattagataccctggtagtccacacggtaaacgatgaatactcgctgtttgcgatatacagcaagcggccaagcgaaagcgttaagtattccacctggggagtacgccggcaacggtgaaactcaaaggaattgacgggggcccgcacaagcggaggaacatgtggtttaattcgatgatacgcgaggaaccttacccgggcttaaattgcagatgaattacggtgaaagccgtaagccgcaaggcatctgtgaaggtgctgcatggttgtcgtcagctcgtgccgtgaggtgtcggcttaagtgccataacgagcgcaacccttgttgtcagttactaacaggatttgctgaggactctgacaagactgccatcgtaagatgtgaggaaggtggggatgacgtcaaatcagcacggcccttacgtccggggctacacacgtgttacaatgggggggtacagagggccgctaccacgcgagtggatgccaatcccaaaaacctctctcagttcggactggagtctgcaacccgactccacgaagctggattcgctagtaatcgcgcatcagccacggcgcggtgaatacgttcccgggccttgtacacaccgcccgtcaagccatgggagccgggggtacctgaagtgcgtaaccgcgaggagcgccctagggtaaaactggtgactggggctaagtcgtaacaaggtagccgtaccggaaggtgcggctggaacacctcctt

SEQ ID NO: 428 - DNA, 1526 bp, artificial sequence
  >GCF_003460445.1_01142 [Ruminococcus]_bromii
ttagagagtttgatcctggctcaggacgaacgctggcggcgtgcctaacacatgcaagtcgaacggaactgttttgaaagatttcttcggaatgaatttgatttagtttagtggcggacgggtgagtaacgcgtgagtaacctgccttcaagagggggataacattctgaaaagaatgctaataccgcatgacatatcggaatcacatggttttgatatcaaagattttatcgcttgaagatggactcgcgtccgattagttagttggtgaggtaacggctcaccaagaccgcgatcggtagccggactgagaggttgaacggccacattgggactgagacacggcccagactcctacgggaggcagcagtgggggatattgcgcaatgggggcaaccctgacgcagcaacgccgcgtgaaggatgaaggttttcggattgtaaacttcttttattaaggacgaaaattgacggtacttaatgaataagctccggctaactacgtgccagcagccgcggtaatacgtagggagcaagcgttgtccggatttactgggtgtaaagggtgcgtaggcggctttgcaagtcagatgtgaaatctatgggctcaacccataaactgcatttgaaactgtagagcttgagtgaagtagaggcaggcggaattccccgtgtagcggtgaaatgcgtagagatggggaggaacaccagtggcgaaggcggcctgctgggctttaactgacgctgaggcacgaaagcgtgggtagcaaacaggattagataccctggtagtccacgctgtaaacgatgattactaggtgtggggggtctgaccccttccgtgccggagttaacacaataagtaatccacctggggagtacggccgcaaggttgaaactcaaaggaattgacgggggcccgcacaagcagtggagtatgtggtttaattcgaagcaacgcgaagaaccttaccaggtcttgacatccaactaacgaagtagagatacattaggtgcccttcggggaaagttgagacaggtggtgcatggttgtcgtcagctcgtgtcgtgagatgttgggttaagtcccgcaacgagcgcaacccttgctattagttgctacgcaagagcactctaataggactgccgttgacaaaacggaggaaggtggggacgacgtcaaatcatcatgccccttatgacctgggctacacacgtactacaatggatgttaacagagggaagcaagacagcgatgtggagcaaacccctaaaaacattctcagttcagattgcaggctgcaacccgcctgcatgaagatggaattgctagtaatcgcggatcagcatgccgcggtgaatacgttcccgggccttgtacacaccgcccgtcacaccatgggagccggtaatacccgaagtcagtagtccaacctcgtgaggacgctgccgaaggtaggattggcgactggggtgaagtcgtaacaaggtagccgtatcggaaggtgcggctggatcacctcctt

SEQ ID NO: 429 - DNA, 1421 bp, artificial sequence
  >GCF_003460665.1_00275 Blautia_luti_group
ctagtggcggacgggtgagtaacgcgtgggtaacctgccttgtacagggggataacagtcagaaatgactgctaataccgcataagcgcacaggaccgcatggtccggtgtgaaaaactccggtggtataagatggacccgcgttggattagctagttggcagggtaacggcctaccaagcgacgatccatagccggcctgagagggtgaacggccacattgggactgagacacggcccagactcctacgggaggcagcagtggggaatattgcacaatgggggaaaccctgatgcagcgacgccgcgtgaaggaagaagtatctcggtatgtaaacttctatcagcagggaagaaaatgacggtacctgactaagaagccccggctaactacgtgccagcagccgcggtaatacgtagggggcaagcgttatccggatttactgggtgtaaagggagcgtagacggatggacaagtctgatgtgaaaggctggggctcaaccccgggactgcattggaaactgcccgtcttgagtgccggagaggtaagcggaattcctagtgtagcggtgaaatgcgtagatattaggaggaacaccagtggcgaaggcggcttactggacggtaactgacgttgaggctcgaaagcgtggggagcaaacaggattagataccctggtagtccacgcggtaaacgatgaatgctaggtgtcgggtgacaaagtcattcggtgccgccgcaaacgcattaagcattccacctggggagtacgttcgcaagaatgaaactcaaaggaattgacggggacccgcacaagcggtggagcatgtggtttaattcgaagcaacgcgaagaaccttaccaagtcttgacatccctctgaccggaacttaaccgttccttcccttcggggcagaggagacaggtggtgcatggttgtcgtcagctcgtgtcgtgagatgttgggttaagtcccgcaacgagcgcaacccctatcctcagtagccagcagttcggctgggcactctgtggagactgccagggataacctggaggaaggcggggatgacgtcaaatcatcatgccccttatgatttgggctacacacgtgctacaatggcgtaaacaaagggaagcgaacctgcgagggtgggcaaatcccaaaaataacgtcccagttcggactgtagtctgcaacccgactacacgaagctggaatcgctagtaatcgcggatcagaatgccgcggtgaatacgttcccgggtcttgtacacaccgcccgtcacaccatgggagtcagtaacgcccgaagtcagtgacctaaccgtaaggagggagctgccgaaggcgggaccgatgactggggtgaagtcgtaacaaggtagccgtatcggaaggtgcggctggatcacctccttt

SEQ ID NO: 430 - DNA, 1527 bp, artificial sequence
  >GCF_003461435.1_00848 [Ruminococcus]_bromii
ttagagagtttgatcctggctcaggacgaacgctggcggcgtgcctaacacatgcaagtcgaacggaactgttttgaaagatttcttcggaatgaatttgatttagtttagtggcggacgggtgagtaacgcgtgagtaacctgccttcaagagggggataacattctgaaaagaatgctaataccgcatgacatatcggaaccacatggttctgatatcaaagattttatcgcttgaagatggactcgcgtccgattagttagttggtgaggtaacggctcaccaagaccgcgatcggtagccggactgagaggttgaacggccacattgggactgagacacggcccagactcctacgggaggcagcagtgggggatattgcgcaatgggggcaaccctgacgcagcaacgccgcgtgaaggatgaaggttttcggattgtaaacttcttttattaaggacgaaaattgacggtacttaatgaataagctccggctaactacgtgccagcagccgcggtaatacgtagggagcaagcgttgtccggatttactgggtgtaaagggtgcgtaggcggctttgcaagtcagatgtgaaatctatgggctcaacccataaactgcatttgaaactgtagagcttgagtgaagtagaggcaggcggaattccccgtgtagcggtgaaatgcgtagagatggggaggaacaccagtggcgaaggcggcctgctgggctttaactgacgctgaggcacgaaagcgtgggtagcaaacaggattagataccctggtagtccacgctgtaaacgatgattactaggtgtggggggtctgaccccttccgtgccggagttaacacaataagtaatccacctggggagtacggccgcaaggttgaaactcaaaggaattgacgggggcccgcacaagcagtggagtatgtggtttaattcgaagcaacgcgaagaaccttaccaggtcttgacatccaactaacgaagtagagatacattaggtgcccttcggggaaagttgagacaggtggtgcatggttgtcgtcagctcgtgtcgtgagatgttgggttaagtcccgcaacgagcgcaacccttgctattagttgctacgcaagagcactctaataggactgccgttgacaaaacggaggaaggtggggacgacgtcaaatcatcatgccccttatgacctgggctacacacgtactacaatggatgttaacagagggaagcaagacagcgatgtggagcaaacccctaaaaacattctcagttcagattgcaggctgcaacccgcctgcatgaagatggaattgctagtaatcgcggatcagcatgccgcggtgaatacgttcccgggccttgtacacaccgcccgtcacaccatgggagccggtaatacccgaagtcagtagtccaacctcgtgaggacgctgccgaaggtaggattggcgactggggtgaagtcgtaacaaggtagccgtatcggaaggtgcggctggatcacctccttt

SEQ ID NO: 431 - DNA, 1313 bp, artificial sequence
  >GCF_003461885.1_02072 Blautia_luti_group
gtgaaaaactccggtggtataagatggacccgcgttggattagcttgttggtggggtaacggcccaccaaggcgacgatccatagccggcctgagagggtgaacggccacattgggactgagacacggcccagactcctacgggaggcagcagtggggaatattgcacaatgggggaaaccctgatgcagcgacgccgcgtgaaggaagaagtatctcggtatgtaaacttctatcagcagggaagaaaatgacggtacctgactaagaagccccggctaactacgtgccagcagccgcggtaatacgtagggggcaagcgttatccggatttactgggtgtaaagggagcgtagacggatggacaagtctgatgtgaaaggctggggctcaaccccgggactgcattggaaactgcccgtcttgagtgccggagaggtaagcggaattcctagtgtagcggtgaaatgcgtagatattaggaggaacaccagtggcgaaggcggcttactggacggtaactgacgttgaggctcgaaagcgtggggagcaaacaggattagataccctggtagtccacgcggtaaacgatgaatgctaggtgtcgggtgacaaagtcattcggtgccgccgcaaacgcattaagcattccacctggggagtacgttcgcaagaatgaaactcaaaggaattgacggggacccgcacaagcggtggagcatgtggtttaattcgaagcaacgcgaagaaccttaccaagtcttgacatccctctgaccgactcttaaccgagtcttcccttcggggcagaggagacaggtggtgcatggttgtcgtcagctcgtgtcgtgagatgttgggttaagtcccgcaacgagcgcaacccctatccccagtagccagcatttaaggtgggcactctgaggagactgccagggataacctggaggaaggcggggatgacgtcaaatcatcatgccccttatgatttgggctacacacgtgctacaatggcgtaaacaaagggaagcgaacccgcgagggtgggcaaatcccaaaaataacgtcccagttcggactgtagtctgcaacccgactacacgaagctggaatcgctagtaatcgcggatcagaatgccgcggtgaatacgttcccgggtcttgtacacaccgcccgtcacaccatgggagtcagtaacgcccgaagtcagtgacctaaccgtaaggagggagctgccgaaggcgggaccgatgactggggtgaagtcgtaacaaggtagccgtatcggaaggtgcggctggatcacctccttt

SEQ ID NO: 432 - DNA, 988 bp, artificial sequence
  >GCF_003461925.1_02902 Blautia_luti_group
tcagagagtttgatcctggctcaggatgaacgctggcggcgtgcttaacacatgcaagtcgaacgggaaaccttttattgaagcttcggcagatttaactggtttctagtggcggacgggtgagtaacgcgtgggtaacctgccttgtacagggggataacagtcagaaatgactgctaataccgcataagcgcacaggaccgcatggtccggtgtgaaaaactccggtggtataagatggacccgcgttggattagctagttggcagggtaacggcctaccaaggcgacgatccatagccggcctgagagggtgaacggccacattgggactgagacacggcccagactcctacgggaggcagcagtggggaatattgcacaatgggggaaaccctgatgcagcgacgccgcgtgaaggaagaagtatctcggtatgtaaacttctatcagcagggaagaaaatgacggtacctgactaagaagccccggctaactacgtgccagcagccgcggtaatacgtagggggcaagcgttatccggatttactgggtgtaaagggagcgtagacggatggacaagtctgatgtgaaaggctggggctcaaccccgggactgcattggaaactgcccgtcttgagtgccggagaggtaagcggaattcctagtgtagcggtgaaatgcgtagatattaggaggaacaccagtggcgaaggcggcttactggacggtaactgacgttgaggctcgaaagcgtggggagcaaacaggattagataccctggtagtccacgcggtaaacgatgaatgctaggtgtcgggtgacaaagtcattcggtgccgccgcaaacgcattaagcattccacctggggagtacgttcgcaagaatgaaactcaaaggaattgacggggacccgcacaagcggtggagcatgtggtttaattcgaagcaacgcgaagaaccttaccaagtcttgacatccctct

SEQ ID NO: 433 - DNA, 1527 bp, artificial sequence
  >GCF_003461955.1_02239 Blautia_luti_group
tcagagagtttgatcctggctcaggatgaacgctggcggcgtgcttaacacatgcaagtcgaacgggaaaccttttattgaagcttcggcagatttatctggtttctagtggcggacgggtgagtaacgcgtgggtaacctgccttgtacagggggataacagtcagaaatgactgctaataccgcataagcgcacaggaccgcatggtccggtgtgaaaaactccggtggtataagatggacccgcgttggattagctagttggcagggtaacggcctaccaaggcgacgatccatagccggcctgagagggtgaacggccacattgggactgagacacggcccagactcctacgggaggcagcagtggggaatattgcacaatgggggaaaccctgatgcagcgacgccgcgtgaaggaagaagtatctcggtatgtaaacttctatcagcagggaagaaaatgacggtacctgactaagaagccccggctaactacgtgccagcagccgcggtaatacgtagggggcaagcgttatccggatttactgggtgtaaagggagcgtagacggatggacaagtctgatgtgaaaggctggggctcaaccccgggactgcattggaaactgcccgtcttgagtgccggagaggtaagcggaattcctagtgtagcggtgaaatgcgtagatattaggaggaacaccagtggcgaaggcggcttactggacggtaactgacgttgaggctcgaaagcgtggggagcaaacaggattagataccctggtagtccacgcggtaaacgatgaatgctaggtgtcgggtgacaaagtcattcggtgccgccgcaaacgcattaagcattccacctggggagtacgttcgcaagaatgaaactcaaaggaattgacggggacccgcacaagcggtggagcatgtggtttaattcgaagcaacgcgaagaaccttaccaagtcttgacatccttctgaccggaacttaaccgttcctttccttcggggcagaggagacaggtggtgcatggttgtcgtcagctcgtgtcgtgagatgttgggttaagtcccgcaacgagcgcaacccctatccccagtagccagcatttaaggtgggcactctgaggagactgccagggataacctggaggaaggcggggatgacgtcaaatcatcatgccccttatgatttgggctacacacgtgctacaatggcgtaaacaaagggaagcgaacccgcgagggtgggcaaatcccaaaaataacgtcccagttcggactgtagtctgcaacccgactacacgaagctggaatcgctagtaatcgcggatcagaatgccgcggtgaatacgttcccgggtcttgtacacaccgcccgtcacaccatgggagtcagtaacgcccgaagtcagtgacctaaccgtaaggagggagctgccgaaggcgggaccgatgactggggtgaagtcgtaacaaggtagccgtatcggaaggtgcggctggatcacctccttt

SEQ ID NO: 434 - DNA, 1526 bp, artificial sequence
  >GCF_003461985.1_01224 [Ruminococcus]_bromii
ttagagagtttgatcctggctcaggacgaacgctggcggcgtgcctaacacatgcaagtcgaacggaactgttttgaaagatttcttcggaatgaatttgatttagtttagtggcggacgggtgagtaacgcgtgagtaacctgccttcaagagggggataacattctgaaaagaatgctaataccgcatgatatatcggaaccacatggttttgatatcaaaggttttatcgcttgaagatggactcgcgtccgattagttagttggtgaggtaacggctcaccaagaccgcgatcggtagccggactgagaggttgaacggccacattgggactgagacacggcccagactcctacgggaggcagcagtgggggatattgcgcaatgggggcaaccctgacgcagcaacgccgcgtgaaggatgaaggttttcggattgtaaacttcttttattaaggacgaaacttgacggtacttaatgaataagctccggctaactacgtgccagcagccgcggtaatacgtagggagcaagcgttgtccggatttactgggtgtaaagggtgcgtaggcggctttgcaagtcagatgtgaaatctatgggctcaacccataaactgcatttgaaactgtagagcttgagtgaagtagaggcaggcggaattccccgtgtagcggtgaaatgcgtagagatggggaggaacaccagtggcgaaggcggcctgctgggctttaactgacgctgaggcacgaaagcgtgggtagcaaacaggattagataccctggtagtccacgctgtaaacgatgattactaggtgtggggggtctgaccccttccgtgccggagttaacacaataagtaatccacctggggagtacggccgcaaggttgaaactcaaaggaattgacgggggcccgcacaagcagtggagtatgtggtttaattcgaagcaacgcgaagaaccttaccaggtcttgacatccaactaacgaagtagagatacattaggtgcccttcggggaaagttgagacaggtggtgcatggttgtcgtcagctcgtgtcgtgagatgttgggttaagtcccgcaacgagcgcaacccttgctattagttgctacgcaagagcactctaataggactgccgttgacaaaacggaggaaggtggggacgacgtcaaatcatcatgccccttatgacctgggctacacacgtactacaatggatgttaacagagggaagcaagacagcgatgtggagcaaacccctaaaaacattctcagttcagattgcaggctgcaacccgcctgcatgaagatggaattgctagtaatcgcggatcagcatgccgcggtgaatacgttcccgggccttgtacacaccgcccgtcacaccatgggagccggtaatacccgaagtcagtagtccaacctcgtgaggacgctgccgaaggtaggattggcgactggggtgaagtcgtaacaaggtagccgtatcggaaggtgcggctggatcacctcctt

SEQ ID NO: 435 - DNA, 1527 bp, artificial sequence
  >GCF_003462025.1_01301 [Ruminococcus]_bromii
ttagagagtttgatcctggctcaggacgaacgctggcggcgtgcctaacacatgcaagtcgaacggaactgttttgaaagatttcttcggaatgaatttgatttagtttagtggcggacgggtgagtaacgcgtgagtaacctgccttcaagagggggataacattctgaaaagaatgctaataccgcatgacatatcggaaccacatggctctgatatcaaagattttatcgcttgaagatggactcgcgtccgattagttagttggtgaggtaacggctcaccaagaccgcgatcggtagccggactgagaggttgaacggccacattgggactgagacacggcccagactcctacgggaggcagcagtgggggatattgcgcaatgggggcaaccctgacgcagcaacgccgcgtgaaggatgaaggttttcggattgtaaacttcttttattaaggacgaaaaatgacggtacttaatgaataagctccggctaactacgtgccagcagccgcggtaatacgtagggagcaagcgttgtccggatttactgggtgtaaagggtgcgtaggcggctttgcaagtcagatgtgaaatctatgggctcaacccataaactgcatttgaaactgtagagcttgagtgaagtagaggcaggcggaattccccgtgtagcggtgaaatgcgtagagatggggaggaacaccagtggcgaaggcggcctgctgggctttaactgacgctgaggcacgaaagcgtgggtagcaaacaggattagataccctggtagtccacgctgtaaacgatgattactaggtgtggggggtctgaccccttccgtgccggagttaacacaataagtaatccacctggggagtacggccgcaaggttgaaactcaaaggaattgacgggggcccgcacaagcagtggagtatgtggtttaattcgaagcaacgcgaagaaccttaccaggtcttgacatccaactaacgaagtagagatacattaggtgcccttcggggaaagttgagacaggtggtgcatggttgtcgtcagctcgtgtcgtgagatgttgggttaagtcccgcaacgagcgcaacccttgctattagttgctacgcaagagcactctaataggactgccgttgacaaaacggaggaaggtggggacgacgtcaaatcatcatgccccttatgacctgggctacacacgtactacaatggatgttaacagagggaagcaagacagcgatgtggagcaaacccctaaaaacattctcagttcagattgcaggctgcaacccgcctgcatgaagatggaattgctagtaatcgcggatcagcatgccgcggtgaatacgttcccgggccttgtacacaccgcccgtcacaccatgggagccggtaatacccgaagtcagtagtccaacctcgtgaggacgctgccgaaggtaggattggcgactggggtgaagtcgtaacaaggtagccgtatcggaaggtgcggctggatcacctccttt

SEQ ID NO: 436 - DNA, 1527 bp, artificial sequence
  >GCF_003462185.1_01283 [Ruminococcus]_bromii
ttagagagtttgatcctggctcaggacgaacgctggcggcgtgcctaacacatgcaagtcgaacggaactgttttgaaagatttcttcggaatgaatttgatttagtttagtggcggacgggtgagtaacgcgtgagtaacctgccttcaagagggggataacattctgaaaagaatgctaataccgcatgacatatcggaaccacatgattttgatatcaaagattttatcgcttgaagatggactcgcgtccgattagttagttggtgaggtaacggctcaccaagaccgcgatcggtagccggactgagaggttgaacggccacattgggactgagacacggcccagactcctacgggaggcagcagtgggggatattgcgcaatgggggcaaccctgacgcagcaacgccgcgtgaaggatgaaggttttcggattgtaaacttcttttattaaggacgaaaaatgacggtacttaatgaataagctccggctaactacgtgccagcagccgcggtaatacgtagggagcaagcgttgtccggatttactgggtgtaaagggtgcgtaggcggctttgcaagtcagatgtgaaatctatgggctcaacccataaactgcatttgaaactgtagagcttgagtgaagtagaggcaggcggaattccccgtgtagcggtgaaatgcgtagagatggggaggaacaccagtggcgaaggcggcctgctgggctttaactgacgctgaggcacgaaagcgtgggtagcaaacaggattagataccctggtagtccacgctgtaaacgatgattactaggtgtggggggtctgaccccttccgtgccggagttaacacaataagtaatccacctggggagtacggccgcaaggttgaaactcaaaggaattgacgggggcccgcacaagcagtggagtatgtggtttaattcgaagcaacgcgaagaaccttaccaggtcttgacatccaactaacgaagtagagatacattaggtgcccttcggggaaagttgagacaggtggtgcatggttgtcgtcagctcgtgtcgtgagatgttgggttaagtcccgcaacgagcgcaacccttgctattagttgctacgcaagagcactctaataggactgccgttgacaaaacggaggaaggtggggacgacgtcaaatcatcatgccccttatgacctgggctacacacgtactacaatggatgttaacagagggaagcaagacagcgatgtggagcaaacccctaaaaacattctcagttcagattgtaggctgcaacccgcctgcatgaagatggaattgctagtaatcgcggatcagcatgccgcggtgaatacgttcccgggccttgtacacaccgcccgtcacaccatgggagccggtaatacccgaagtcagtagtccaacctcgtgaggacgctgccgaaggtaggattggcgactggggtgaagtcgtaacaaggtagccgtatcggaaggtgcggctggatcacctccttt

SEQ ID NO: 437 - DNA, 882 bp, artificial sequence
  >GCF_003462425.1_02746 Blautia_luti_group
agtggcggacgggtgagtaacgcgtgggtaacctgccttgtacagggggataacagtcagaaatgactgctaataccgcataagcgcacaggaccgcatggtccggtgtgaaaaactccggtggtataagatggacccgcgttggattagctagttggcagggtaacggcctaccaaggcgacgatccatagccggcctgagagggtgaacggccacattgggactgagacacggcccagactcctacgggaggcagcagtggggaatattgcacaatgggggaaaccctgatgcagcgacgccgcgtgaaggaagaagtatctcggtatgtaaacttctatcagcagggaagaattaggacggtacctgactaagaagccccggctaactacgtgccagcagccgcggtaatacgtagggggcaagcgttatccggatttactgggtgtaaagggagcgtagacggatggacaagtctgatgtgaaaggctggggctcaaccccgggactgcattggaaactgcccgtcttgagtgccggagaggtaagcggaattcctagtgtagcggtgaaatgcgtagatattaggaggaacaccagtggcgaaggcggcttactggacggtaactgacgttgaggctcgaaagcgtggggagcaaacaggattagataccctggtagtccacgcggtaaacgatgaatgctaggtgtcgggtgacaaagtcattcggtgccgccgcaaacgcattaagcattccacctggggagtacgttcgcaagaatgaaactcaaaggaattgacggggacccgcacaagcggtggagcatgtggtttaattcgaagcaacgcgaagaaccttaccaagtcttgacatccctct

SEQ ID NO: 438 - DNA, 1519 bp, artificial sequence
  >GCF_003463015.1_02869 Bacteroides_intestinalis
atgaagagtttgatcctggctcaggatgaacgctagctacaggcttaacacatgcaagtcgaggggcagcatgacctagcaataggttgatggcgaccggcgcacgggtgagtaacacgtatccaacctgccgattattccgggatagcctttcgaaagaaagattaatactggatagcataacgagaaggcatcttcttgttattaaagaatttcgataatcgatggggatgcgttccattagtttgttggcggggtaacggcccaccaagacatcgatggataggggttctgagaggaaggtcccccacattggaactgagacacggtccaaactcctacgggaggcagcagtgaggaatattggtcaatggacgagagtctgaaccagccaagtagcgtgaaggatgactgccctatgggttgtaaacttcttttatatgggaataaagtgggccacgtgtggctttttgtatgtaccatacgaataaggatcggctaactccgtgccagcagccgcggtaatacggaggatccgagcgttatccggatttattgggtttaaagggagcgtaggcggattattaagtcagttgtgaaagtttgcggctcaaccgtaaaattgcagttgatactggtagtcttgagtgcagcagaggtaggcggaattcgtggtgtagcggtgaaatgcttagatatcacgaagaactccgattgcgaaggcagcttactggactgtaactgacgctgatgctcgaaagtgtgggtatcaaacaggattagataccctggtagtccacacagtaaacgatgaatactcgctgtttgcgatatacggcaagcggccaagcgaaagcattaagtattccacctggggagtacgccggcaacggtgaaactcaaaggaattgacgggggcccgcacaagcggaggaacatgtggtttaattcgatgatacgcgaggaaccttacccgggcttaaattgcaactgacggatttggaaacagatcttccttcgggcagttgtgaaggtgctgcatggttgtcgtcagctcgtgccgtgaggtgtcggcttaagtgccataacgagcgcaacccttatctttagttactaacaggtcatgctgaggactctagagagactgccgtcgtaagatgtgaggaaggtggggatgacgtcaaatcagcacggcccttacgtccggggctacacacgtgttacaatggggggtacagaaggcagctacacagcgatgtgatgctaatcccaaaagcctctctcagttcggattggagtctgcaacccgactccatgaagctggattcgctagtaatcgcgcatcagccacggcgcggtgaatacgttcccgggccttgtacacaccgcccgtcaagccatgaaagccgggggtacctgaagtacgtaaccgcaaggagcgtcctagggtaaaactggtaattggggctaagtcgtaacaaggtagccgtaccggaaggtgcggctggaacacctcctt

SEQ ID NO: 439 - DNA, 1526 bp, artificial sequence
  >GCF_003463575.1_01639 [Ruminococcus]_bromii
ttagagagtttgatcctggctcaggacgaacgctggcggcgtgcctaacacatgcaagtcgaacggaactgttttgaaagatttcttcggaatgaatttgatttagtttagtggcggacgggtgagtaacgcgtgagtaacctgccttcaagagggggataacattctgaaaagaatgctaataccgcatgacatatcggaaccacatggttctgatatcaaagattttatcgcttgaagatggactcgcgtccgattagttagttggtgaggtaacggctcaccaagaccgcgatcggtagccggactgagaggttgaacggccacattgggactgagacacggcccagactcctacgggaggcagcagtgggggatattgcgcaatgggggcaaccctgacgcagcaacgccgcgtgaaggatgaaggttttcggattgtaaacttcttttattaaggacgaaacttgacggtacttaatgaatagctccggctaactacgtgccagcagccgcggtaatacgtagggagcaagcgttgtccggatttactgggtgtaaagggtgcgtaggcggctttgcaagtcagatgtgaaatctatgggctcaacccataaactgcatttgaaactgtagagcttgagtgaagtagaggcaggcggaattccccgtgtagcggtgaaatgcgtagagatggggaggaacaccagtggcgaaggcggcctgctgggctttaactgacgctgaggcacgaaagcgtgggtagcaaacaggattagataccctggtagtccacgctgtaaacgatgattactaggtgtggggggtctgaccccttccgtgccggagttaacacaataagtaatccacctggggagtacggccgcaaggttgaaactcaaaggaattgacgggggcccgcacaagcagtggagtatgtggtttaattcgaagcaacgcgaagaaccttaccaggtcttgacatccaactaacgaagtagagatacattaggtgcccttcggggaaagttgagacaggtggtgcatggttgtcgtcagctcgtgtcgtgagatgttgggttaagtcccgcaacgagcgcaacccttgctattagttgctacgcaagagcactctaataggactgccgttgacaaaacggaggaaggtggggacgacgtcaaatcatcatgccccttatgacctgggctacacacgtactacaatggatgttaacagagggaagcaagacagcgatgtggagcaaacccctaaaaacattctcagttcagattgcaggctgcaacccgcctgcatgaagatggaattgctagtaatcgcggatcagcatgccgcggtgaatacgttcccgggccttgtacacaccgcccgtcacaccatgggagccggtaatacccgaagtcagtagtccaacctcgtgaggacgctgccgaaggtaggattggcgactggggtgaagtcgtaacaaggtagccgtatcggaaggtgcggctggatcacctccttt

SEQ ID NO: 440 - DNA, 1527 bp, artificial sequence
  >GCF_003464045.1_02472 Lachnospiraceae_NG30_sp3
tacgagagtttgatcctggctcaggatgaacgctggcggcgtgcttaacacatgcaagtcgaacgaagcacttaagtttgattcttcggatgaagacttttgtgactgagtggcggacgggtgagtaacgcgtgggtaacctgcctcatacagggggataacagttagaaatgactgctaataccgcataagaccacagcaccgcatggtgcaggggtaaaaactccggtggtatgagatggacccgcgtctgattagctggttggtggggtaacggcctaccaagcgacgatcagtagccgacctgagagggtgaccggccacattgggactgagacacggcccaaactcctacgggaggcagcagtggggaatattgcacaatgggggaaaccctgatgcagcgacgccgcgtgaaggatgaagtatttcggtatgtaaacttctatcagcagggaagaaaatgacggtacctgactaagaagccccggctaactacgtgccagcagccgcggtaatacgtagggggcaagcgttatccggatttactgggtgtaaagggagcgtagacggtatggcaagtctgatgtgaaaggccagggctcaaccctgggactgcattggaaactgtcgaactagagtgtcggagaggcaagtggaattcctagtgtagcggtgaaatgcgtagatattaggaggaacaccagtggcgaaggcggcttgctggacgatgactgacgttgaggctcgaaagcgtggggagcaaacaggattagataccctggtagtccacgccgtaaacgatgactactaggtgtcgggtagcagagctattcggtgccgcagccaacgcaataagtagtccacctggggagtacgttcgcaagaatgaaactcaaaggaattgacggggacccgcacaagcggtggagcatgtggtttaattcgaagcaacgcgaagaaccttacctgctcttgacatctccctgaccggcaagtaatgttgcctttccttcgggacagggatgacaggtggtgcatggttgtcgtcagctcgtgtcgtgagatgttgggttaagtcccgcaacgagcgcaacccctatctttagtagccagcggttcggccgggcactctagagagactgccagggataacctggaggaaggtggggatgacgtcaaatcatcatgccccttatgagcagggctacacacgtgctacaatggcgtaaacaaagggaagcgagcctgcgagggtaagcaaatctcaaaaataacgtctcagttcggattgtagtctgcaactcgactacatgaagctggaatcgctagtaatcgcgaatcagaatgtcgcggtgaatacgttcccgggtcttgtacacaccgcccgtcacaccatgggagttggtaacgcccgaagtcagtgacccaaccgcaaggagggagctgccgaaggtgggaccgataactggggtgaagtcgtaacaaggtagccgtatcggaaggtgcggctggatcacctccttt

SEQ ID NO: 441 - DNA, 1526 bp, artificial sequence
  >GCF_003466165.1_00922 [Ruminococcus]_bromii
ttagagagtttgatcctggctcaggacgaacgctggcggcgtgcctaacacatgcaagtcgaacggaactgttttgaaagatttcttcggaatgaatttgatttagtttagtggcggacgggtgagtaacgcgtgagtaacctgccttcaagagggggataacattctgaaaagaatgctaataccgcatgatatatcggaatcacatgattttgatatcaaagattttatcgcttgaagatggactcgcgtccgattagttagttggtgaggtaacggctcaccaagactgcgatcggtagccggactgagaggttgaacggccacattgggactgagacacggcccagactcctacgggaggcagcagtgggggatattgcgcaatgggggcaaccctgacgcagcaacgccgcgtgaaggatgaaggttttcggattgtaaacttcttttattaaggacgaaacttgacggtacttaatgaataagctccggctaactacgtgccagcagccgcggtaatacgtagggagcaagcgttgtccggatttactgggtgtaaagggtgcgtaggcggctttgcaagtcagatgtgaaatctatgggctcaacccataaactgcatttgaaactgtagagcttgagtgaagtagaggcaggcggaattccccgtgtagcggtgaaatgcgtagagatggggaggaacaccagtggcgaaggcggcctgctgggctttaactgacgctgaggcacgaaagcgtgggtagcaaacaggattagataccctggtagtccacgctgtaaacgatgattactaggtgtggggggtctgaccccttccgtgccggagttaacacaataagtaatccacctggggagtacggccgcaaggttgaaactcaaaggaattgacgggggcccgcacaagcagtggagtatgtggtttaattcgaagcaacgcgaagaaccttaccaggtcttgacatccaactaacgaagtagagatacattaggtgcccttcggggaaagttgagacaggtggtgcatggttgtcgtcagctcgtgtcgtgagatgttgggttaagtcccgcaacgagcgcaacccttgctattagttgctacgcaagagcactctaataggactgccgttgacaaaacggaggaaggtggggacgacgtcaaatcatcatgccccttatgacctgggctacacacgtactacaatggatgttaacagagggaagcaagacagcgatgtggagcaaacccctaaaaacattctcagttcagattgcaggctgcaacccgcctgcatgaagatggaattgctagtaatcgcggatcagcatgccgcggtgaatacgttcccgggccttgtacacaccgcccgtcacaccatgggagccggtaatacccgaagtcagtagtccaacctcgtgaggacgctgccgaaggtaggattggcgactggggtgaagtcgtaacaaggtagccgtatcggaaggtgcggctggatcacctcctt

SEQ ID NO: 442 - DNA, 1519 bp, artificial sequence
  >GCF_003467005.1_04366 Bacteroides_intestinalis
atgaagagtttgatcctggctcaggatgaacgctagctacaggcttaacacatgcaagtcgaggggcagcatgacctagcaataggttgatggcgaccggcgcacgggtgagtaacacgtatccaacctgccgattattccgggatagcctttcgaaagaaagattaatactggatagcataacgaaaaggcatctttttgttattaaagaatttcgataatcgatggggatgcgttccattagcttgttggcggggtaacggcccaccaaggcatcgatggataggggttctgagaggaaggtcccccacattggaactgagacacggtccaaactcctacgggaggcagcagtgaggaatattggtcaatggacgagagtctgaaccagccaagtagcgtgaaggatgactgccctatgggttgtaaacttcttttatatgggaataaagtgagccacgtgtggctttttgtatgtaccatacgaataaggatcggctaactccgtgccagcagccgcggtaatacggaggatccaagcgttatccggatttattgggtttaaagggagcgtaggcggaagcttaagtcagttgtgaaagtttgcggctcaaccgtaaaattgcagttgatactgggtttcttgagtgcagtagaggtaggcggaattcgtggtgtagcggtgaaatgcttagatatcacgaagaactccgattgcgaaggcagcttactggactgtaactgacgctgatgctcgaaagtgtgggtatcaaacaggattagataccctggtagtccacacagtaaacgatgaatactcgctgtttgcgatatacagcaagcggccaagcgaaagcattaagtattccacctggggagtacgccggcaacggtgaaactcaaaggaattgacgggggcccgcacaagcggaggaacatgtggtttaattcgatgatacgcgaggaaccttacccgggcttaaattgcatttgaatatagttgaaagattatagccgtaaggcaaatgtgaaggtgctgcatggttgtcgtcagctcgtgccgtgaggtgtcggcttaagtgccataacgagcgcaacccttatctttagttactaacaggtgatgctgaggactctagagagactgccgtcgtaagatgtgaggaaggtggggatgacgtcaaatcagcacggcccttacgtccggggctacacacgtgttacaatggggggtacagaaggcagctacacagcgatgtgatgctaatcccaaaagcctctctcagttcggattggagtctgcaacccgactccatgaagctggattcgctagtaatcgcgcatcagccacggcgcggtgaatacgttcccgggccttgtacacaccgcccgtcaagccatgaaagccgggggtacctgaagtacgtaaccgcaaggagcgtcctagggtaaaactggtaattggggctaagtcgtaacaaggtagccgtaccggaaggtgcggctggaacacctcctt

SEQ ID NO: 443 - DNA, 1546 bp, artificial sequence
  >GCF_003468585.1_01367 Streptococcus_parasanguinis
taatgagagtttgatcctggctcaggatgaacgctggcggcgtgcctaatacatgcaagtagaacgctgaagcttggtgcttgcaccgagcggatgagttgcgaacgggtgagtaacgcgtaggtaacctgcctcttagcgggggataactattggaaacgatagctaataccgcataaaagtcgatatcgcatgatgttgacttgaaaggtgcaattgcatcactaagagatggacctgcgttgtattagctagttggtgaggtaacggctcaccaaggcgacgatacatagccgacctgagagggtgatcggccacactgggactgagacacggcccagactcctacgggaggcagcagtagggaatcttcggcaatgggggcaaccctgaccgagcaacgccgcgtgagtgaagaaggttttcggatcgtaaagctctgttgtaagagaagaaagagtgtgagagtggaaagttcacactgtgacggtaacttaccagaaagggacggctaactacgtgccagcagccgcggtaatacgtaggtcccgagcgttatccggatttattgggcgtaaagcgagcgcaggcggttagataagtctgaagttaaaggctgtggcttaaccatagtacgctttggaaactgtttaacttgagtgcagaaggggagagtggaattccatgtgtagcggtgaaatgcgtagatatatggaggaacaccggtggcgaaagcggctctctggtctgtaactgacgctgaggctcgaaagcgtggggagcaaacaggattagataccctggtagtccacgccgtaaacgatgagtgctaggtgttgggtcctttccgggactcagtgccgcagctaacgcattaagcactccgcctggggagtacgaccgcaaggttgaaactcaaaggaattgacgggggcccgcacaagcggtggagcatgtggtttaattcgaagcaacgcgaagaaccttaccaggtcttgacatccctctgaccgctctagagatagagttttccttcgggacagaggtgacaggtggtgcatggttgtcgtcagctcgtgtcgtgagatgttgggttaagtcccgcaacgagcgcaacccctattgttagttgccatcattgagttgggcactctagcgagactgccggtaataaaccggaggaaggtggggatgacgtcaaatcatcatgccccttatgacctgggctacacacgtgctacaatggctggtacaacgagtcgcgagtcggtgacggcaagctaatctcttaaagccagtctcagttcggattgtaggctgcaactcgcctacatgaagtcggaatcgctagtaatcgcggatcagcacgccgcggtgaatacgttcccgggccttgtacacaccgcccgtcacaccacgagagtttgtaacacccgaagtcggtgaggtaaccgtaaggagccagccgcctaaggtgggatagatgattggggtgaagtcgtaacaaggtagccgtatcggaaggtgcggctggatcacctccttt

SEQ ID NO: 444 - DNA, 1557 bp, artificial sequence
  >GCF_003469265.1_02001 [Ruminococcus]_bromii
  misc_feature (235)..(244): n is a, c, g, or t
ttagagagtttgatcctggctcaggacgaacgctggcggcgtgcctaacacatgcaagtcgaacggaactgttttgaaagatttcttcggaatgaatttgatttagtttagtggcggacgggtgagtaacgcgtgagtaacctgccttcaagagggggataacattctgaaaagaatgctaataccgcatgacatatcggaatcacatgattctgatatcaaagattttatcgcnnnnnnnnnntgatatcaaagattttatcgcttgaagatggactcgcgtccgattagttagttggtgaggtaacggctcaccaagaccgcgatcggtagccggactgagaggttgaacggccacattgggactgagacacggcccagactcctacgggaggcagcagtgggggatattgcgcaatgggggcaaccctgacgcagcaacgccgcgtgaaggatgaaggttttcggattgtaaacttcttttattaaggacgaaaaatgacggtacttaatgaataagctccggctaactacgtgccagcagccgcggtaatacgtagggagcaagcgttgtccggatttactgggtgtaaagggtgcgtaggcggctttgcaagtcagatgtgaaatctatgggctcaacccataaactgcatttgaaactgtagagcttgagtgaagtagaggcaggcggaattccccgtgtagcggtgaaatgcgtagagatggggaggaacaccagtggcgaaggcggcctgctgggctttaactgacgctgaggcacgaaagcgtgggtagcaaacaggattagataccctggtagtccacgctgtaaacgatgattactaggtgtggggggtctgaccccttccgtgccggagttaacacaataagtaatccacctggggagtacggccgcaaggttgaaactcaaaggaattgacgggggcccgcacaagcagtggagtatgtggtttaattcgaagcaacgcgaagaaccttaccaggtcttgacatccaactaacgaagtagagatacattaggtgcccttcggggaaagttgagacaggtggtgcatggttgtcgtcagctcgtgtcgtgagatgttgggttaagtcccgcaacgagcgcaacccttgctattagttgctacgcaagagcactctaataggactgccgttgacaaaacggaggaaggtggggacgacgtcaaatcatcatgccccttatgacctgggctacacacgtactacaatggatgtaaacagagggaagcaagacagcgatgtggagcaaacccctaaaaacattctcagttcagattgcaggctgcaacccgcctgcatgaagatggaattgctagtaatcgcggatcagcatgccgcggtgaatacgttcccgggccttgtacacaccgcccgtcacaccatgggagccggtaatacccgaagtcagtagtccaacctcgtgaggacgctgccgaaggtaggattggcgactggggtgaagtcgtaacaaggtagccgtatcggaaggtgcggctggatcacctcctt

SEQ ID NO: 445 - DNA, 1519 bp, artificial sequence
  >GCF_003470025.1_03291 Bacteroides_intestinalis
atgaagagtttgatcctggctcaggatgaacgctagctacaggcttaacacatgcaagtcgaggggcagcatgacctagcaataggttgatggcgaccggcgcacgggtgagtaacacgtatccaacctgccgattattccgggatagcctttcgaaagaaagattaatactggatagtataacgaaaaggcatctttttgttattaaagaatttcgataatcgatggggatgcgttccattagcttgttggcggggtaacggcccaccaaggcatcgatggataggggttctgagaggaaggtcccccacattggaactgagacacggtccaaactcctacgggaggcagcagtgaggaatattggtcaatggacgagagtctgaaccagccaagtagcgtgaaggatgactgccctatgggttgtaaacttcttttatatgggaataaagtgagccacgtgtggctttttgtatgtaccatacgaataaggatcggctaactccgtgccagcagccgcggtaatacggaggatccaagcgttatccggatttattgggtttaaagggagcgtaggcggactattaagtcagctgtgaaagtttgcggctcaaccgtaaaattgcagttgatactggtcgtcttgagtgcagtagaggtaggcggaattcgtggtgtagcggtgaaatgcttagatatcacgaagaactccgattgcgaaggcagcttactggactgtaactgacgctgatgctcgaaagtgtgggtatcaaacaggattagataccctggtagtccacacagtaaacgatgaatactcgctgtttgcgatatacagcaagcggccaagcgaaagcattaagtattccacctggggagtacgccggcaacggtgaaactcaaaggaattgacgggggcccgcacaagcggaggaacatgtggtttaattcgatgatacgcgaggaaccttacccgggcttaaattgcatttgaataacttggaaacaggttagccgtaaggcaaatgtgaaggtgctgcatggttgtcgtcagctcgtgccgtgaggtgtcggcttaagtgccataacgagcgcaacccttatctttagttactaacaggttatgctgaggactctagagagactgccgtcgtaagatgtgaggaaggtggggatgacgtcaaatcagcacggcccttacgtccggggctacacacgtgttacaatggggggtacagaaggcagctacacagcgatgtgatgctaatcccaaaagcctctctcagttcggattggagtctgcaacccgactccatgaagctggattcgctagtaatcgcgcatcagccacggcgcggtgaatacgttcccgggccttgtacacaccgcccgtcaagccatgaaagccgggggtacctgaagtacgtaaccggaaggagcgtcctagggtaaaactggtaattggggctaagtcgtaacaaggtagccgtaccggaaggtgcggctggaacacctcctt

SEQ ID NO: 446 - DNA, 1554 bp, artificial sequence
  >GCF_003470265.1_02290 [Ruminococcus]_gnavus
  misc_feature (230)..(239): n is a, c, g, or t
aacgagagtttgatcctggctcaggatgaacgctggcggcgtgcttaacacatgcaagtcgagcgaagcgcttttgcggatttcttcggattgaagcaattgtgactgagcggcggacgggtgagtaacgcgtgggtaacctgcctcatacagggggataacagttggaaacggctgctaataccgcataagcgcacagtaccgcatggtaccgtgtgaaaaactccggnnnnnnnnnngtgtgaaaaactccggtggtatgagatggacccgcgtctgattaggtagttggtggggtaacggcctaccaagccgacgatcagtagccgacctgagagggtgaccggccacattgggactgagacacggcccaaactcctacgggaggcagcagtggggaatattgcacaatgggggaaaccctgatgcagcgacgccgcgtgagcgatgaagtatttcggtatgtaaagctctatcagcagggaagaaaatgacggtacctgactaagaagccccggctaactacgtgccagcagccgcggtaatacgtagggggcaagcgttatccggatttactgggtgtaaagggagcgtagacggcatggcaagccagatgtgaaagcccggggctcaaccccgggactgcatttggaactgtcaggctagagtgtcggagaggaaagcggaattcctagtgtagcggtgaaatgcgtagatattaggaggaacaccagtggcgaaggcggctttctggacgatgactgacgttgaggctcgaaagcgtggggagcaaacaggattagataccctggtagtccacgccgtaaacgatgaatactaggtgtcgggtggcaaagccattcggtgccgcagcaaacgcaataagtattccacctggggagtacgttcgcaagaatgaaactcaaaggaattgacggggacccgcacaagcggtggagcatgtggtttaattcgaagcaacgcgaagaaccttacctggtcttgacatccctctgaccgctctttaatcggagctttccttcgggacagaggagacaggtggtgcatggttgtcgtcagctcgtgtcgtgagatgttgggttaagtcccgcaacgagcgcaacccctatctttagtagccagcatttaaggtgggcactctagagagactgccagggataacctggaggaaggtggggatgacgtcaaatcatcatgccccttatgaccagggctacacacgtgctacaatggcgtaaacaaagggaagcgagcccgcgagggggagcaaatcccaaaaataacgtctcagttcggattgtagtctgcaactcgactacatgaagctggaatcgctagtaatcgcgaatcagaatgtcgcggtgaatacgttcccgggtcttgtacacaccgcccgtcacaccatgggagtcagtaacgcccgaagtcagtgacccaaccgtaaggagggagctgccgaaggtgggaccgataactggggtgaagtcgtaacaaggtagccgtatcggaaggtgcggctggatcacctccttt

SEQ ID NO: 447 - DNA, 1544 bp, artificial sequence
  >GCF_003470855.1_01918 Streptococcus_parasanguinis
aatgagagtttgatcctggctcaggatgaacgctggcggcgtgcctaatacatgcaagtagaacgctgaagcttggtgcttgcaccgagcggatgagttgcgaacgggtgagtaacgcgtaggtaacctgcctcttagcgggggataactattggaaacgatagctaataccgcataaaagtcgatatcgcatgatattgatttgaaaggtgcaattgcatcactaagagatggacctgcgttgtattagctagttggtgaggtaacggctcaccaaggcgacgatacatagccgacctgagagggtgatcggccacactgggactgagacacggcccagactcctacgggaggcagcagtagggaatcttcggcaatgggggcaaccctgaccgagcaacgccgcgtgagtgaagaaggttttcggatcgtaaagctctgttgtaagagaagaacgagtgtgagagtggaaagttcacactgtgacggtaacttaccagaaagggacggctaactacgtgccagcagccgcggtaatacgtaggtcccgagcgttatccggatttattgggcgtaaagcgagcgcaggcggttagataagtctgaagttaaaggctgtggcttaaccatagtacgctttggaaactgtttaacttgagtgcagaaggggagagtggaattccatgtgtagcggtgaaatgcgtagatatatggaggaacaccggtggcgaaagcggctctctggtctgtaactgacgctgaggctcgaaagcgtggggagcaaacaggattagataccctggtagtccacgccgtaaacgatgagtgctaggtgttgggtcctttccgggactcagtgccgcagctaacgcattaagcactccgcctggggagtacgaccgcaaggttgaaactcaaaggaattgacgggggcccgcacaagcggtggagcatgtggtttaattcgaagcaacgcgaagaaccttaccaggtcttgacatccctctgaccgctctagagatagagttttccttcgggacagaggtgacaggtggtgcatggttgtcgtcagctcgtgtcgtgagatgttgggttaagtcccgcaacgagcgcaacccctattgttagttgccatcattcagttgggcactctagcgagactgccggtaataaaccggaggaaggtggggatgacgtcaaatcatcatgccccttatgacctgggctacacacgtgctacaatggctggtacaacgagtcgcgagtcggtgacggcaagctaatctcttaaagccagtctcagttcggattgtaggctgcaactcgcctacatgaagtcggaatcgctagtaatcgcggatcagcacgccgcggtgaatacgttcccgggccttgtacacaccgcccgtcacaccacgagagtttgtaacacccgaagtcggtgaggtaaccttttggagccagccgcctaaggtgggatagatgattggggtgaagtcgtaacaaggtagccgtatcggaaggtgcggctggatcacctcctt

SEQ ID NO: 448 - DNA, 1528 bp, artificial sequence
  >GCF_003471005.1_01870 [Ruminococcus]_gnavus
aacgagagtttgatcctggctcaggatgaacgctggcggcgtgcttaacacatgcaagtcgagcgaagcaccttgacggatttcttcggattgaagccttggtgactgagcggcggacgggtgagtaacgcgtgggtaacctgcctcatacagggggataacagttggaaacggctgctaataccgcataagcgcacagtaccgcatggtacggtgtgaaaaactccggtggtatgagatggacccgcgtctgattaggtagttggtggggtaacggcctaccaagccgacgatcagtagccgacctgagagggtgaccggccacattgggactgagacacggcccaaactcctacgggaggcagcagtggggaatattgcacaatgggggaaaccctgatgcagcgacgccgcgtgagcgatgaagtatttcggtatgtaaagctctatcagcagggaagaaaatgacggtacctgactaagaagccccggctaactacgtgccagcagccgcggtaatacgtagggggcaagcgttatccggatttactgggtgtaaagggagcgtagacggcatggcaagccagatgtgaaagcccggggctcaaccccgggactgcatttggaactgtcaggctagagtgtcggagaggaaagcggaattcctagtgtagcggtgaaatgcgtagatattaggaggaacaccagtggcgaaggcggctttctggacgatgactgacgttgaggctcgaaagcgtggggagcaaacaggattagataccctggtagtccacgccgtaaacgatgaatactaggtgtcgggtggcaaagccattcggtgccgcagcaaacgcaataagtattccacctggggagtacgttcgcaagaatgaaactcaaaggaattgacggggacccgcacaagcggtggagcatgtggtttaattcgaagcaacgcgaagaaccttacctggtcttgacatccctctgaccgctctttaatcggagctttccttcgggacagaggagacaggtggtgcatggttgtcgtcagctcgtgtcgtgagatgttgggttaagtcccgcaacgagcgcaacccctatctttagtagccagcattttggatgggcactctagagagactgccagggataacctggaggaaggtggggatgacgtcaaatcatcatgccccttatgaccagggctacacacgtgctacaatggcgtaaacaaagggaagcgagcccgcgagggggagcaaatcccaaaaataacgtctcagttcggattgtagtctgcaactcgactacatgaagctggaatcgctagtaatcgcgaatcagaatgtcgcggtgaatacgttcccgggtcttgtacacaccgcccgtcacaccatgggagtcagtaacgcccgaagtcagtgacccaaccgcaaggagggagctgccgaaggtgggaccgataactggggtgaagtcgtaacaaggtagccgtatcggaaggtgcggctggatcacctccttt

SEQ ID NO: 449 - DNA, 1519 bp, artificial sequence
  >GCF_003471885.1_03116 Bacteroides_intestinalis
atgaagagtttgatcctggctcaggatgaacgctagctacaggcttaacacatgcaagtcgaggggcagcatgacctagcaataggttgatggcgaccggcgcacgggtgagtaacacgtatccaacctgccgattattccgggatagcctttcgaaagaaagattaatactggatagcataacgagaaggcatcttcttgttattaaagaatttcgataatcgatggggatgcgttccattagtttgttggcggggtaacggcccaccaagacatcgatggataggggttctgagaggaaggtcccccacattggaactgagacacggtccaaactcctacgggaggcagcagtgaggaatattggtcaatggacgagagtctgaaccagccaagtagcgtgaaggatgactgccctatgggttgtaaacttcttttatatgggaataaagtgcagtatgtatactgttttgtatgtaccatacgaataaggatcggctaactccgtgccagcagccgcggtaatacggaggatccgagcgttatccggatttattgggtttaaagggagcgtaggcggattattaagtcagttgtgaaagtttgcggctcaaccgtaaaattgcagttgatactggtagtcttgagtgcagcagaggtaggcggaattcgtggtgtagcggtgaaatgcttagatatcacgaagaactccgattgcgaaggcagcttactggactgtaactgacgctgatgctcgaaagtgtgggtatcaaacaggattagataccctggtagtccacacagtaaacgatgaatactcgctgtttgcgatatacggcaagcggccaagcgaaagcattaagtattccacctggggagtacgccggcaacggtgaaactcaaaggaattgacgggggcccgcacaagcggaggaacatgtggtttaattcgatgatacgcgaggaaccttacccgggcttaaattgcaactgacggatttggaaacagatcttccttcgggcagttgtgaaggtgctgcatggttgtcgtcagctcgtgccgtgaggtgtcggcttaagtgccataacgagcgcaacccttatctttagttactaacaggtcatgctgaggactctagagagactgccgtcgtaagatgtgaggaaggtggggatgacgtcaaatcagcacggcccttacgtccggggctacacacgtgttacaatggggggtacagaaggcagctacacagcgatgtgatgctaatcccaaaagcctctctcagttcggattggagtctgcaacccgactccatgaagctggattcgctagtaatcgcgcatcagccacggcgcggtgaatacgttcccgggccttgtacacaccgcccgtcaagccatgaaagccgggggtacctgaagtacgtaaccgcaaggagcgtcctagggtaaaactggtaattggggctaagtcgtaacaaggtagccgtaccggaaggtgcggctggaacacctcctt

SEQ ID NO: 450 - DNA, 1519 bp, artificial sequence
  >GCF_003472935.1_03151 Bacteroides_intestinalis
atgaagagtttgatcctggctcaggatgaacgctagctacaggcttaacacatgcaagtcgaggggcagcatgacctagcaataggttgatggcgaccggcgcacgggtgagtaacacgtatccaacctgccgattattccgggatagcctttcgaaagaaagattaatactggatagcataacgagaaggcatcttcttgttattaaagaatttcgataatcgatggggatgcgttccattagtttgttggcggggtaacggcccaccaagacatcgatggataggggttctgagaggaaggtcccccacattggaactgagacacggtccaaactcctacgggaggcagcagtgaggaatattggtcaatggacgagagtctgaaccagccaagtagcgtgaaggatgactgccctatgggttgtaaacttcttttgtatgggaataaagtgagccacgtgtggctttttgtatgtaccatacgaataaggatcggctaactccgtgccagcagccgcggtaatacggaggatccaagcgttatccggatttattgggtttaaagggagcgtaggcggattattaagtcagttgtgaaagtttgcggctcaaccgtaaaattgcagttgatactggtagtcttgagtgcagcagaggtaggcggaattcgtggtgtagcggtgaaatgcttagatatcacgaagaactccgattgcgaaggcagcttactggactgtaactgacgctgatgctcgaaagtgtgggtatcaaacaggattagataccctggtagtccacacagtaaacgatgaatactcgctgtttgcgatatacagcaagcggccaagcgaaagcattaagtattccacctggggagtacgccggcaacggtgaaactcaaaggaattgacgggggcccgcacaagcggaggaacatgtggtttaattcgatgatacgcgaggaaccttacccgggcttaaattgcaactgacggatttggaaacagatcttccttcgggcagttgtgaaggtgctgcatggttgtcgtcagctcgtgccgtgaggtgtcggcttaagtgccataacgagcgcaacccttatctttagttactaacaggtcatgctgaggactctagagagactgccgtcgtaagatgtgaggaaggtggggatgacgtcaaatcagcacggcccttacgtccggggctacacacgtgttacaatggggggtacagaaggcagctacacagcgatgtgatgctaatcccaaaagcctctctcagttcggattggagtctgcaacccgactccatgaagctggattcgctagtaatcgcgcatcagccacggcgcggtgaatacgttcccgggccttgtacacaccgcccgtcaagccatgaaagccgggggtacctgaagtacgtaaccgcaaggagcgtcctagggtaaaactggtaattggggctaagtcgtaacaaggtagccgtaccggaaggtgcggctggaacacctcctt

SEQ ID NO: 451 - DNA, 1249 bp, artificial sequence
  >GCF_003473085.1_04313 Bacteroides_dorei_group
  misc_feature (1248)..(1249): n is a, c, g, or t
atgaagagtttgatcctggctcaggatgaacgctagctacaggcttaacacatgcacgtcgaggggcagcatggtcttagcttgctaaggccgatggcgaccggcgcacgggggagtaacacgtatccaacctgccgtctactcttggacagccttctgaaaggaagattaatacaagatggcatcatgagtccacatgttcacatgattaaaggtattccggtagacgatggggatgcgttccattagatagtaggcggggtaacggcccacctagtcttcgatggataggggttctgagaggaaggtcccccacattggaactgagacacggtccaaactcctacgggaggcagcagtgaggaatattggtcaatgggcgagagcctgaaccagccaagtagcgtgaaggatgactgccctatgggttgtaaacttcttttataaaggaataaagtcgggtatgcatacccgtttgcatgtactttatgaataaggatcggctaactccgtgccagcagccgcggtaatacggaggatccgagcgttatccggatttattgggtttaaagggagcgtagatggatgtttaagtcagttgtgaaagtttgcggctcaaccgtaaaattgcagttgatactggatatcttcagtgcagttgaggcaggcggaattcgtggtgtagcggtgaaatgcttagatatcacgaagaactccgattgcgaaggcagcctgctaatctgcgactgacattgaggctcgaaagtgtgggtatcaaacaggattagataccctggtagtccacacggtaaacgatgaatactcgctgtttgcgatatacagcaagcggccaagcgaaagcgttaagtattccacctggggagtacgccggcaacggtgaaactcaaaggaattgacgggggcccgcacaagcggaggaacatgtggtttaattcgatgatacgcgaggaaccttacccgggcttaaattgcagatgaattacggtgaaagccgtaagccgcaaggcatctgtgaaggtgctgcatggttgtcgtcagctcgtgccgtgaggtgtcggcttaagtgccataacgagcgcaacccttgttgtcagttactaacaggttccgctgaggactctgacaagactgccatcgtaagatgtgaggaaggtggggatgacgtcaaatcagcacggcccttacgtccggggctacacacgtgttacaatggggggtacagagggnn

SEQ ID NO: 452 - DNA, 1529 bp, artificial sequence
  >GCF_003473585.1_00917 Agathobaculum_butyriciproducens_group
tttagagagtttgatcctggctcaggatgaacgctggcggcgtgcctaacacatgcaagtcgaacggaactattttggaaactccttcgggagcggaatctttagtttagtggcggacgggtgagtaacgcgtgagcaatctgcctttaagagggggataacagtcggaaacggctgctaataccgcataaagcatcaaattcgcatgtttttgatgccaaaggagcaatccgcttttagatgagctcgcgtctgattagctggttggcggggtaacggcccaccaaggcgacgatcagtagccggactgagaggttgaacggccacattgggactgagacacggcccagactcctacgggaggcagcagtggggaatattgcgcaatgggggaaaccctgacgcagcaacgccgcgtgattgaagaaggccttcgggttgtaaagatctttaatcagggacgaaacaaatgacggtacctgaagaataagctccggctaactacgtgccagcagccgcggtaatacgtagggagcaagcgttatccggatttactgggtgtaaagggcgcgcaggcgggccggcaagttggaagtgaaatctatgggcttaacccataaactgctttcaaaactgttggtcttgagtgatggagaggcaggcggaattccgtgtgtagcggtgaaatgcgtagatatacggaggaacaccagtggcgaaggcggcctgctggacattaactgacgctgaggcgcgaaagcgtggggagcaaacaggattagataccctggtagtccacgccgtaaacgatggatactaggtgtgggaggtattgaccccttccgtgccgcagttaacacaataagtatcccacctggggagtacggccgcaaggttgaaactcaaaggaattgacgggggcccgcacaagcagtggagtatgtggtttaattcgaagcaacgcgaagaaccttaccaggtcttgacatcccgatgaccgccttagagataaggcttttcttcggaacatcggtgacaggtggtgcatggttgtcgtcagctcgtgtcgtgagatgttgggttaagtcccgcaacgagcgcaacccttacggttagttgatacgcaagatcactctagccggactgccgttgacaaaacggaggaaggtggggacgacgtcaaatcatcatgccccttatgacctgggctacacacgtactacaatggcagtcatacagagggaagcaaaaccgcgaggtggagcaaatccctaaaagctgtcccagttcagattgcaggctgcaacccgcctgcatgaagtcggaattgctagtaatcgcggatcagcatgccgcggtgaatacgttcccgggccttgtacacaccgcccgtcacaccatgagagccgtcaatacccgaagtccgtagcctaaccgtaaggagggcgcggccgaaggtaggggtggtaattagggtgaagtcgtaacaaggtagccgtatcggaaggtgcggctggatcacctccttt

SEQ ID NO: 453 - DNA, 1531 bp, artificial sequence
  >GCF_003473685.1_02835 Fusicatenibacter_sp2
ttagagagtttgatcctggctcaggatgaacgctggcggcgtgcttaacacatgcaagtcgaacgaagcactttggacggattcttcggatgaagtccttagtgactgagtggcggacgggtgagtaacgcgtgggtaacctgcctcatacagggggataacagttagaaatggctgctaataccgcataagcacacggtactgcatggtacagtgtgaaaaactccggtggtatgagatggacccgcgttggattagctagttggcagggtaacggcctaccaaggcgacgatccatagccggcctgagagggtggacggccacattgggactgagacacggcccagactcctacgggaggcagcagtggggaatattgcacaatgggggaaaccctgatgcagcgacgccgcgtgagcgaagaagtatttcggtatgtaaagctctatcagcagggaagaaaatgacggtacctgactaagaagccccggctaactacgtgccagcagccgcggtaatacgtagggggcaagcgttatccggatttactgggtgtaaagggagcgtagacggaatggcaagtctgatgtgaaaggccggggctcaaccccgggactgcattggaaactgtcaatctagagtaccggaggggtaagtggaattcctagtgtagcggtgaaatgcgtagatattaggaggaacaccagtggcgaaggcggcttactggacggtaactgacgttgaggctcgaaagcgtggggagcaaacaggattagataccctggtagtccacgccgtaaacgatgaatactaggtgttggggagcaaagctcttcggtgccgcagcaaacgcaataagtattccacctggggagtacgttcgcaagaatgaaactcaaaggaattgacggggacccgcacaagcggtggagcatgtggtttaattcgaagcaacgcgaagaaccttaccaaatcttgacatcgatctgaccggactgtaatgagtcctttcccttcggggacagagaagacaggtggtgcatggttgtcgtcagctcgtgtcgtgagatgttgggttaagtcccgcaacgagcgcaacccttatcctcagtagccagcaagtgaagttgggcactctgtggagactgccagggataacctggaggaaggtggggatgacgtcaaatcatcatgccccttatgatttgggctacacacgtgctacaatggcgtaaacaaagggaagcgatcacgcgagtgtgagcaaatctcaaaaataacgtctcagttcggattgtagtctgcaactcgactacatgaagctggaatcgctagtaatcgcaggtcagcatactgcggtgaatacgttcccgggtcttgtacacaccgcccgtcacaccatgggagtcagtaacacccgaagccggtgacctaaccgaaagggaggagccgtcgaaggtgggaccgataactggggtgaagtcgtaacaaggtagccgtatcggaaggtgcggctggatcacctccttt

SEQ ID NO: 454 - DNA, 1527 bp, artificial sequence
  >GCF_003473695.1_02214 Blautia_luti_group
tcagagagtttgatcctggctcaggatgaacgctggcggcgtgcttaacacatgcaagtcgaacgggaaaccttttattgaagcttcggcagatttagattgtttctagtggcggacgggtgagtaacgcgtgggtaacctgccttatacagggggataacagtcagaaatgactgctaataccgcataagcgcacagagctgcatggctcggtgtgaaaaactccggtggtataagatggacccgcgttggattagctagttggtgaggtaacggcccaccaaggcgacgatccatagccggcctgagagggtgaacggccacattgggactgagacacggcccagactcctacgggaggcagcagtggggaatattgcacaatgggggaaaccctgatgcagcgacgccgcgtgaaggaagaagtatctcggtatgtaaacttctatcagcagggaagaaaatgacggtacctgactaagaagccccggctaactacgtgccagcagccgcggtaatacgtagggggcaagcgttatccggatttactgggtgtaaagggagcgtagacggatggacaagtctgatgtgaaaggctggggctcaaccccgggactgcattggaaactgcccgtcttgagtgccggagaggtaagcggaattcctagtgtagcggtgaaatgcgtagatattaggaggaacaccagtggcgaaggcggcttactggacggtaactgacgttgaggctcgaaagcgtggggagcaaacaggattagataccctggtagtccacgcggtaaacgatgaatgctaggtgtcggggagcaaagctcttcggtgccgccgcaaacgcattaagcattccacctggggagtacgttcgcaagaatgaaactcaaaggaattgacggggacccgcacaagcggtggagcatgtggtttaattcgaagcaacgcgaagaaccttaccaagtcttgacatccctctgaccgactcttaaccgagtctttccttcgggacagaggagacaggtggtgcatggttgtcgtcagctcgtgtcgtgagatgttgggttaagtcccgcaacgagcgcaacccctatcctcagtagccagcatataagatgggcactctggggagactgccagggataacctggaggaaggcggggatgacgtcaaatcatcatgccccttatgatttgggctacacacgtgctacaatggcgtaaacaaagggaagcgaacctgcgagggtgggcaaatcccaaaaataacgtcccagttcggactgtagtctgcaacccgactacacgaagctggaatcgctagtaatcgcggatcagaatgccgcggtgaatacgttcccgggtcttgtacacaccgcccgtcacaccatgggagtcagtaacgcccgaagtcagtgacctaaccgcaaggaaggagctgccgaaggcgggaccgatgactggggtgaagtcgtaacaaggtagccgtatcggaaggtgcggctggatcacctccttt

SEQ ID NO: 455 - DNA, 1515 bp, artificial sequence
  >GCF_003473925.1_00939 Ruminococcaceae_NG13_sp1
ttttgagagtttgatcctggctcaggacgaacgctggcggcgtgcctaacacatgcaagtcgaacgaagctttgaggagcttgctttttaaagcttagtggcggacgggtgagtaacgcgtgagcaacctgcctctcagagggggataacgttttgaaaagaacgctaataccgcataacatatcggaaccgcatgattctgatatcaaaggagcaatccgctgagagatgggctcgcgtccgattagttagttggtgaggtaacggctcaccaagactacgatcggtagccggactgagaggttgatcggccacattgggactgagacacggcccagactcctacgggaggcagcagtgggggatattgcgcaatgggggaaaccctgacgcagcaacgccgcgtgaaggaagaaggtcttcggattgtaaacttcttttgtcagggacgaagaaagtgacggtacctgacgaataagctccggctaactacgtgccagcagccgcggtaatacgtagggagcgagcgttgtccggatttactgggtgtaaagggtgcgtaggcggccgagcaagtcagttgtgaaaactatgggcttaacccataacgtgcaattgaaactgtccggcttgagtgaagtagaggtaggcggaattcccggtgtagcggtgaaatgcgtagagatcgggaggaacaccagtggcgaaggcggcctactgggctttaactgacgctgaggcacgaaagcatgggtagcaaacaggattagataccctggtagtccatgccgtaaacgatgattactaggtgtggggggactgaccccttccgtgccgcagttaacacaataagtaatccacctggggagtacggccgcaaggttgaaactcaaaggaattgacgggggcccgcacaagcagtggagtatgtggtttaattcgaagcaacgcgaagaaccttaccaggtcttgacatcctgagaatccttaagagattagggagtgccttcgggaactcagagacaggtggtgcatggttgtcgtcagctcgtgtcgtgagatgttgggttaagtcccgcaacgagcgcaacccttgctattagttgctacgcaagagcactctaataggactgccgttgacaaaacggaggaaggtggggacgacgtcaaatcatcatgccccttatgacctgggctacacacgtactacaatggccatcaacagagggaagcaaaaccgcgaggcagagcaaacccctaaaaatggtcccagttcggattgtaggctgcaacccgcctacatgaagttggaattgctagtaatcgcggatcagcatgccgcggtgaatacgttcccgggccttgtacacaccgcccgtcacaccatgggagccggtaatacccgaagtcagtagtctaacagcaatgaggacgctgccgaaggtaggattggcgactggggtgaagtcgtaacaaggtagccgtatcggaaggtgcggctggatcacctccttt

SEQ ID NO: 456 - DNA, 1519 bp, artificial sequence
  >GCF_003474285.1_02034 Bacteroides_intestinalis
atgaagagtttgatcctggctcaggatgaacgctagctacaggcttaacacatgcaagtcgaggggcagcatgacctagcaataggttgatggcgaccggcgcacgggtgagtaacacgtatccaacctgccgattattccgggatagcctttcgaaagaaagattaatactggatagcataacgaaaaggcatctttttgttattaaagaatttcgataatcgatggggatgcgttccattagtttgttggcggggtaacggcccaccaagacatcgatggataggggttctgagaggaaggtcccccacattggaactgagacacggtccaaactcctacgggaggcagcagtgaggaatattggtcaatggacgagagtctgaaccagccaagtagcgtgaaggatgactgccctatgggttgtaaacttcttttatatgggaataaagtgagccacgtgtggctttttgtatgtaccatacgaataaggatcggctaactccgtgccagcagccgcggtaatacggaggatccgagcgttatccggatttattgggtttaaagggagcgtaggcggaagcttaagtcagttgtgaaagtttgcggctcaaccgtaaaattgcagttgatactgggtttcttgagtgcagtagaggtaggcggaattcgtggtgtagcggtgaaatgcttagatatcacgaagaactccgattgcgaaggcagcttactggactgtaactgacgctgatgctcgaaagtgtgggtatcaaacaggattagataccctggtagtccacacagtaaacgatgaatactcgctgtttgcgatatacagcaagcggccaagcgaaagcattaagtattccacctggggagtacgccggcaacggtgaaactcaaaggaattgacgggggcccgcacaagcggaggaacatgtggtttaattcgatgatacgcgaggaaccttacccgggcttaaattgcatttgaataatctggaaacagattagccgcaaggcagatgtgaaggtgctgcatggttgtcgtcagctcgtgccgtgaggtgtcggcttaagtgccataacgagcgcaacccttatctttagttactaacaggtcatgctgaggactctagagagactgccgtcgtaagatgtgaggaaggtggggatgacgtcaaatcagcacggcccttacgtccggggctacacacgtgttacaatggggggtacagaaggcagctacacagcgatgtgatgctaatcccaaaagcctctctcagttcggattggagtctgcaacccgactccatgaagctggattcgctagtaatcgcgcatcagccacggcgcggtgaatacgttcccgggccttgtacacaccgcccgtcaagccatgaaagccgggggtacctgaagtacgtaaccgcaaggagcgtcctagggtaaaactggtaattggggctaagtcgtaacaaggtagccgtaccggaaggtgcggctggaacacctcctt

SEQ ID NO: 457 - DNA, 1529 bp, artificial sequence
  >GCF_003474415.1_02120 Agathobaculum_butyriciproducens_group
tttagagagtttgatcctggctcaggatgaacgctggcggcgtgcctaacacatgcaagtcgaacggagtcgttttggaaatctcttcggagatggaattctcgacttagtggcggacgggtgagtaacgcgtgagcaatctgcctttaagagggggataacagtcggaaacggctgctaataccgcataaagcatcaaattcgcatgtttttgatgccaaaggagcaatccgcttttagatgagctcgcgtctgattagctggttggcggggtaacggcccaccaaggcgacgatcagtagccggactgagaggttgaacggccacattgggactgagacacggcccagactcctacgggaggcagcagtggggaatattgcgcaatgggggaaaccctgacgcagcaacgccgcgtgattgaagaaggccttcgggttgtaaagatctttaatcagggacgaagaaaatgacggtacctgaagaataagctccggctaactacgtgccagcagccgcggtaatacgtagggagcaagcgttatccggatttactgggtgtaaagggcgcgcaggcgggccggcaagttggaagtgaaatctatgggcttaacccataaactgctttcaaaactgctggtcttgagtgatggagaggcaggcggaattccgtgtgtagcggtgaaatgcgtagatatacggaggaacaccagtggcgaaggcggcctgctggacattaactgacgctgaggcgcgaaagcgtggggagcaaacaggattagataccctggtagtccacgccgtaaacgatggatactaggtgtgggaggtattgaccccttccgtgccgcagttaacacaataagtatcccacctggggagtacggccgcaaggttgaaactcaaaggaattgacgggggcccgcacaagcagtggagtatgtggtttaattcgaagcaacgcgaagaaccttaccaggtcttgacatcccgatgaccgtcttagagatagggcttttcttcggaacatcggtgacaggtggtgcatggttgtcgtcagctcgtgtcgtgagatgttgggttaagtcccgcaacgagcgcaacccttacggttagttgatacgcaagatcactctagccggactgccgttgacaaaacggaggaaggtggggacgacgtcaaatcatcatgccccttatgacctgggctacacacgtactacaatggcagtcatacagagggaagcaaaaccgcgaggtggagcaaatccctaaaagctgtcccagttcagattgcaggctgcaacccgcctgcatgaagtcggaattgctagtaatcgcggatcagcatgccgcggtgaatacgttcccgggccttgtacacaccgcccgtcacaccatgagagccgtcaatacccgaagtccgtagcctaaccgcaaggagggcgcggccgaaggtaggggtggtaattagggtgaagtcgtaacaaggtagccgtatcggaaggtgcggctggatcacctccttt

SEQ ID NO: 458 - DNA, 1244 bp, artificial sequence
  >GCF_003474435.1_00482 Blautia_luti_group
tcagagagtttgatcctggctcaggatgaacgctggcggcgtgcttaacacatgcaagtcgaacgggaaaccttttattgaagcttcggcagatttagattgtttctagtggcggacgggtgagtaacgcgtgggtaacctgccttgtacagggggataacagtcagaaatgactgctaataccgcataagcgcacaggaccgcatggtccggtgtgaaaaactccggtggtataagatggacccgcgttggattagctagttggtggggtaacggcccaccaagcgacgatccatagccggcctgagagggtgaacggccacattgggactgagacacggcccagactcctacgggaggcagcagtggggaatattgcacaatgggggaaaccctgatgcagcgacgccgcgtgaaggaagaagtatctcggtatgtaaacttctatcagcagggaagagattgacggtacctgactaagaagccccggctaactacgtgccagcagccgcggtaatacgtagggggcaagcgttatccggatttactgggtgtaaagggagcgtagacggatggacaagtctgatgtgaaaggctggggctcaaccccgggactgcattggaaactgcccgtcttgagtgccggagaggtaagcggaattcctagtgtagcggtgaaatgcgtagatattaggaggaacaccagtggcgaaggcggcttactggacggtaactgacgttgaggctcgaaagcgtggggagcaaacaggattagataccctggtagtccacgcggtaaacgatgaatgctaggtgtcgggtgacaaagtcattcggtgccgccgcaaacgcattaagcattccacctggggagtacgttcgcaagaatgaaactcaaaggaattgacggggacccgcacaagcggtggagcatgtggtttaattcgaagcaacgcgaagaaccttaccaagtcttgacatccccctgaccggaacttaaccgttcctttccttcgggacaggggagacaggtggtgcatggttgtcgtcagctcgtgtcgtgagatgttgggttaagtcccgcaacgagcgcaacccctatcctcagtagccagcagttcggctgggcactctgtggagactgccagggataacctggaggaaggcggggatgacgtcaaatcatcatgccccttatgatttgggctacacacgtgctacaatggcgtaaacaaagggaagcg

SEQ ID NO: 459 - DNA, 1525 bp, artificial sequence
  >GCF_003474845.1_03822 Bacteroides_dorei_group
atgaagagtttgatcctggctcaggatgaacgctagctacaggcttaacacatgcaagtcgaggggcagcatggtcttagcttgctaaggccgatggcgaccggcgcacgggtgagtaacacgtatccaacctgccgtctactcttggacagccttctgaaaggaagattaatacaagatggcatcatgagtccgcatgttcacatgattaaaggtattccggtagacgatggggatgcgttccattagatagtaggcggggtaacggcccacctagtcttcgatggataggggttctgagaggaaggtcccccacattggaactgagacacggtccaaactcctacgggaggcagcagtgaggaatattggtcaatgggcgagagcctgaaccagccaagtagcgtgaaggatgactgccctatgggttgtaaacttcttttataaaggaataaagtcgggtatggatacccgtttgcatgtactttatgaataaggatcggctaactccgtgccagcagccgcggtaatacggaggatccgagcgttatccggatttattgggtttaaagggagcgtagatggatgtttaagtcagttgtgaaagtttgcggctcaaccgtaaaattgcagttgatactggatatcttgagtgcagttgaggcaggcggaattcggggtgtagcggtgaaatgcttagatatcacgaagaactccgattgcgaaggcagcctgctaagctgcaactgacattgaggctcgaaagtgtgggtatcaaacaggattagataccctggtagtccacacggtaaacgatgaatactcgctgtttgcgatatacagcaagcggccaagcgaaagcgttaagtattccacctggggagtacgccggcaacggtgaaactcaaaggaattgacgggggcccgcacaagcggaggaacatgtggtttaattcgatgatacgcgaggaaccttacccgggcttaaattgcagatgaattacggtgaaagccgtaagccgcaaggcatctgtgaaggtgctgcatggttgtcgtcagctcgtgccgtgaggtgtcggcttaagtgccataacgagcgcaacccttgttgtcagttactaacaggttccgctgaggactctgacaagactgccatcgtaagatgtgaggaaggtggggatgacgtcaaatcagcacggcccttacgtccggggctacacacgtgttacaatggggggtacagagggccgctaccacgcgagtggatgccaatccccaaaacctctctcagttcggactggagtctgcaacccgactccacgaagctggattcgctagtaatcgcgcatcagccacggcgcggtgaatacgttcccgggccttgtacacaccgcccgtcaagccatgggagccgggggtacctgaagtgcgtaaccgcgaggagcgccctagggtaaaactggtgactggggctaagtcgtaacaaggtagccgtaccggaaggtgcggctggaacacctccttt

SEQ ID NO: 460 - DNA, 1519 bp, artificial sequence
  >GCF_003475245.1_04670 Bacteroides_intestinalis
atgaagagtttgatcctggctcaggatgaacgctagctacaggcttaacacatgcaagtcgaggggcagcatgacctagcaataggttgatggcgaccggcgcacgggtgagtaacacgtatccaacctgccgattattccgggatagcctttcgaaagaaagattaatactggatagcataacgagaaggcatcttcttgttattaaagaatttcgataatcgatggggatgcgttccattagtttgttggcggggtaacggcccaccaagacatcgatggataggggttctgagaggaaggtcccccacattggaactgagacacggtccaaactcctacgggaggcagcagtgaggaatattggtcaatggacgagagtctgaaccagccaagtagcgtgaaggatgactgccctatgggttgtaaacttcttttatatgggaataaagtgcagtatgtatactgttttgtatgtaccatacgaataaggatcggctaactccgtgccagcagccgcggtaatacggaggatccaagcgttatccggatttattgggtttaaagggagcgtaggcggattattaagtcagttgtgaaagtttgcggctcaaccgtaaaattgcagttgatactggtagtcttgagtgcagcagaggtaggcggaattcgtggtgtagcggtgaaatgcttagatatcacgaagaactccgattgcgaaggcagcttactggactgtaactgacgctgatgctcgaaagtgtgggtatcaaacaggattagataccctggtagtccacacagtaaacgatgaatactcgctgtttgcgatatacagcaagcggccaagcgaaagcattaagtattccacctggggagtacgccggcaacggtgaaactcaaaggaattgacgggggcccgcacaagcggaggaacatgtggtttaattcgatgatacgcgaggaaccttacccgggcttaaattgcaactgacggatttggaaacagatcttccttcgggcagttgtgaaggtgctgcatggttgtcgtcagctcgtgccgtgaggtgtcggcttaagtgccataacgagcgcaacccttatctttagttactaacaggtcatgctgaggactctagagagactgccgtcgtaagatgtgaggaaggtggggatgacgtcaaatcagcacggcccttacgtccggggctacacacgtgttacaatggggggtacagaaggcagctacacagcgatgtgatgctaatcccaaaagcctctctcagttcggattggagtctgcaacccgactccatgaagctggattcgctagtaatcgcgcatcagccacggcgcggtgaatacgttcccgggccttgtacacaccgcccgtcaagccatgaaagccgggggtacctgaagtacgtaaccgcaaggagcgtcctagggtaaaactggtaattggggctaagtcgtaacaaggtagccgtaccggaaggtgcggctggaacacctcctt

SEQ ID NO: 461 - DNA, 1241 bp, artificial sequence
  >GCF_003475365.1_01406 [Ruminococcus]_gnavus
cgacgatcagtagccgacctgagagggtgaccggccacattgggactgagacacggcccaaactcctacgggaggcagcagtggggaatattgcacaatgggggaaaccctgatgcagcgacgccgcgtgagcgatgaagtatttcggtatgtaaagctctatcagcagggaagaaaatgacggtacctgactaagaagccccggctaactacgtgccagcagccgcggtaatacgtagggggcaagcgttatccggatttactgggtgtaaagggagcgtagacggcatggcaagccagatgtgaaagcccggggctcaaccccgggactgcatttggaactgtcaggctagagtgtcggagaggaaagcggaattcctagtgtagcggtgaaatgcgtagatattaggaggaacaccagtggcgaaggcggctttctggacgatgactgacgttgaggctcgaaagcgtggggagcaaacaggattagataccctggtagtccacgccgtaaacgatgaatactaggtgtcgggtggcaaagccattcggtgccgcagcaaacgcaataagtattccacctggggagtacgttcgcaagaatgaaactcaaaggaattgacggggacccgcacaagcggtggagcatgtggtttaattcgaagcaacgcgaagaaccttacctggtcttgacatccctctgaccgctctttaatcggagctttccttcgggacagaggagacaggtggtgcatggttgtcgtcagctcgtgtcgtgagatgttgggttaagtcccgcaacgagcgcaacccctatctttagtagccagcattttggatgggcactctagagagactgccagggataacctggaggaaggtggggatgacgtcaaatcatcatgccccttatgaccagggctacacacgtgctacaatggcgtaaacaaagggaagcgagcccgcgagggggagcaaatcccaaaaataacgtctcagttcggattgtagtctgcaactcgactacatgaagctggaatcgctagtaatcgcgaatcagaatgtcgcggtgaatacgttcccgggtcttgtacacaccgcccgtcacaccatgggagtcagtaacgcccgaagtcagtgacccaaccgcaaggagggagctgccgaaggtgggaccgataactggggtgaagtcgtaacaaggtagccgtatcggaaggtgcggctggatcacctccttt

SEQ ID NO: 462 - DNA, 1525 bp, artificial sequence
  >GCF_003475425.1_01460 Bacteroides_caccae
atgaagagtttgatcctggctcaggatgaacgctagctacaggcttaacacatgcaagtcgaggggcatcagtttggtttgcttgcaaaccaaagctggcgaccggcgcacgggtgagtaacacgtatccaacctgcctcatactcggggatagcctttcgaaagaaagattaatatccgatagcatatatttcccgcatgggttttatattaaagaaattcggtatgagatggggatgcgttccattagtttgttgggggggtaacggcccaccaagactacgatggataggggttctgagaggaaggtcccccacattggaactgagacacggtccaaactcctacgggaggcagcagtgaggaatattggtcaatggacgcgagtctgaaccagccaagtagcgtgaaggatgactgccctatgggttgtaaacttcttttatatgggaataaagttgtccacgtgtggatttttgtatgtaccatatgaataaggatcggctaactccgtgccagcagccgcggtaatacggaggatccgagcgttatccggatttattgggtttaaagggagcgtaggcggattgttaagtcagttgtgaaagtttgcggctcaaccgtaaaattgcagttgatactggcagtcttgagtgcagtagaggtgggcggaattcgtggtgtagcggtgaaatgcttagatatcacgaagaactccgattgcgaaggcagctcactggagtgtaactgacgctgatgctcgaaagtgtgggtatcaaacaggattagataccctggtagtccacacagtaaacgatgaatactcgctgtttgcgatatacagtaagcggccaagcgaaagcattaagtattccacctggggagtacgccggcaacggtgaaactcaaaggaattgacgggggcccgcacaagcggaggaacatgtggtttaattcgatgatacgcgaggaaccttacccgggcttaaattgcaaatgaattatggggaaacccataggccgtaaggcatttgtgaaggtgctgcatggttgtcgtcagctcgtgccgtgaggtgtcggcttaagtgccataacgagcgcaacccttatcttcagttactaacaggtcatgctgaggactctggagagactgccgtcgtaagatgtgaggaaggtggggatgacgtcaaatcagcacggcccttacgtccggggctacacacgtgttacaatggggggtacagaaggccgctacctggtgacaggatgccaatcccaaaaacctctctcagttcggatcgaagtctgcaacccgacttcgtgaagctggattcgctagtaatcgcgcatcagccatggcgcggtgaatacgttcccgggccttgtacacaccgcccgtcaagccatgaaagccgggggtacctgaagtacgtaaccgcaaggagcgtcctagggtaaaactggtaattggggctaagtcgtaacaaggtagccgtaccggaaggtgcggctggaacacctcctt

SEQ ID NO: 463 - DNA, 1546 bp, artificial sequence
  >GCF_003475645.1_00698 Streptococcus_parasanguinis
taatgagagtttgatcctggctcaggatgaacgctggcggcgtgcctaatacatgcaagtagaacgctgaagcttggtgcttgcaccgagcggatgagttgcgaacgggtgagtaacgcgtaggtaacctgcctcttagcgggggataactattggaaacgatagctaataccgcataaaagtcgacattgcatgatgttgacttgaaaggtgcaattgcatcactaagagatggacctgcgttgtattagctagttggtgaggtaacggctcaccaaggcgacgatacatagccgacctgagagggtgatcggccacactgggactgagacacggcccagactcctacgggaggcagcagtagggaatcttcggcaatgggggcaaccctgaccgagcaacgccgcgtgagtgaagaaggttttcggatcgtaaagctctgttgtaagagaagaacgagtgtgagagtggaaagttcacactgtgacggtaacttaccagaaagggacggctaactacgtgccagcagccgcggtaatacgtaggtcccgagcgttatccggatttattgggcgtaaagcgagcgcaggcggttagataagtctgaagttaaaggctgtggcttaaccatagtacgctttggaaactgtttaacttgagtgcagaaggggagagtggaattccatgtgtagcggtgaaatgcgtagatatatggaggaacaccggtggcgaaagcggctctctggtctgtaactgacgctgaggctcgaaagcgtggggagcaaacaggattagataccctggtagtccacgccgtaaacgatgagtgctaggtgttgggtcctttccgggactcagtgccgcagctaacgcattaagcactccgcctggggagtacgaccgcaaggttgaaactcaaaggaattgacgggggcccgcacaagcggtggagcatgtggtttaattcgaagcaacgcgaagaaccttaccaggtcttgacatccctctgaccgctctagagatagagttttccttcgggacagaggtgacaggtggtgcatggttgtcgtcagctcgtgtcgtgagatgttgggttaagtcccgcaacgagcgcaacccctattgttagttgccatcattgagttgggcactctagcgagactgccggtaataaaccggaggaaggtggggatgacgtcaaatcatcatgccccttatgacctgggctacacacgtgctacaatggctggtacaacgagtcgcgagtcggtgacggcaagctaatctcttaaagccagtctcagttcggattgtaggctgcaactcgcctacatgaagtcggaatcgctagtaatcgcggatcagcacgccgcggtgaatacgttcccgggccttgtacacaccgcccgtcacaccacgagagtttgtaacacccgaagtcggtgaggtaaccgtaaggagccagccgcctaaggtgggatagatgattggggtgaagtcgtaacaaggtagccgtatcggaaggtgcggctggatcacctccttt

SEQ ID NO: 464 - DNA, 1528 bp, artificial sequence
  >GCF_003477705.1_02410 Lachnospiraceae_NG30_sp3
tacgagagtttgatcctggctcaggatgaacgctggcggcgtgcttaacacatgcaagtcgaacgaagcacttaagtttgattcttcggatgaagacttttgtgactgagtggcggacgggtgagtaacgcgtgggtaacctgcctcatacagggggataacagttagaaatgactgctaataccgcataagaccacagcaccgcatggtgcaggggtaaaaactccggtggtatgagatggacccgcgtctgattagctagttggtggggtaacggcctaccaaggcgacgatcagtagccgacctgagagggtgaccggccacattgggactgagacacggcccaaactcctacgggaggcagcagtggggaatattgcacaatgggggaaaccctgatgcagcgacgccgcgtgaaggatgaagtatttcggtatgtaaacttctatcagcagggaagaaaatgacggtacctgactaagaagccccggctaactacgtgccagcagccgcggtaatacgtagggggcaagcgttatccggatttactgggtgtaaagggagcgtagacggtatggcaagtctgatgtgaaaggccagggctcaaccctgggactgcattggaaactgtcgaactagagtgtcggagaggcaagtggaattcctagtgtagcggtgaaatgcgtagatattaggaggaacaccagtggcgaaggcggcttgctggacgatgactgacgttgaggctcgaaagcgtggggagcaaacaggattagataccctggtagtccacgccgtaaacgatgactactaggtgtcgggtagcagagctattcggtgccgcagccaacgcaataagtagtccacctggggagtacgttcgcaagaatgaaactcaaaggaattgacggggacccgcacaagcggtggagcatgtggtttaattcgaagcaacgcgaagaaccttacctgctcttgacatctccctgaccggcaagtaatgttgcctttccttcgggacagggatgacaggtggtgcatggttgtcgtcagctcgtgtcgtgagatgttgggttaagtcccgcaacgagcgcaacccctatctttagtagccagcggtatggccgggcactctagagagactgccagggataacctggaggaaggtggggatgacgtcaaatcatcatgccccttatgagcagggctacacacgtgctacaatggcgtaaacaaagggaagcgagcctgcgagggtaagcaaatctcaaaaataacgtctcagttcggattgtagtctgcaactcgactacatgaagctggaatcgctagtaatcgcgaatcagaatgtcgcggtgaatacgttcccgggtcttgtacacaccgcccgtcacaccatgggagttggtaacgcccgaagtcagtgacccaaccgcaaggagggagctgccgaaggtgggaccgataactggggtgaagtcgtaacaaggtagccgtatcggaaggtgcggctggatcacctccttt

SEQ ID NO: 465 - DNA, 849 bp, artificial sequence
  >GCF_003478065.1_02894 Blautia_luti_group
  misc_feature (172)..(181): n is a, c, g, or t
tcagagagtttgatcctggctcaggatgaacgctggcggcgtgcttaacacatgcaagtcgaacgggaattactttattgaaacttcggtcgatttaatttaattctagtggcggacgggtgagtaacgcgtgggtaacctgccttgtacagggggataacagtcagaaatnnnnnnnnnngggataacagtcagaaatgactgctaataccgcataagcgcacagagctgcatggctcagtgtgaaaaactccggtggtataagatggacccgcgttggattagctagttggtgaggtaacggcccaccaaggcgacgatccatagccggcctgagagggtgaacggccacattgggactgagacacggcccagactcctacgggaggcagcagtggggaatattgcacaatgggggaaaccctgatgcagcgacgccgcgtgaaggaagaagtatctcggtatgtaaacttctatcagcagggaagagattgacggtacctgactaagaagccccggctaactacgtgccagcagccgcggtaatacgtagggggcaagcgttatccggatttactgggtgtaaagggagcgtagacggatggacaagtctgatgtgaaaggctggggctcaaccccgggactgcattggaaactgcccgtcttgagtgccggagaggtaagcggaattcctagtgtagcggtgaaatgcgtagatattaggaggaacaccagtggcgaaggcggcttactggacggtaactgacgttgaggctcgaaagcgtggggagcaaacaggattagataccctggtagtccacgcggtaaacgatgaatgctaggtgtcgg

SEQ ID NO: 466 - DNA, 1205 bp, artificial sequence
  >GCF_003478645.1_02720 Agathobaculum_butyriciproducens_group
ccgcttttagatgagctcgcgtctgattagctggttggcggggtaacggcccaccaaggcgacgatcagtagccggactgagaggttgaacggccacattgggactgagacacggcccagactcctacgggaggcagcagtggggaatattgcgcaatgggggaaaccctgacgcagcaacgccgcgtgattgaagaaggccttcgggttgtaaagatctttaatcagggacgaaacaaatgacggtacctgaagaataagctccggctaactacgtgccagcagccgcggtaatacgtagggagcaagcgttatccggatttactgggtgtaaagggcgcgcaggcgggccggcaagttggaagtgaaatctatgggcttaacccataaactgctttcaaaactgctggtcttgagtgatggagaggcaggcggaattccgtgtgtagcggtgaaatgcgtagatatacggaggaacaccagtggcgaaggcggcctgctggacattaactgacgctgaggcgcgaaagcgtggggagcaaacaggattagataccctggtagtccacgccgtaaacgatggatactaggtgtgggaggtattgaccccttccgtgccgcagttaacacaataagtatcccacctggggagtacggccgcaaggttgaaactcaaaggaattgacgggggcccgcacaagcagtggagtatgtggtttaattcgaagcaacgcgaagaaccttaccaggtcttgacatcccgatgaccgccttagagataaggcttttcttcggaacatcggtgacaggtggtgcatggttgtcgtcagctcgtgtcgtgagatgttgggttaagtcccgcaacgagcgcaacccttacggttagttgatacgcaagatcactctagccggactgccgttgacaaaacggaggaaggtggggacgacgtcaaatcatcatgccccttatgacctgggctacacacgtactacaatggcagtcatacagagggaagcaaaaccgcgaggtggagcaaatccctaaaagctgtcccagttcagattgcaggctgcaacccgcctgcatgaagtcggaattgctagtaatcgcggatcagcatgccgcggtgaatacgttcccgggccttgtacacaccgcccgtcacaccatgagagccgtcaatacccgaagtccgtagcctaac

SEQ ID NO: 467 - DNA, 1422 bp, artificial sequence
  >GCF_003478985.1_02348 Blautia_luti_group
ctagtggcggacgggtgagtaacgcgtgggtaacctgccttgtacagggggataacagtcagaaatgactgctaataccgcataagcgcacagagctgcatggctcagtgtgaaaaactccggtggtataagatggacccgcgttggattagctagttggtgaggtaacggcccaccaaggcgacgatccatagccggcctgagagggtgaacggccacattgggactgagacacggcccagactcctacgggaggcagcagtggggaatattgcacaatgggggaaaccctgatgcagcgacgccgcgtgaaggaagaagtatctcggtatgtaaacttctatcagcagggaagaaaatgacggtacctgactaagaagccccggctaactacgtgccagcagccgcggtaatacgtagggggcaagcgttatccggatttactgggtgtaaagggagcgtagacggatggacaagtctgatgtgaaaggctggggctcaaccccgggactgcattggaaactgcccgtcttgagtgccggagaggtaagcggaattcctagtgtagcggtgaaatgcgtagatattaggaggaacaccagtggcgaaggcggcttactggacggtaactgacgttgaggctcgaaagcgtggggagcaaacaggattagataccctggtagtccacgcggtaaacgatgaatgctaggtgtcgggaagcaaagcttttcggtgccgccgcaaacgcattaagcattccacctggggagtacgttcgcaagaatgaaactcaaaggaattgacggggacccgcacaagcggtggagcatgtggtttaattcgaagcaacgcgaagaaccttaccaagtcttgacatccctctgaccgactcttaaccgagtctttccttcgggacagaggagacaggtggtgcatggttgtcgtcagctcgtgtcgtgagatgttgggttaagtcccgcaacgagcgcaacccctatcctcagtagccagcatttaaggtgggcactctggggagactgccagggataacctggaggaaggcggggatgacgtcaaatcatcatgccccttatgatttgggctacacacgtgctacaatggcgtaaacaaagggaagcgaacccgcgagggtgggcaaatcccaaaaataacgtcccagttcggactgtagtctgcaacccgactacacgaagctggaatcgctagtaatcgcggatcagaatgccgcggtgaatacgttcccgggtcttgtacacaccgcccgtcacaccatgggagtcagtaacgcccgaagtcagtgacctaaccgcaaggaaggagctgccgaaggcgggaccgatgactggggtgaagtcgtaacaaggtagccgtatcggaaggtgcggctggatcacctccttt

SEQ ID NO: 468 - DNA, 1325 bp, artificial sequence
  >GCF_003479245.1_02227 Blautia_luti_group
  misc_feature (762)..(825): n is a, c, g, or t
tccggtggtataagatggacccgcgttggattagctggttggtgaggtaacggcccaccaaggcgacgatccatagccggcctgagagggtgaacggccacattgggactgagacacggcccagactcctacgggaggcagcagtggggaatattgcacaatgggggaaaccctgatgcagcgacgccgcgtgaaggaagaagtatctcggtatgtaaacttctatcagcagggaagaaaatgacggtacctgactaagaagccccggctaactacgtgccagcagccgcggtaatacgtagggggcaagcgttatccggatttactgggtgtaaagggagcgtagacggatggacaagtctgatgtgaaaggctggggctcaaccccgggactgcattggaaactgcccgtcttgagtgccggagaggtaagcggaattcctagtgtagcggtgaaatgcgtagatattaggaggaacaccagtggcgaaggcggcttactggacggtaactgacgttgaggctcgaaagcgtggggagcaaacaggattagataccctggtagtccacgcggtaaacgatgaatgctaggtgtcgggtgacgaagtcattcggtgccgccgcaaacgcattaagcattccacctggggagtacgttcgcaagaatgaaactcaaaggaattgacggggacccgcacaagcggtggagcatgtggtttaattcgaagcaacgcgaagaaccttaccaagtcttgacatccnnnnnnnnnnnnnnnnnnnnnnnnnnnnnnnnnnnnnnnnnnnnnnnnnnnnnnnnnnnnnnnngacaggtggtgcatggttgtcgtcagctcgtgtcgtgagatgttgggttaagtcccgcaacgagcgcaacccctatccccagtagccagcggttcggccgggcactctgaggagactgccagggataacctggaggaaggcggggatgacgtcaaatcatcatgccccttatgatttgggctacacacgtgctacaatggcgtaaacaaagggaagcgaacctgcgagggtgggcaaatcccaaaaataacgtcccagttcggactgtagtctgcaacccgactacacgaagctggaatcgctagtaatcgcggatcagaatgccgcggtgaatacgttcccgggtcttgtacacaccgcccgtcacaccatgggagtcagtaacgcccgaagtcagtgacctaaccgcaaggaaggagctgccgaaggcgggaccgatgactggggtgaagtcgtaacaaggtagccgtatcggaaggtgcggctggatcacctccttt

SEQ ID NO: 469 - DNA, 1264 bp, artificial sequence
  >GCF_003479745.1_02601 Agathobaculum_butyriciproducens_group
gttggcggggtaacggcccaccaaggcgacgatcagtagccggactgagaggttgaacggccacattgggactgagacacggcccagactcctacgggaggcagcagtggggaatattgcgcaatgggggaaaccctgacgcagcaacgccgcgtgattgaagaaggcctcgggttgtaaagatctttaatcagggacgaaacaaatgacggtacctgaagaataagctccggctaactacgtgccagcagccgcggtaatacgtagggagcaagcgttatccggatttactgggtgtaaagggcgcgcaggcgggccggtaagttggaagtgaaatctatgggcttaacccataaactgctttcaaaactgctggtcttgagtgatggagaggcaggcggaattccgtgtgtagcggtgaaatgcgtagatatacggaggaacaccagtggcgaaggcggcctgctggacattaactgacgctgaggcgcgaaagcgtggggagcaaacaggattagataccctggtagtccacgccgtaaacgatggatactaggtgtgggaggtattgaccccttccgtgccgcagttaacacaataagtatcccacctggggagtacggccgcaaggttgaaactcaaaggaattgacgggggcccgcacaagcagtggagtatgtggtttaattcgaagcaacgcgaagaaccttaccaggtcttgacatcccgatgaccgccttagagataaggcttttcttcggaacatcggtgacaggtggtgcatggttgtcgtcagctcgtgtcgtgagatgttgggttaagtcccgcaacgagcgcaacccttacggttagttgatacgcaagatcactctagccggactgccgttgacaaaacggaggaaggtggggacgacgtcaaatcatcatgccccttatgacctgggctacacacgtactacaatggcagtcatacagagggaagcaaaaccgcgaggtggagcaaatccctaaaagctgtcccagttcagattgcaggctgcaacccgcctgcatgaagtcggaattgctagtaatcgcggatcagcatgccgcggtgaatacgttcccgggccttgtacacaccgcccgtcacaccatgagagccgtcaatacccgagtccgtagcctaaccgtaaggagggcgcggccgaaggtaggggtggtaattagggtgaagtcgtaacaaggtagccgtatcggaaggtgcggctggatcacctccttt

SEQ ID NO: 470 - DNA, 1525 bp, artificial sequence; identical to SEQ ID NO: 102
  >GCF_003479765.1_03013 Ruminococcaceae_NG18_sp1

SEQ ID NO: 471 - DNA, 1527 bp, artificial sequence
  >GCF_003480085.1_01440 Agathobaculum_butyriciproducens_group
tttagagagtttgatcctggctcaggatgaacgctggcggcgtgcctaacacatgcaagtcgaacggaggcgttttggaaaatccttcgggattggaattctcgacttagtggcggacgggtgagtaacgcgtgagcaatctgcctttaagagggggataacagtcggaaacggctgctaataccgcataaagcattgaattcgcatgttttcgatgccaaaggagcaatccgcttttagatgagctcgcgtctgattagctagttggcggggtaacggcccaccaaggcgacgatcagtagccggactgagaggttgaacggccacattgggactgagacacggcccagactcctacgggaggcagcagtggggaatattgcgcaatgggggaaaccctgacgcagcaacgccgcgtgattgaagaaggccttcgggttgtaaagatctttaattcgggacgaattttgacggtaccgaaagaataagctccggctaactacgtgccagcagccgcggtaatacgtagggagcaagcgttatccggatttactgggtgtaaagggcgcgcaggcgggccggcaagttggaagtgaaatccgggggcttaacccccgaactgctttcaaaactgctggtcttgagtgatggagaggcaggcggaattccgtgtgtagcggtgaaatgcgtagatatacggaggaacaccagtggcgaaggcggcctgctggacattaactgacgctgaggcgcgaaagcgtggggagcaaacaggattagataccctggtagtccacgccgtaaacgatggatactaggtgtgggaggtattgaccccttccgtgccgcagttaacacaataagtatcccacctggggagtacggccgcaaggttgaaactcaaaggaattgacgggggcccgcacaagcagtggagtatgtggtttaattcgaagcaacgcgaagaaccttaccaggccttgacatcccgatgaccgtcctagagatagggcttctcttcggagcatcggtgacaggtggtgcatggttgtcgtcagctcgtgtcgtgagatgttgggttaagtcccgcaacgagcgcaacccttacggttagttgatacgcaagatcactctagccggactgccgttgacaaaacggaggaaggtggggacgacgtcaaatcatcatgccccttatggcctgggctacacacgtactacaatggcagtcatacagagggaagcaaagccgcgaggtggagcaaatccctaaaagctgtcccagttcagattgcaggctgcaacccgcctgcatgaagtcggaattgctagtaatcgcggatcagcatgccgcggtgaatacgttcccgggccttgtacacaccgcccgtcacaccatgagagccgtcaatacccgaagtccgtagcctaaccgcaaggagggcgcggccgaaggtaggggtggtaattagggtgaagtcgtaacaaggtagccgtatcggaaggtgcggctggatcacctccttt

SEQ ID NO: 472 - DNA, 1529 bp, artificial sequence
  >GCF_003480365.1_02283 Agathobaculum_butyriciproducens_group
tttagagagtttgatcctggctcaggatgaacgctggcggcgtgcctaacacatgcaagtcgaacggaactattttggaaactccttcgggagcggaatctttagtttagtggcggacgggtgagtaacgcgtgagcaatctgcctttaagagggggataacagtcggaaacggctgctaataccgcataaagcatcaaattcgcatgtttttgatgccaaaggagcaatccgcttttagatgagctcgcgtctgattagctagttggcggggtaacggcccaccaaggcgacgatcagtagccggactgagaggttgaacggccacattgggactgagacacggcccagactcctacgggaggcagcagtggggaatattgcgcaatgggggaaaccctgacgcagcaacgccgcgtgattgaagaaggccttcgggttgtaaagatctttaatcagggacgaaacaaatgacggtacctgaagaataagctccggctaactacgtgccagcagccgcggtaatacgtagggagcaagcgttatccggatttactgggtgtaaagggcgcgcaggcgggccggcaagttggaagtgaaatctatgggcttaacccataaactgctttcaaaactgctggtcttgagtgatggagaggcaggcggaattccgtgtgtagcggtgaaatgcgtagatatacggaggaacaccagtggcgaaggcggcctgctggacattaactgacgctgaggcgcgaaagcgtggggagcaaacaggattagataccctggtagtccacgccgtaaacgatggatactaggtgtgggaggtattgaccccttccgtgccgcagttaacacaataagtatcccacctggggagtacggccgcaaggttgaaactcaaaggaattgacgggggcccgcacaagcagtggagtatgtggtttaattcgaagcaacgcgaagaaccttaccaggtcttgacatcccgatgaccggttcagagatgagccttttcttcggaacatcggtgacaggtggtgcatggttgtcgtcagctcgtgtcgtgagatgttgggttaagtcccgcaacgagcgcaacccttacggttagttgatacgcaagatcactctagccggactgccgttgacaaaacggaggaaggtggggacgacgtcaaatcatcatgccccttatgacctgggctacacacgtactacaatggcagtcatacagagggaagcaaaaccgcgaggtggagcaaatccctaaaagctgtcccagttcagattgcaggctgcaacccgcctgcatgaagtcggaattgctagtaatcgcggatcagcatgccgcggtgaatacgttcccgggccttgtacacaccgcccgtcacaccatgagagccgtcaatacccgaagtccgtagcctaaccgcaaggagggcgcggccgaaggtaggggtggtaattagggtgaagtcgtaacaaggtagccgtatcggaaggtgcggctggatcacctccttt

SEQ ID NO: 473 - DNA, 1525 bp, artificial sequence
  >GCF_003480485.1_02827 Agathobaculum_butyriciproducens_group
tttagagagtttgatcctggctcaggatgaacgctggcggcgtgcctaacacatgcaagtcgaacggagtcgttttggaaaatccttcgggattggaattctcgacttagtggcggacgggtgagtaacgcgtgagcaatctgcctttaagagggggataacagtcggaaacggctgctaataccgcataaagcattgaattcgcatgttttcgatgccaaaggagcaatccgcttttagatgagctcgcgtctgattagctagttggcggggtaacggcccaccaaggcgacgatcagtagccggactgagaggttgaacggccacattgggactgagacacggcccagactcctacgggaggcagcagtggggaatattgcgcaatgggggaaaccctgacgcagcaacgccgcgtgattgaagaaggcctcgggttgtaaagatctttaattcgggacgaattttgacggtaccgaaagaataagctccggctaactacgtgccagcagccgcggtaatacgtagggagcaagcgttatccggatttactgggtgtaaagggcgcgcaggcgggccggcaagttggaagtgaaatccgggggcttaacccccgaactgctttcaaaactgctggtcttgagtgatggagaggcaggcggaattccgtgtgtagcggtgaaatgcgtagatatacggaggaacaccagtggcgaaggcggcctgctggacattaactgacgctgaggcgcgaaagcgtggggagcaaacaggattagataccctggtagtccacgccgtaaacgatggatactaggtgtgggaggtattgaccccttccgtgccgcagttaacacaataagtatcccacctggggagtacggccgcaaggttgaaactcaaaggaattgacgggggcccgcacaagcagtggagtatgtggtttaattcgaagcaacgcgaagaaccttaccaggccttgacatcccgatgaccgtcctagagatagggcttctcttcggagcatcggtgacaggtggtgcatggttgtcgtcagctcgtgtcgtgagatgttgggttaagtcccgcaacgagcgcaacccttacggttagttgatacgcaagatcactctagccggactgccgttgacaaaacggaggaaggtggggacgacgtcaaatcatcatgccccttatggcctgggctacacacgtactacaatggcagtcatacagagggaagcaaaaccgcgaggtggagcaaatccctaaaagctgtcccagttcagattgcaggctgcaacccgcctgcatgaagtcggaattgctagtaatcgcggatcagcatgccgcggtgaatacgttcccgggccttgtacacaccgcccgtcacaccatgagagccgtcaatacccgagtccgtagcctaaccgcaaggagggcgcggccgaaggtaggggtggtaattagggtgaagtcgtaacaaggtagccgtatcggaaggtgcggctggatcacctccttt

SEQ ID NO: 474 - DNA, 1529 bp, artificial sequence
  >GCF_003480615.1_02412 Agathobaculum_butyriciproducens_group
tttagagagtttgatcctggctcaggatgaacgctggcggcgtgcctaacacatgcaagtcgaacggagtcgttttggaaatctcttcggagatggaattctcgacttagtggcggacgggtgagtaacgcgtgagcaatctgcctttaagagggggataacagtcggaaacggctgctaataccgcataaagcatcaaattcgcatgtttttgatgccaaaggagcaatccgcttttagatgagctcgcgtctgattagctggttggcggggtaacggcccaccaaggcgacgatcagtagccggactgagaggttgaacggccacattgggactgagacacggcccagactcctacgggaggcagcagtggggaatattgcgcaatgggggaaaccctgacgcagcaacgccgcgtgattgaagaaggccttcgggttgtaaagatctttaatcagggacgaaacaaatgacggtacctgaagaataagctccggctaactacgtgccagcagccgcggtaatacgtagggagcaagcgttatccggatttactgggtgtaaagggcgcgcaggcgggccggcaagttggaagtgaaatctatgggcttaacccataaactgctttcaaaactgctggtcttgagtgatggagaggcaggcggaattccgtgtgtagcggtgaaatgcgtagatatacggaggaacaccagtggcgaaggcggcctgctggacattaactgacgctgaggcgcgaaagcgtggggagcaaacaggattagataccctggtagtccacgccgtaaacgatggatactaggtgtgggaggtattgaccccttccgtgccgcagttaacacaataagtatcccacctggggagtacggccgcaaggttgaaactcaaaggaattgacgggggcccgcacaagcagtggagtatgtggtttaattcgaagcaacgcgaagaaccttaccaggtcttgacatcccgatgaccggttcagagatgagccttttcttcggaacatcggtgacaggtggtgcatggttgtcgtcagctcgtgtcgtgagatgttgggttaagtcccgcaacgagcgcaacccttacggttagttgatacgcaagatcactctagccggactgccgttgacaaaacggaggaaggtggggacgacgtcaaatcatcatgccccttatgacctgggctacacacgtactacaatggcagtcatacagagggaagcaaaaccgcgaggtggagcaaatccctaaaagctgtcccagttcagattgcaggctgcaacccgcctgcatgaagtcggaattgctagtaatcgcggatcagcatgccgcggtgaatacgttcccgggccttgtacacaccgcccgtcacaccatgagagccgtcaatacccgaagtccgtagcctaaccgtaaggagggcgcggccgaaggtaggggtggtaattagggtgaagtcgtaacaaggtagccgtatcggaaggtgcggctggatcacctccttt

SEQ ID NO: 475 - DNA, 1334 bp, artificial sequence
  >GCF_003480785.1_02456 Blautia_luti_group
  misc_feature (825)..(834): n is a, c, g, or t
ctccggtggtataagatggacccgcgttggattagctagttggtgaggtaacggcccaccaaggcgacgatccatagccggcctgagagggtgaacggccacattgggactgagacacggcccagactcctacgggaggcagcagtggggaatattgcacaatgggggaaaccctgatgcagcgacgccgcgtgaaggaagaagtatctcggtatgtaaacttctatcagcagggaagaaaatgacggtacctgactaagaagccccggctaactacgtgccagcagccgcggtaatacgtagggggcaagcgttatccggatttactgggtgtaaagggagcgtagacggatggacaagtctgatgtgaaaggctggggctcaaccccgggactgcattggaaactgcccgtcttgagtgccggagaggtaagcggaattcctagtgtagcggtgaaatgcgtagatattaggaggaacaccagtggcgaaggcggcttactggacggtaactgacgttgaggctcgaaagcgtggggagcaaacaggattagataccctggtagtccacgcggtaaacgatgaatgctaggtgtcggggagcaaagctcttcggtgccgccgcaaacgcattaagcattccacctggggagtacgttcgcaagaatgaaactcaaaggaattgacggggacccgcacaagcggtggagcatgtggtttaattcgaagcaacgcgaagaaccttaccaagtcttgacatccttctgaccggaacttaaccgttccttcccttcggggcagaagtgacaggtggtgcatggttgnnnnnnnnnngacaggtggtgcatggttgtcgtcagctcgtgtcgtgagatgttgggttaagtcccgcaacgagcgcaacccctatccccagtagccagcggttcggccgggcactctgaggagactgccagggataacctggaggaaggcggggatgacgtcaaatcatcatgccccttatgatttgggctacacacgtgctacaatggcgtaaacaaagggaagcgaacctgcgagggtgggcaaatcccaaaaataacgtcccagttcggactgtagtctgcaacccgactacacgaagctggaatcgctagtaatcgcggatcagaatgccgcggtgaatacgttcccgggtcttgtacacaccgcccgtcacaccatgggagtcagtaacgcccgaagtcagtgacctaaccgcaaggaaggagctgccgaaggcgggaccgatgactggggtgaagtcgtaacaaggtagccgtatcggaaggtgcggctggatcacctccttt

SEQ ID NO: 476 - DNA, 1023 bp, artificial sequence
  >GCF_003480945.1_00951 Agathobaculum_butyriciproducens_group
tttagagagtttgatcctggctcaggatgaacgctggcggcgtgcctaacacatgcaagtcgaacggagtcgttttggaaaatccttcgggattggaattctcgacttagtggcggacgggtgagtaacgcgtgagcaatctgcctttaagagggggataacagtcggaaacggctgctaataccgcataaagcaatgaattcgcatgttttcattgccaaaggagcaatccgcttttagatgagctcgcgtctgattagctagttggcggggtaacggcccaccaaggcgacgatcagtagccggactgagaggttgaacggccacattgggactgagacacggcccagactcctacgggaggcagcagtggggaatattgcgcaatgggggaaaccctgacgcagcaacgccgcgtgattgaagaaggccttcgggttgtaaagatctttaatcagggacgaaaaaaatgacggtacctgaagaataagctccggctaactacgtgccagcagccgcggtaatacgtagggagcaagcgttatccggatttactgggtgtaaagggcgcgcaggcgggccggcaagttggaagtgaaatctatgggcttaacccataaactgctttcaaaactgctggtcttgagtgatggagaggcaggcggaattccgtgtgtagcggtgaaatgcgtagatatacggaggaacaccagtggcgaaggcggcctgctggacattaactgacgctgaggcgcgaaagcgtggggagcaaacaggattagataccctggtagtccacgccgtaaacgatggatactaggtgtgggaggtattgaccccttccgtgccgcagttaacacaataagtatcccacctggggagtacggccgcaaggttgaaactcaaaggaattgacgggggcccgcacaagcagtggagtatgtggtttaattcgaagcaacgcgaagaaccttaccaggtcttgacatcccgatgaccgtcctagagatagggcttctcttc

SEQ ID NO: 477 - DNA, 1516 bp, artificial sequence; identical to SEQ ID NO: 113
  >GCF_003481145.1_00807 Ruminococcaceae_NG18_sp1
  misc_feature (1)..(1): n is a, c, g, or t

SEQ ID NO: 478 - DNA, 1585 bp, artificial sequence
  >GCF_003481215.1_02194 Fusicatenibacter_sp2
  misc_feature (124)..(133): n is a, c, g, or t
ttagagagtttgatcctggctcaggatgaacgctggcggcgtgcttaacacatgcaagtcgaacgaagcactttggacagattcttcggatgaagtccttagtgactgagtggcggacgggtgnnnnnnnnnngattcttcggatgaagtccttagtgactgagtggcggacgggtgagtaacgcgtgggtaacctgcctcatacagggggataacagttagaaatggctgctaataccgcataagcgcacggtactgcatggtacagtgtgaaaaactccggtggtatgagatggacccgcgttggattagctagttggcagggtaacggcctaccaaggcgacgatccatagccggcctgagagggtggacggccacattgggactgagacacggcccagactcctacgggaggcagcagtggggaatattgcacaatgggggaaaccctgatgcagcgacgccgcgtgagcgaagaagtatttcggtatgtaaagctctatcagcagggaagaaaatgacggtacctgactaagaagccccggctaactacgtgccagcagccgcggtaatacgtagggggcaagcgttatccggatttactgggtgtaaagggagcgtagacggaatggcaagtctgatgtgaaaggccggggctcaaccccgggactgcattggaaactgtcaatctagagtaccggaggggtaagtggaattcctagtgtagcggtgaaatgcgtagatattaggaggaacaccagtggcgaaggcggcttactggacggtaactgacgttgaggctcgaaagcgtggggagcaaacaggattagataccctggtagtccacgccgtaaacgatgaatactaggtgttggggagcaaagctcttcggtgccgcagcaaacgcaataagtattccacctggggagtacgttcgcaagaatgaaactcaaaggaattgacggggacccgcacaagcggtggagcatgtggtttaattcgaagcaacgcgaagaaccttaccaaatcttgacatcgatctgaccggactgtaatgagtcctttcccttcggggacagagaagacaggtggtgcatggttgtcgtcagctcgtgtcgtgagatgttgggttaagtcccgcaacgagcgcaacccttatcctcagtagccagcaagtgaagttgggcactctgtggagactgccagggataacctggaggaaggtggggatgacgtcaaatcatcatgccccttatgatttgggctacacacgtgctacaatggcgtaaacaaagggaagcgatcacgcgagtgtgagcaaatctcaaaaataacgtctcagttcggattgtagtctgcaactcgactacatgaagctggaatcgctagtaatcgcaggtcagcatactgcggtgaatacgttcccgggtcttgtacacaccgcccgtcacaccatgggagtcagtaacacccgaagccggtgacctaaccgaaagggaggagccgtcgaaggtgggaccgataactggggtgaagtcgtaacaaggtagccgtatcggaaggtgcggctggatcacctccttt

SEQ ID NO: 479 - DNA, 1527 bp, artificial sequence
  >GCF_003481705.1_00631 Agathobaculum_butyriciproducens_group
tttagagagtttgatcctggctcaggatgaacgctggcggcgtgcctaacacatgcaagtcgaacggagtcgttttggaaaatccttcgggattggaattctcgacttagtggcggacgggtgagtaacgcgtgagcaatctgcctttaagagggggataacagtcggaaacggctgctaataccgcataaagcattgaattcgcatgttttcgatgccaaaggagcaatccgcttttagatgagctcgcgtctgattagctagttggcggggtaacggcccaccaaggcgacgatcagtagccggactgagaggttgaacggccacattgggactgagacacggcccagactcctacgggaggcagcagtggggaatattgcgcaatgggggaaaccctgacgcagcaacgccgcgtgattgaagaaggccttcgggttgtaaagatctttaattcgggacgaattttgacggtaccgaaagaataagctccggctaactacgtgccagcagccgcggtaatacgtagggagcaagcgttatccggatttactgggtgtaaagggcgcgcaggcgggccggcaagttggaagtgaaatccgggggcttaacccccgaactgctttcaaaactgctggtcttgagtgatggagaggcaggcggaattccgtgtgtagcggtgaaatgcgtagatatacggaggaacaccagtggcgaaggcggcctgctggacattaactgacgctgaggcgcgaaagcgtggggagcaaacaggattagataccctggtagtccacgccgtaaacgatggatactaggtgtgggaggtattgaccccttccgtgccgcagttaacacaataagtatcccacctggggagtacggccgcaaggttgaaactcaaaggaattgacgggggcccgcacaagcagtggagtatgtggtttaattcgaagcaacgcgaagaaccttaccaggccttgacatcccgatgaccgtcctagagatagggcttctcttcggagcatcggtgacaggtggtgcatggttgtcgtcagctcgtgtcgtgagatgttgggttaagtcccgcaacgagcgcaacccttacggttagttgatacgcaagatcactctagccggactgccgttgacaaaacggaggaaggtggggacgacgtcaaatcatcatgccccttatggcctgggctacacacgtactacaatggcagtcatacagagggaagcaaaaccgcgaggtggagcaaatccctaaaagctgtcccagttcagattgcaggctgcaacccgcctgcatgaagtcggaattgctagtaatcgcggatcagcatgccgcggtgaatacgttcccgggccttgtacacaccgcccgtcacaccatgagagccgtcaatacccgaagtccgtagcctaaccgcaaggagggcgcggccgaaggtaggggtggtaattagggtgaagtcgtaacaaggtagccgtatcggaaggtgcggctggatcacctccttt

SEQ ID NO: 480 - DNA, 1528 bp, artificial sequence
  >GCF_003481845.1_02633 Agathobaculum_butyriciproducens_group
tttagagagtttgatcctggctcaggatgaacgctggcggcgtgcctaacacatgcaagtcgaacggagtcgttttggaaatctcttcggagatggaattctcgacttagtggcggacgggtgagtaacgcgtgagcaatctgcctttaagagggggataacagtcggaaacggctgctaataccgcataaagcattaaattcgcatgtttttgatgccaaaggagcaatccgcttttagatgagctcgcgtctgattagctggttggcggggtaacggcccaccaaggcgacgatcagtagccggactgagaggttgaacggccacattgggactgagacacggcccagactcctacgggaggcagcagtggggaatattgcgcaatgggggaaaccctgacgcagcaacgccgcgtgattgaagaaggcctcgggttgtaaagatctttaatcagggacgaaacaaatgacggtacctgaagaataagctccggctaactacgtgccagcagccgcggtaatacgtagggagcaagcgttatccggatttactgggtgtaaagggcgcgcaggcgggccggcaagttggaagtgaaatctatgggcttaacccataaactgctttcaaaactgttggtcttgagtgatggagaggcaggcggaattccgtgtgtagcggtgaaatgcgtagatatacggaggaacaccagtggcgaaggcggcctgctggacattaactgacgctgaggcgcgaaagcgtggggagcaaacaggattagataccctggtagtccacgccgtaaacgatggatactaggtgtgggaggtattgaccccttccgtgccgcagttaacacaataagtatcccacctggggagtacggccgcaaggttgaaactcaaaggaattgacgggggcccgcacaagcagtggagtatgtggtttaattcgaagcaacgcgaagaaccttaccaggtcttgacatcccgatgaccgccttagagataaggcttttcttcggaacatcggtgacaggtggtgcatggttgtcgtcagctcgtgtcgtgagatgttgggttaagtcccgcaacgagcgcaacccttacggttagttgatacgcaagatcactctagccggactgccgttgacaaaacggaggaaggtggggacgacgtcaaatcatcatgccccttatgacctgggctacacacgtactacaatggcagtcatacagagggaagcaaaaccgcgaggtggagcaaatccctaaaagctgtcccagttcagattgcaggctgcaacccgcctgcatgaagtcggaattgctagtaatcgcggatcagcatgccgcggtgaatacgttcccgggccttgtacacaccgcccgtcacaccatgagagccgtcaatacccgagtccgtagcctaaccttcttggagggcgcggccgaaggtaggggtggtaattagggtgaagtcgtaacaaggtagccgtatcggaaggtgcggctggatcacctccttt

SEQ ID NO: 481 - DNA, 1527 bp, artificial sequence
  >GCF_003481925.1_02888 Agathobaculum_butyriciproducens_group
tttagagagtttgatcctggctcaggatgaacgctggcggcgtgcctaacacatgcaagtcgaacggagtcgttttggaaaatccttcgggattggaattctcgacttagtggcggacgggtgagtaacgcgtgagcaatctgcctttaagagggggataacagtcggaaacggctgctaataccgcataaagcattaaattcgcatgtttttgatgccaaaggagcaatccgcttttagatgagctcgcgtctgattagctagttggcggggtaacggcccaccaaggcgacgatcagtagccggactgagaggttgaacggccacattgggactgagacacggcccagactcctacgggaggcagcagtggggaatattgcgcaatgggggaaaccctgacgcagcaacgccgcgtgattgaagaaggcctcgggttgtaaagatctttaatcagggacgaaacaaatgacggtacctgaagaataagctccggctaactacgtgccagcagccgcggtaatacgtagggagcaagcgttatccggatttactgggtgtaaagggcgcgcaggcgggccggcaagttggaagtgaaatctatgggcttaacccataaactgctttcaaaactgctggtcttgagtgatggagaggcaggcggaattccgtgtgtagcggtgaaatgcgtagatatacggaggaacaccagtggcgaaggcggcctgctggacattaactgacgctgaggcgcgaaagcgtggggagcaaacaggattagataccctggtagtccacgccgtaaacgatggatactaggtgtgggaggtattgaccccttccgtgccgcagttaacacaataagtatcccacctggggagtacggccgcaaggttgaaactcaaaggaattgacgggggcccgcacaagcagtggagtatgtggtttaattcgaagcaacgcgaagaaccttaccaggtcttgacatcccgatgaccggttcagagatgagccttttcttcggaacatcggtgacaggtggtgcatggttgtcgtcagctcgtgtcgtgagatgttgggttaagtcccgcaacgagcgcaacccttacggttagttgatacgcaagatcactctagccggactgccgttgacaaaacggaggaaggtggggacgacgtcaaatcatcatgccccttatgacctgggctacacacgtactacaatggcagtcatacagagggaagcaaaaccgcgaggtggagcaaatccctaaaagctgtcccagttcagattgcaggctgcaacccgcctgcatgaagtcggaattgctagtaatcgcggatcagcatgccgcggtgaatacgttcccgggccttgtacacaccgcccgtcacaccatgagagccgtcaatacccgagtccgtagcctaaccgtaaggagggcgcggccgaaggtaggggtggtaattagggtgaagtcgtaacaaggtagccgtatcggaaggtgcggctggatcacctccttt

SEQ ID NO: 482 - DNA, 1524 bp, artificial sequence
  >GCF_003602805.1_01329 Bacteroides_dorei_group
atgaagagtttgatcctggctcaggatgaacgctagctacaggcttaacacatgcaagtcgaggggcagcatggtcttagcttgctaaggccgatggcgaccggcgcacgggtgagtaacacgtatccaacctgccgtctactcttggacagccttctgaaaggaagattaatacaagatggcatcatgagtccgcatgttcacatgattaaaggtattccggtagacgatggggatgcgttccattagatagtaggcggggtaacggcccacctagtcttcgatggataggggttctgagaggaaggtcccccacattggaactgagacacggtccaaactcctacgggaggcagcagtgaggaatattggtcaatgggcgcaggcctgaaccagccaagtagcgtgaaggatgactgccctatgggttgtaaacttcttttataaaggaataaagtcgggtatgtatacccgtttgcatgtactttatgaataaggatcggctaactccgtgccagcagccgcggtaatacggaggatccgagcgttatccggatttattgggtttaaagggagcgtagatggatgtttaagtcagttgtgaaagtttgcggctcaaccgtaaaattgcagttgatactggatatcttgagtgcagttgaggcaggcggaattcgtggggtagcggtgaaatgcttagatatcacgaagaactccgattgcgaaggcagcctgctaagctgcaactgacattgaggctcgaaagtgtgggtatcaaacaggattagataccctggtagtccacacggtaaacgatgaatactcgctgtttgcgatatacagcaagcggccaagcgaaagcgttaagtattccacctggggagtacgccggcaacggtgaaactcaaaggaattgacgggggcccgcacaagcggaggaacatgtggtttaattcgatgatacgcgaggaaccttacccgggcttaaattgcagatgaattacggtgaaagccgtaagccgcaaggcatctgtgaaggtgctgcatggttgtcgtcagctcgtgccgtgaggtgtcggcttaagtgccataacgagcgcaacccttgttgtcagttactaacaggtttcgctgaggactctgacaagactgccatcgtaagatgtgaggaaggtggggatgacgtcaaatcagcacggcccttacgtccggggctacacacgtgttacaatggggggtacagagggccgctaccacgcgagtggatgccaatcccaaaaacctctctcagttcggactggagtctgcaacccgactccacgaagctggattcgctagtaatcgcgcatcagccacggcgcggtgaatacgttcccgggccttgtacacaccgcccgtcaagccatgggagccgggggtacctgaagtgcgtaaccgcgaggagcgccctagggtaaaactggtgactggggctaagtcgtaacaaggtagccgtaccggaaggtgcggctggaacacctcctt

SEQ ID NO: 483 - DNA, 1547 bp, artificial sequence
  >GCF_003603405.1_01427 Streptococcus_australis
taatgagagtttgatccttgctcaggatgaacgctggcggcgtgcctaatacatgcaagtagaacgctgaagcttggtgcttgcaccgagcggatgagttgcgaacgggtaagtaacgcgtaggtaacctgcctggtagcgggggataactattggaaacgatagctaataccgcataacaacagttgttgcatgacagctgtttgaaaggggcaattgctccactaccagatggacctgcgttgtattagctagttggtgaggtaacggctcaccaaggcgacgatacatagccgacctgagagggtgatcggccacactgggactgagacacggcccagactcctacgggaggcagcagtagggaatcttcggcaatggggggaaccctgaccgagcaacgccgcgtgagtgaagaaggttttcggatcgtaaagctctgttgtaagagaagaacgagtgtgagagtggaaagttcacactgtgacggtatcttaccagaaagggacggctaactacgtgccagcagccgcggtaatacgtaggtcccgagcgttatccggatttattgggcgtaaagcgagcgcaggcggttagataagtctgaagttaaaggctgtggcttaaccatagtacgctttggaaactgtttaacttgagtgcagaaggggagagtggaattccatgtgtagcggtgaaatgcgtagatatatggaggaacaccggtggcgaaagcggctctctggtctgtaactgacgctgaggctcgaaagcgtggggagcaaacaggattagataccctggtagtccacgccgtaaacgatgagtgctaggtgttgggtcctttccgggactcagtgccgcagctaacgcattaagcactccgcctggggagtacgaccgcaaggttgaaactcaaaggaattgacgggggcccgcacaagcggtggagcatgtggtttaattcgaagcaacgcgaagaaccttaccaggtcttgacatccctctgaccgctctagagatagagctttccttcgggacagaggtgacaggtggtgcatggttgtcgtcagctcgtgtcgtgagatgttgggttaagtcccgcaacgagcgcaacccctattgttagttgccatcattcagttgggcactctagcgagactgccggtaataaaccggaggaaggtggggatgacgtcaaatcatcatgccccttatgacctgggctacacacgtgctacaatggctggtacaacgagtcgcaagtcggtgacggcaagctaatctcttaaagccagtctcagttcggattgtaggctgcaactcgcctacatgaagtcggaatcgctagtaatcgcggatcagcacgccgcggtgaatacgttcccgggccttgtacacaccgcccgtcacaccacgagagtttgtaacacccgaagtcggtgaggtaaccttttaggagccagccgcctaaggtgggatagatgattggggtgaagtcgtaacaaggtagccgtatcggaaggtgcggctggatcacctccttt

SEQ ID NO: 484 - DNA, 1157 bp, artificial sequence
  >GCF_003603595.1_01957 Streptococcus_australis
ctgaccgagcaacgccgcgtgagtgaagaaggttttcggatcgtaaagctctgttgtaagagaagaacgagtgtgagagtggaaagttcacactgtgacggtatcttaccagaaagggacggctaactacgtgccagcagccgcggtaatacgtaggtcccgagcgttatccggatttattgggcgtaaagcgagcgcaggcggttagataagtctgaagttaaaggctgtggcttaaccatagtacgctttggaaactgtttaacttgagtgcagaaggggagagtggaattccatgtgtagcggtgaaatgcgtagatatatggaggaacaccggtggcgaaagcggctctctggcttgtaactgacgctgaggctcgaaagcgtggggagcaaacaggattagataccctggtagtccacgccgtaaacgatgagtgctaggtgttgggtcctttccgggactcagtgccgcagctaacgcattaagcactccgcctggggagtacgaccgcaaggttgaaactcaaaggaattgacgggggcccgcacaagcggtggagcatgtggtttaattcgaagcaacgcgaagaaccttaccaggtcttgacatccctctgaccgctctagagatagagttttccttcgggacagaggtgacaggtggtgcatggttgtcgtcagctcgtgtcgtgagatgttgggttaagtcccgcaacgagcgcaacccctattgttagttgccatcatttagttgggcactctagcgagactgccggtaataaaccggaggaaggtggggatgacgtcaaatcatcatgccccttatgacctgggctacacacgtgctacaatggctggtacaacgagtcgcaagtcggtgacggcaagctaatctcttaaagccagtctcagttcggattgtaggctgcaactcgcctacatgaagtcggaatcgctagtaatcgcggatcagcacgccgcggtgaatacgttcccgggccttgtacacaccgcccgtcacaccacgagagtttgtaacacccgaagtcggtgaggtaaccttttaggagccagccgcctaaggtgggatagatgattggggtgaagtcgtaacaaggtagccgtatcggaaggtgcggctggatcacctcctt

SEQ ID NO: 485 - DNA, 1525 bp, artificial sequence
  >GCF_003603635.1_03202 Bacteroides_dorei_group
atgaagagtttgatcctggctcaggatgaacgctagctacaggcttaacacatgcaagtcgaggggcagcatggtcttagcttgctaaggccgatggcgaccggcgcacgggtgagtaacacgtatccaacctgccgtctactcttggacagccttctgaaaggaagattaatacaagatggcatcatgagtccgcatgttcacatgattaaaggtattccggtagacgatggggatgcgttccattagatagtaggcggggtaacggcccacctagtcttcgatggataggggttctgagaggaaggtcccccacattggaactgagacacggtccaaactcctacgggaggcagcagtgaggaatattggtcaatgggcgcaggcctgaaccagccaagtagcgtgaaggatgactgccctatgggttgtaaacttcttttataaaggaataaagtcgggtatgtatacccgtttgcatgtactttatgaataaggatcggctaactccgtgccagcagccgcggtaatacggaggatccgagcgttatccggatttattgggtttaaagggagcgtagatggatgtttaagtcagttgtgaaagtttgcggctcaaccgtaaaattgcagttgatactggatatcttgagtgcagttgaggcaggcggaattcgtgggggagcggggaaatgcttagatatcacgaagaactccgattgcgaaggcagcctgctaagctgcaactgacattgaggctcgaaagtgtgggtatcaaacaggattagataccctggtagtccacacggtaaacgatgaatactcgctgtttgcgatatacagcaagcggccaagcgaaagcgttaagtattccacctggggagtacgccggcaacggtgaaactcaaaggaattgacgggggcccgcacaagcggaggaacatgtggtttaattcgatgatacgcgaggaaccttacccgggcttaaattgcagatgaattacggtgaaagccgtaagccgcaaggcatctgtgaaggtgctgcatggttgtcgtcagctcgtgccgtgaggtgtcggcttaagtgccataacgagcgcaacccttgttgtcagttactaacaggtttcgctgaggactctgacaagactgccatcgtaagatgtgaggaaggtggggatgacgtcaaatcagcacggcccttacgtccggggctacacacgtgttacaatggggggtacagagggccgctaccacgcgagtggatgccaatcccaaaaacctctctcagttcggactggagtctgcaacccgactccacgaagctggattcgctagtaatcgcgcatcagccacggcgcggtgaatacgttcccgggccttgtacacaccgcccgtcaagccatgggagccgggggtacctgaagtgcgtaaccgcgaggagcgccctagggtaaaactggtgactggggctaagtcgtaacaaggtagccgtaccggaaggtgcggctggaacacctccttt

SEQ ID NO: 486 - DNA, 1545 bp, artificial sequence
  >GCF_003627135.1_00084 Streptococcus_australis
aatgagagtttgatcctggctcaggatgaacgctggcggcgtgcctaatacatgcaagtagaacgctgaaggaaggagcttgctctttccagatgagttgcgaacgggtgagtaacgcgtaggtaacctgcctggtagcgggggataactattggaaacgatagctaataccgcataacaacagatgttgcatgacagctgtttgaaaggggcaattgctccactaccagatggacctgcgttgtattagctagttggtgaggtaacggcttaccaaggcgacgatacatagccgacctgagagggtgatcggccacactgggactgagacacggcccagactcctacgggaggcagcagtagggaatcttcggcaatggacgaaagtctgaccgagcaacgccgcgtgagtgaagaaggttttcggatcgtaaagctctgttgtaagagaagaacgagtgtgagagtggaaagttcacactgtgacggtatcttaccagaaagggacggctaactacgtgccagcagccgcggtaatacgtaggtcccgagcgttatccggatttattgggcgtaaagcgagcgcaggcggttagataagtctgaagttaaaggctgtggcttaaccatagtacgctttggaaactgtttaacttgagtgcagaaggggagagtggaattccatgtgtagcggtgaaatgcgtagatatatggaggaacaccggtggcgaaagcggctctctggtctgtaactgacgctgaggctcgaaagcgtggggagcaaacaggattagataccctggtagtccacgccgtaaacgatgagtgctaggtgttgggtcctttccgggactcagtgccgcagctaacgcattaagcactccgcctggggagtacgaccgcaaggttgaaactcaaaggaattgacgggggcccgcacaagcggtggagcatgtggtttaattcgaagcaacgcgaagaaccttaccaggtcttgacatccctctgaccgctctagagatagagttttccttcgggacagaggtgacaggtggtgcatggttgtcgtcagctcgtgtcgtgagatgttgggttaagtcccgcaacgagcgcaacccctattgttagttgccatcatttagttgggcactctagcgagactgccggtaataaaccggaggaaggtggggatgacgtcaaatcatcatgccccttatgacctgggctacacacgtgctacaatggctggtacaacgagtcgcaagtcggtgacggcaagctaatctcttaaagccagtctcagttcggattgtaggctgcaactcgcctacatgaagtcggaatcgctagtaatcgcggatcagcacgccgcggtgaatacgttcccgggccttgtacacaccgcccgtcacaccacgagagtttgtaacacccgaagtcggtgaggtaaccttttaggagccagccgcctaaggtgggatagatgattggggtgaagtcgtaacaaggtagccgtatcggaaggtgcggctggatcacctcctt

SEQ ID NO: 487 - DNA, 1572 bp, artificial sequence
  >GCF_003855655.1_00120 [Lactobacillus]_fermentum
tatgagagtttgatcctggctcaggatgaacgccggcggtgtgcctaatacatgcaagtcgaacgcgttggcccaattgattgatggtgcttgcacctgattgattttggttgccaacgagtggcggacgggtgagtaacacgtaggtaacctgcccagaagcgggggacaacatttggaaacagatgctaataccgcataacagcgttgttcgcatgaacaacgcttaaaagatggcttctcgctatcacttctggatggacctgcggtgcattagcttgttggtggggtaacggcctaccaaggcgatgatgcatagccgagttgagagactgatcggccacaatgggactgagacacggcccatactcctacgggaggcagcagtagggaatcttccacaatgggcgcaagcctgatggagcaacaccgcgtgagtgaagaagggtttcggctcgtaaagctctgttgttaaagaagaacacgtatgagagtaactgttcatacgttgacggtatttaaccagaaagtcacggctaactacgtgccagcagccgcggtaatacgtaggtggcaagcgttatccggatttattgggcgtaaagagagtgcaggcggttttctaagtctgatgtgaaagccttcggcttaaccggagaagtgcatcggaaactggataacttgagtgcagaagagggtagtggaactccatgtgtagcggtggaatgcgtagatatatggaagaacaccagtggcgaaggcggctacctggtctgcaactgacgctgagactcgaaagcatgggtagcgaacaggattagataccctggtagtccatgccgtaaacgatgagtgctaggtgttggagggtttccgcccttcagtgccggagctaacgcattaagcactccgcctggggagtacgaccgcaaggttgaaactcaaaggaattgacgggggcccgcacaagcggtggagcatgtggtttaattcgaagctacgcgaagaaccttaccaggtcttgacatcttgcgccaaccctagagatagggcgtttccttcgggaacgcaatgacaggtggtgcatggtcgtcgtcagctcgtgtcgtgagatgttgggttaagtcccgcaacgagcgcaacccttgttactagttgccagcattaagttgggcactctagtgagactgccggtgacaaaccggaggaaggtggggacgacgtcagatcatcatgccccttatgacctgggctacacacgtgctacaatggacggtacaacgagtcgcgaactcgcgagggcaagcaaatctcttaaaaccgttctcagttcggactgcaggctgcaactcgcctgcacgaagtcggaatcgctagtaatcgcggatcagcatgccgcggtgaatacgttcccgggccttgtacacaccgcccgtcacaccatgagagtttgtaacacccaaagtcggtggggtaaccttttaggagccagccgcctaaggtgggacagatgattagggtgaagtcgtaacaaggtagccgtaggagaacctgcggctggatcacctcctt

SEQ ID NO: 488 - DNA, 1572 bp, artificial sequence
  >GCF_003855655.1_00523 [Lactobacillus]_fermentum
tatgagagtttgatcctggctcaggatgaacgctggcggtgtgcctaatacatgcaagtcgaacgcgttggcccaattgattgatggtgcttgcacctgattgattttggtcgccaacgagtggcggacgggtgagtaacacgtaggtaacctgcccagaagcgggggacaacatttggaaacagatgctaataccgcataacaacgttgttcgcatgaacaacgcttaaaagatggcttctcgctatcacttttggatggacctgcggtgcattagcttgttggtagggtaatggcctaccaaggcgatgatgcatagccgagttgagagactgatcggccacaatgggactgagacacggcccatactcctacgggaggcagcagtagggaatcttccacaatgggcgcaagcctgatggagcaacaccgcgtgagtgaagaagggtttcggctcgtaaagctctgttgttaaagaagaacacgtatgagagtaactgttcatacgttgacggtatttaaccagaaagtcacggctaactacgtgccagcagccgcggtaatacgtaggtggcaagcgttatccggatttattgggcgtaaagagagtgcaggcggttttctaagtctgatgtgaaagccttcggcttaaccggagaagtgcatcggaaactggataacttgagtgcagaagagggtagtggaactccatgtgtagcggtggaatgcgtagatatatggaagaacaccagtggcgaaggcggctacctggtctgcaactgacgctgagactcgaaagcatgggtagcgaacaggattagataccctggtagtccatgccgtaaacgatgagtgctaggtgttggagggtttccgcccttcagtgccggagctaacgcattaagcactccgcctggggagtacgaccgcaaggttgaaactcaaaggaattgacgggggcccgcacaagcggtggagcatgtggtttaattcgaagctacgcgaagaaccttaccaggtcttgacatcttgcgccaaccctagagatagggcgtttccttcgggaacgcaatgacaggtggtgcatggtcgtcgtcagctcgtgtcgtgagatgttgggttaagtcccgcaacgagcgcaacccttgttactagttgccagcattaagttgggcactctagtgagactgccggtgacaaaccggaggaaggtggggacgacgtcagatcatcatgccccttatgacctgggctacacacgtgctacaatggacggtacaacgagtcgcgaactcgcgagggcaagcaaatctcttaaaaccgttctcagttcggactgcaggctgcaactcgcctgcacgaagtcggaatcgctagtaatcgcggatcagcatgccgcggtgaatacgttcccgggccttgtacacaccgcccgtcacaccatgagagtttgtaacacccaaagtcggtggggtaaccttttaggagccagccgcctaaggtgggacagatgattagggtgaagtcgtaacaaggtagccgtaggagaacctgcggctggatcacctcctt

SEQ ID NO: 489 - DNA, 1572 bp, artificial sequence
  >GCF_003855655.1_00603 [Lactobacillus]_fermentum
tatgagagtttgatcctggctcaggatgaacgccggcggtgtgcctaatacatgcaagtcgaacgcgttggcccaattgattgacggtgcttgcacctgattgattttggttgccaacgagtggcggacgggtgagtaacacgtaggtaacctgcccagaagcgggggacaacatttggaaacagatgctaataccgcataacagcgttgttcgcatgaacaacgcttaaaagatggcttctcgctatcacttctggatggacctgcggtgcattagcttgttggtggggtaacggcctaccaaggcgatgatgcatagccgagttgagagactgatcggccacaatgggactgagacacggcccatactcctacgggaggcagcagtagggaatcttccacaatgggcgcaagcctgatggagcaacaccgcgtgagtgaagaagggtttcggctcgtaaagctctgttgttaaagaagaacacgtatgagagtaactgttcatacgttgacggtatttaaccagaaagtcacggctaactacgtgccagcagccgcggtaatacgtaggtggcaagcgttatccggatttattgggcgtaaagagagtgcaggcggttttctaagtctgatgtgaaagccttcggcttaaccggagaagtgcatcggaaactggataacttgagtgcagaagagggtagtggaactccatgtgtagcggtggaatgcgtagatatatggaagaacaccagtggcgaaggcggctacctggtctgcaactgacgctgagactcgaaagcatgggtagcgaacaggattagataccctggtagtccatgccgtaaacgatgagtgctaggtgttggagggtttccgcccttcagtgccggagctaacgcattaagcactccgcctggggagtacgaccgcaaggttgaaactcaaaggaattgacgggggcccgcacaagcggtggagcatgtggtttaattcgaagctacgcgaagaaccttaccaggtcttgacatcttgcgccaaccctagagatagggcgtttccttcgggaacgcaatgacaggtggtgcatggtcgtcgtcagctcgtgtcgtgagatgttgggttaagtcccgcaacgagcgcaacccttgttactagttgccagcattaagttgggcactctagtgagactgccggtgacaaaccggaggaaggtggggacgacgtcagatcatcatgtcccttatgacctgggctacacacgtgctacaatggacggtacaacgagtcgcgaactcgcgagggcaagcaaatctcttaaaaccgttctcagttcggactgcaggctgcaactcgcctgcacgaagtcggaatcgctagtaatcgcggatcagcatgccgcggtgaatacgttcccgggccttgtacacaccgcccgtcacaccatgagagtttgtaacacccaaagtcggtggggtaaccttttaggagccagccgcctaaggtgggacagatgattagggtgaagtcgtaacaaggtagccgtaggagaacctgcggctggatcacctcctt

SEQ ID NO: 490 - DNA, 1573 bp, artificial sequence
  >GCF_003855655.1_00644 [Lactobacillus]_fermentum
tatgagagtttgatcctggctcaggatgaacgccggcggtgtgcctaatacatgcaagtcgaacgcgttggcccaattgattgatggtgcttgcacctgatagattttggtcgccaacgagtggcggacgggtgagtaacacgtaggtaacctgcccagaagcgggggacaacatttggaaacagatgctaataccgcataacaacgttgttcgcatgaacaacgcttaaaagatggcttctcgctatcacttctggatggacctgcggtgcattagcttgttggtggggtaatggcctaccaaggcgatgatgcatagccgagttgagagactgatcggccacaatgggactgagacacggcccatactcctacgggaggcagcagtagggaatcttccacaatgggcgcaagcctgatggagcaacaccgcgtgagtgaagaagggtttcggctcgtaaagctctgttgttaaagaagaacacgtatgagagtaactgttcatacgttgacggtatttaaccagaaagtcacggctaactacgtgccagcagccgcggtaatacgtaggtggcaagcgttatccggatttattgggcgtaaagagagtgcaggcggttttctaagtctgatgtgaaagccttcggcttaaccggagaagtgcatcggaaactggataacttgagtgcagaagagggtagtggaactccatgtgtagcggtggaatgcgtagatatatggaagaacaccagtggcgaaggcggctacctggtctgcaactgacgctgagactcgaaagcatgggtagcgaacaggattagataccctggtagtccatgccgtaaacgatgagtgctaggtgttggagggtttccgcccttcagtgccggagctaacgcattaagcactccgcctggggagtacgaccgcaaggttgaaactcaaaggaattgacgggggcccgcacaagcggtggagcatgtagtttaattcgaagctacgcgaagaaccttaccaggtcttgacatcttgcgccaaccctagagatagggcgtttccttcgggaacgcaatgacaggtggtgcatggtcgtcgtcagctcgtgtcgtgagatgttgggttaagtcccgcaacgagcgcaacccttgttactagttgccagcattaagttgggcactctagtgagactgccggtgacaaaccggaggaaggtggggacgacgtcagatcatcatgccccttatgacctgggctacacacgtgctacaatggacggtacaacgagtcgcgaactcgcgagggcaagcaaatctcttaaaaccgttctcagttcggactgcaggctgcaactcgcctgcacgaagtcggaatcgctagtaatcgcggatcagcatgccgcggtgaatacgttcccgggccttgtacacaccgcccgtcacaccatgagagtttgtaacacccaaagtcggtggggtaaccttttaggagccagccgcctaaggtgggacagatgattagggtgaagtcgtaacaaggtagccgtaggagaacctgcggctggatcacctccttt

SEQ ID NO: 491 - DNA, 1572 bp, artificial sequence
  >GCF_003860425.1_00230 [Lactobacillus]_fermentum
tatgagagtttgatcctggctcaggatgaacgccggcggtgtgcctaatacatgcaagtcgaacgcgttggcccaattgcttgatggtgcttgcacctgattgattttggtcgccaacgagtggcggacgggtgagtaacacgtaggtaacctgcccagaagcgggggacaacatttggaaacagatgctaataccgcataacaacgttgttcgcatgaacaacgcttaaaagatggcttcttgctatcacttctggatggacctgcggtgcattagcttgttggtggggtaacggcctaccaaggcgatgatgcatagccgagttgagagactgatcggccacaatgggactgagacacggcccatactcctacgggaggcagcagtagggaatcttccacaatgggcgcaagcctgatggagcaacaccgcgtgagtgaagaagggtttcggctcgtaaagctctgttgttaaagaagaacacgtatgagagtaactgttcatacgttgacggtatttaaccagaaagtcacggctaactacgtgccagcagccgcggtaatacgtaggtggcaagcgttatccggatttattgggcgtaaagagagtgcaggcggttttctaagtctgatgtgaaagccttcggcttaaccggagaagtgcatcggaaactggataacttgagtgcagaagagggtagtggaactccatgtgtagcggtggaatgcgtagatatatggaagaacaccagtggcgaaggcggctacctggtctgcaactgacgctgagactcgaaagcatgggtagcgaacaggattagataccctggtagtccatgccgtaaacgatgagtgctaggtgttggagggtttccgcccttcagtgccggagctaacgcattaagcactccgcctggggagtacgaccgcaaggttgaaactcaaaggaattgacgggggcccgcacaagcggtggagcatgtggtttaattcgaagctacgcgaagaaccttaccaggtcttgacatcttgcgccaaccctagagatagggcgtttccttcgggaacgcaatgacaggtggtgcatggtcgtcgtcagctcgtgtcgtgagatgttgggttaagtcccgcaacgagcgcaacccttgttactagttgccagcattaagttgggcactctagtgagactgccggtgacaaaccggaggaaggtggggacgacgtcagatcatcatgccccttatgacctgggctacacacgtgctacaatggacggtacaacgagtcgcgaactcgcgagggcaagcaaatctcttaaaaccgttctcagttcggactgcaggctgcaactcgcctgcacgaagtcggaatcgctagtaatcgcggatcagcatgccgcggtgaatacgttcccgggccttgtacacaccgcccgtcacaccatgagagtttgtaacacccaaagtcggtggggtaaccttttaggagccagccgcctaaggtgggacagatgattagggtgaagtcgtaacaaggtagccgtaggagaacctgcggctggatcacctcctt

SEQ ID NO: 492 - DNA, 1572 bp, artificial sequence
  >GCF_003860425.1_00588 [Lactobacillus]_fermentum
tatgagagtttgatcctggctcaggatgaacgctggcggtgtgcctaatacatgcaagtcgaacgcgttggcccaattgattgatggtgctcgcacctgattaattttggtcgccaacgagtggcggacgggtgagtaacacgtaggtaacctgcccagaagcgggggataacatttggaaacagatgctaataccgcataacaacgttgttcgcatgaacaacgcttaaaagatggcttctcgctatcacttctggatggacctgcggtgcattagcttgttggtggggtaatggcctaccaaggcgatgatgcatagccgagttgagagactgatcggccacaatgggactgagacacggcccatactcctacgggaggcagcagtagggaatcttccacaatgggcgcaagcctgatggagcaacaccgcgtgagtgaagaagggtttcggctcgtaaagctctgttgttaaagaagaacacgtatgagagtaactgttcatacgttgacggtatttaaccagaaagtcacggctaactacgtgccagcagccgcggtaatacgtaggtggcaagcgttatccggatttattgggcgtaaagagagtgcaggcggttttctaagtctgatgtgaaagccttcggcttaaccggagaagtgcatcggaaactggataacttgagtgcagaagagggtagtggaactccatgtgtagcggtggaatgcgtagatatatggaagaacaccagtggcgaaggcggctacctggtctgcaactgacgctgagactcgaaagcatgggtagcgaacaggattagataccctggtagtccatgccgtaaacgatgagtgctaggtgttggagggtttccgcccttcagtgccggagctaacgcattaagcactccgcctggggagtacgaccgcaaggttgaaactcaaaggaattgacgggggcccgcacaagcggtggagcatgtggtttaattcgaagctacgcgaagaaccttaccaggtcttgacatcttgcgccaaccctagagatagggcgtttccttcgggaacgcaatgacaggtggtgcatggtcgtcgtcagctcgtgtcgtgagatgttgggttaagtcccgcaacgagcgcaacccttgttactagttgccagcattaagttgggcactctagtgagactgccggtgacaaaccggaggaaggtggggacgacgtcagatcatcatgccccttatgacctgggctacacacgtgctacaatggacggtacaacgagtcgcgaactcgcgagggcaagcaaatctcttaaaaccgttctcagttcggactgcaggctgcaactcgcctgcacgaagtcggaatcgctagtaatcgcggatcagcatgccgcggtgaatacgttcccgggccttgtacacaccgcccgtcacaccatgagagtttgtaacacccaaagtcggtggggtaaccttttaggagccagccgcctaaggtgggacagatgattagggtgaagtcgtaacaaggtagccgtaggagaacctgcggctggatcacctcctt

SEQ ID NO: 493 - DNA, 1573 bp, artificial sequence
  >GCF_003860425.1_01433 [Lactobacillus]_fermentum
tatgagagtttgatcctggctcaggatgaacgccggcggtgtgcctaatacatgcaagtcgaacgcgttggcccaattgattgatggtgcttgcacctgattgattttggtcgccaacgagtggcggacgggtgagtaacacgtaggtaacctacccagaagcgggggacaacatttggaaacagatgctaataccgcataacaacgttgttcgcatgaacaacgcttaaaagatggcttctcgctatcacttctggatggacctgcggtgcattagcttgttggtggggtaacggcctaccaaggcgatgatgcatagccgagttgagagactgatcggccacaatgggactgagacacggcccatactcctacgggaggcagcagtagggaatcttccacaatgggcgcaagcctgatggagcaacaccgcgtgagtgaagaagggtttcggctcgtaaagctctgttgttaaagaagaacacgtatgagagtaactgttcatacgttgacggtatttaaccagaaagtcacggctaactacgtgccagcagccgcggtaatacgtaggtggcaagcgttatccggatttattgggcgtaaagagagtgcaggcggttttctaagtctgatgtgaaagccttcggcttaaccggagaagtgcatcggaaactggataacttgagtgcagaagagggtagtggaactccatgtgtagcggtggaatgcgtagatatatggaagaacaccagtggcgaaggcggctacctggtctgcaactgacgctgagactcgaaagcatgggtagcgaacaggattagataccctggtagtccatgccgtaaacgatgagtgctaggtgttggagggtttccgcccttcagtgccggagctaacgcattaagcactccgcctggggagtacgaccgcaaggttgaaactcaaaggaattgacgggggcccgcacaagcggtggagcatgtggtttaattcgaagctacgcgaagaaccttaccaggtcttgacatcttgcgccaaccctagagatagggcgtttccttcgggaacgcaatgacaggtggtgcatggtcgtcgtcagctcgtgtcgtgagatgttgggttaagtcccgcaacgagcgcaacccttgttactagttgccagcattaagttgggcactctagtgagactgccggtgacaaaccggaggaaggtggggacgacgtcagatcatcatgccccttatgacctgggctacacacgtgctacaatggacggtacaacgagtcgcgaactcgcgagggcaagcaaatctcttaaaaccgttctcagttcggactgcaggctgcaactcgcctgcacgaagtcggaatcgctagtaatcgcggatcagcatgccgcggtgaatacgttcccgggccttgtacacaccgcccgtcacaccatgagagtttgtaacacccaaagtcggtggggtaaccttttaggagccagccgcctaaggtgggacagatgattagggtgaagtcgtaacaaggtagccgtaggagaacctgcggctggatcacctccttt

SEQ ID NO: 494 - DNA, 1546 bp, artificial sequence
  >GCF_003942525.1_01988 Streptococcus_parasanguinis
  misc_feature (183)..(183): n is a, c, g, or t
  misc_feature (187)..(187): n is a, c, g, or t
  misc_feature (190)..(190): n is a, c, g, or t
  misc_feature (198)..(198): n is a, c, g, or t
  misc_feature (203)..(203): n is a, c, g, or t
  misc_feature (282)..(282): n is a, c, g, or t
  misc_feature (665)..(666): n is a, c, g, or t
  misc_feature (747)..(748): n is a, c, g, or t
taatgagagtttgatcctggctcaggatgaacgctggcggcgtgcctaatacatgcaagtagaacgctgaagcttggtgcttgcaccgagcggatgagttgcgaacgggtgagtaacgcgtaggtaacctgcctcttagcgggggataactattggaaacgatagctaataccgcataaaagncganatngcatgatnttganttgaaaggtgcaattgcatcactaagagatggacctgcgttgtattagctagttggtgaggtaacggctcaccaaggcnacgatacatagccgacctgagagggtgatcggccacactgggactgagacacggcccagactcctacgggaggcagcagtagggaatcttcggcaatgggggcaaccctgaccgagcaacgccgcgtgagtgaagaaggttttcggatcgtaaagctctgttgtaagagaagaacgagtgtgagagtggaaagttcacactgtgacggtaacttaccagaaagggacggctaactacgtgccagcagccgcggtaatacgtaggtcccgagcgttatccggatttattgggcgtaaagcgagcgcaggcggttagataagtctgaagttaaaggctgtggcttaaccatagtacgctttggaaactgtttaacttgagtgcannaggggagagtggaattccatgtgtagcggtgaaatgcgtagatatatggaggaacaccggtggcgaaagcggctctctggnntgtaactgacgctgaggctcgaaagcgtggggagcaaacaggattagataccctggtagtccacgccgtaaacgatgagtgctaggtgttgggtcctttccgggactcagtgccgcagctaacgcattaagcactccgcctggggagtacgaccgcaaggttgaaactcaaaggaattgacgggggcccgcacaagcggtggagcatgtggtttaattcgaagcaacgcgaagaaccttaccaggtcttgacatccctctgaccgctctagagatagagttttccttcgggacagaggtgacaggtggtgcatggttgtcgtcagctcgtgtcgtgagatgttgggttaagtcccgcaacgagcgcaacccctattgttagttgccatcattgagttgggcactctagcgagactgccggtaataaaccggaggaaggtggggatgacgtcaaatcatcatgccccttatgacctgggctacacacgtgctacaatggctggtacaacgagtcgcgagtcggtgacggcaagctaatctcttaaagccagtctcagttcggattgtaggctgcaactcgcctacatgaagtcggaatcgctagtaatcgcggatcagcacgccgcggtgaatacgttcccgggccttgtacacaccgcccgtcacaccacgagagtttgtaacacccgaagtcggtgaggtaaccgtaaggagccagccgcctaaggtgggatagatgattggggtgaagtcgtaacaaggtagccgtatcggaaggtgcggctggatcacctccttt

SEQ ID NO: 495 - DNA, 1553 bp, artificial sequence
  >GCF_003943175.1_01765 Streptococcus_gordonii
  misc_feature (213)..(213): n is a, c, g, or t
  misc_feature (218)..(218): n is a, c, g, or t
  misc_feature (224)..(224): n is a, c, g, or t
aatgagagtttgatcctggctcaggacgaacgctggcggcgtgcctaatacatgcaagtagaacgcacagtatataccgtagcttgctacaccatagactgtgagttgcgaacgggtgagtaacgcgtaggtaacctgcctggtagcgggggataactattggaaacgatagctaataccgcataatattaattattgcatgataattgattnaaagntgcaantgcatcactaccagatggacctgcgttgtattagctagtaggtgaggtaacggctcacctaggcgacgatacatagccgacctgagagggtgatcggccacactgggactgagacacggcccagactcctacgggaggcagcagtagggaatcttcggcaatggacgaaagtctgaccgagcaacgccgcgtgagtgaagaaggttttcggatcgtaaagctctgttgtaagagaagaacgggtgtgagagtggaaagttcacactgtgacggtatcttaccagaaagggacggctaactacgtgccagcagccgcggtaatacgtaggtcccgagcgttgtccggatttattgggcgtaaagcgagcgcaggcggttagataagtctgaagttaaaggctgtggcttaaccatagtacgctttggaaactgtttaacttgagtgcagaaggggagagtggaattccatgtgtagcggtgaaatgcgtagatatatggaggaacaccggtggcgaaagcggctctctggtctgtaactgacgctgaggctcgaaagcgtggggagcgaacaggattagataccctggtagtccacgccgtaaacgatgagtgctaggtgttaggccctttccggggcttagtgccgcagctaacgcattaagcactccgcctggggagtacgaccgcaaggttgaaactcaaaggaattgacgggggcccgcacaagcggtggagcatgtggtttaattcgaagcaacgcgaagaaccttaccaggtcttgacatcccgatgcccgctctagagatagagttttacttcggtacatcggtgacaggtggtgcatggttgtcgtcagctcgtgtcgtgagatgttgggttaagtcccgcaacgagcgcaacccttattgttagttgccatcattcagttgggcactctagcgagactgccggtaataaaccggaggaaggtggggatgacgtcaaatcatcatgccccttatgacctgggctacacacgtgctacaatggctggtacaacgagtcgcaagtcggtgacggcaagctaatctcttaaagccagtctcagttcggattgtaggctgcaactcgcctacatgaagtcggaatcgctagtaatcgcggatcagcacgccgcggtgaatacgttcccgggccttgtacacaccgcccgtcacaccacgagagtttgtaacacccgaagtcggtgaggtaaccttttaggagccagccgcctaaggtgggatagatgattggggtgaagtcgtaacaaggtagccgtatcggaaggtgcggctggatcacctcctt

SEQ ID NO: 496 - DNA, 1553 bp, artificial sequence
  >GCF_003943355.1_02130 Streptococcus_gordonii
  misc_feature (209)..(209): n is a, c, g, or t
aatgagagtttgatcctggctcaggacgaacgctggcggcgtgcctaatacatgcaagtagaacgcacagtttataccgtagcttgctacaccatagactgtgagttgcgaacgggtgagtaacgcgtaggtaacctgcctggtagcgggggataactattggaaacgatagctaataccgcataatattaattattgcatgataattnattgaaaggtgcaattgcaccactaccagatggacctgcgttgtattagctagtaggtgaggtaacggctcacctaggcgacgatacatagccgacctgagagggtgatcggccacactgggactgagacacggcccagactcctacgggaggcagcagtagggaatcttcggcaatggacgaaagtctgaccgagcaacgccgcgtgagtgaagaaggttttcggatcgtaaagctctgttgtaagagaagaacgggtgtgagagtggaaagttcacactgtgacggtatcttaccagaaagggacggctaactacgtgccagcagccgcggtaatacgtaggtcccgagcgttgtccggatttattgggcgtaaagcgagcgcaggcggttagataagtctgaagttaaaggctgtggcttaaccatagtacgctttggaaactgtttaacttgagtgcagaaggggagagtggaattccatgtgtagcggtgaaatgcgtagatatatggaggaacaccggtggcgaaagcggctctctggtctgtaactgacgctgaggctcgaaagcgtggggagcgaacaggattagataccctggtagtccacgccgtaaacgatgagtgctaggtgttaggccctttccggggcttagtgccgcagctaacgcattaagcactccgcctggggagtacgaccgcaaggttgaaactcaaaggaattgacgggggcccgcacaagcggtggagcatgtggtttaattcgaagcaacgcgaagaaccttaccaggtcttgacatcccgatgcccgctctagagatagagttttacttcggtacatcggtgacaggtggtgcatggttgtcgtcagctcgtgtcgtgagatgttgggttaagtcccgcaacgagcgcaacccttattgttagttgccatcattcagttgggcactctagcgagactgccggtaataaaccggaggaaggtggggatgacgtcaaatcatcatgccccttatgacctgggctacacacgtgctacaatggctggtacaacgagtcgcaagtcggtgacggcaagctaatctcttaaagccagtctcagttcggattgtaggctgcaactcgcctacatgaagtcggaatcgctagtaatcgcggatcagcacgccgcggtgaatacgttcccgggccttgtacacaccgcccgtcacaccacgagagtttgtaacacccgaagtcggtgaggtaaccttttaggagccagccgcctaaggtgggatagatgattggggtgaagtcgtaacaaggtagccgtatcggaaggtgcggctggatcacctcctt

SEQ ID NO: 497 - DNA, 1322 bp, artificial sequence
  >GCF_003943615.1_01822 Streptococcus_australis
  misc_feature (916)..(916): n is a, c, g, or t
taccagatggacctgcgttgtattagctagttggtgaggtaacggctcaccaaggcgacgatacatagccgacctgagagggtgatcggccacactgggactgagacacggcccagactcctacgggaggcagcagtagggaatcttcggcaatggacggaagtctgaccgagcaacgccgcgtgagtgaagaaggttttcggatcgtaaagctctgttgtaagagaagaacgagtgtgagagtggaaagttcacactgtgacggtatcttaccagaaagggacggctaactacgtgccagcagccgcggtaatacgtaggtcccgagcgttatccggatttattgggcgtaaagcgagcgcaggcggttagataagtctgaagttaaaggctgtggcttaaccatagtacgctttggaaactgtttaacttgagtgcagaaggggagagtggaattccatgtgtagcggtgaaatgcgtagatatatggaggaacaccggtggcgaaagcggctctctggtctgtaactgacgctgaggctcgaaagcgtggggagcaaacaggattagataccctggtagtccacgccgtaaacgatgagtgctaggtgttgggtcctttccgggactcagtgccgcagctaacgcattaagcactccgcctggggagtacgaccgcaaggttgaaactcaaaggaattgacgggggcccgcacaagcggtggagcatgtggtttaattcgaagcaacgcgaagaaccttaccaggtcttgacatccctctgaccgctctagagatagagttttccttcgggacagaggtgacaggtggtgcatggttgtcgtcagctcgtgtcgtgagatgttgggttaagtcccgcaacgagcgcaacccctattgttagttgccatcattnagttgggcactctagcgagactgccggtaataaaccggaggaaggtggggatgacgtcaaatcatcatgccccttatgacctgggctacacacgtgctacaatggctggtacaacgagtcgcaagtcggtgacggcaagctaatctcttaaagccagtctcagttcggattgtaggctgcaactcgcctacatgaagtcggaatcgctagtaatcgcggatcagcacgccgcggtgaatacgttcccgggccttgtacacaccgcccgtcacaccacgagagtttgtaacacccgaagtcggtgaggtaaccttttaggagccagccgcctaaggtgggatagatgattggggtgaagtcgtaacaaggtagccgtatcggaaggtgcggctggatcacctccttt

SEQ ID NO: 498 - DNA, 1162 bp, artificial sequence
  >GCF_003943625.1_01697 Streptococcus_australis
  misc_feature (281)..(282): n is a, c, g, or t
  misc_feature (363)..(364): n is a, c, g, or t
  misc_feature (644)..(644): n is a, c, g, or t
gaagtctgaccgagcaacgccgcgtgagtgaagaaggttttcggatcgtaaagctctgttgtaagagaagaacgagtgtgagagtggaaagttcacactgtgacggtatcttaccagaaagggacggctaactacgtgccagcagccgcggtaatacgtaggtcccgagcgttatccggatttattgggcgtaaagcgagcgcaggcggttagataagtctgaagttaaaggctgtggcttaaccatagtacgctttggaaactgtttaacttgagtgcannaggggagagtggaattccatgtgtagcggtgaaatgcgtagatatatggaggaacaccggtggcgaaagcggctctctggnntgtaactgacgctgaggctcgaaagcgtggggagcaaacaggattagataccctggtagtccacgccgtaaacgatgagtgctaggtgttgggtcctttccgggactcagtgccgcagctaacgcattaagcactccgcctggggagtacgaccgcaaggttgaaactcaaaggaattgacgggggcccgcacaagcggtggagcatgtggtttaattcgaagcaacgcgaagaaccttaccaggtcttgacatccctctgaccgctctagagatagagntttccttcgggacagaggtgacaggtggtgcatggttgtcgtcagctcgtgtcgtgagatgttgggttaagtcccgcaacgagcgcaacccctattgttagttgccatcattcagttgggcactctagcgagactgccggtaataaaccggaggaaggtggggatgacgtcaaatcatcatgccccttatgacctgggctacacacgtgctacaatggctggtacaacgagtcgcaagtcggtgacggcaagctaatctcttaaagccagtctcagttcggattgtaggctgcaactcgcctacatgaagtcggaatcgctagtaatcgcggatcagcacgccgcggtgaatacgttcccgggccttgtacacaccgcccgtcacaccacgagagtttgtaacacccgaagtcggtgaggtaaccttttaggagccagccgcctaaggtgggatagatgattggggtgaagtcgtaacaaggtagccgtatcggaaggtgcggctggatcacctcctt

SEQ ID NO: 499 - DNA, 1544 bp, artificial sequence
  >GCF_003943675.1_01878 Streptococcus_australis
aatgagagtttgatcctggctcaggatgaacgctggcggcgtgcctaatacatgcaagtagaacgctgaaggaggagcttgctctttccggatgagttgcgaacgggtgagtaacgcgtaggtaacctgcctggtagcgggggataactattggaaacgatagctaataccgcataacagtagatattgcatgatatctgcttgaaaggggcaattgctccactaccagatggacctgcgttgtattagctagttggtgaggtaacggctcaccaaggcgacgatacatagccgacctgagagggtgatcggccacactgggactgagacacggcccagactcctacgggaggcagcagtagggaatcttcggcaatggacggaagtctgaccgagcaacgccgcgtgagtgaagaaggttttcggatcgtaaagctctgttgtaagagaagaacgagtgtgagagtggaaagttcacactgtgacggtatcttaccagaaagggacggctaactacgtgccagcagccgcggtaatacgtaggtcccgagcgttatccggatttattgggcgtaaagcgagcgcaggcggttagataagtctgaagttaaaggctgtggcttaaccatagtacgctttggaaactgtttaacttgagtgcaagaggggagagtggaattccatgtgtagcggtgaaatgcgtagatatatggaggaacaccggtggcgaaagcggctctctggcttgtaactgacgctgaggctcgaaagcgtggggagcaaacaggattagataccctggtagtccacgccgtaaacgatgagtgctaggtgttgggtcctttccgggactcagtgccgcagctaacgcattaagcactccgcctggggagtacgaccgcaaggttgaaactcaaaggaattgacgggggcccgcacaagcggtggagcatgtggtttaattcgaagcaacgcgaagaaccttaccaggtcttgacatccctctgaccgctctagagatagagttttccttcgggacagaggtgacaggtggtgcatggttgtcgtcagctcgtgtcgtgagatgttgggttaagtcccgcaacgagcgcaacccctattgttagttgccatcattcagttgggcactctagcgagactgccggtaataaaccggaggaaggtggggatgacgtcaaatcatcatgccccttatgacctgggctacacacgtgctacaatggctggtacaacgagtcgcaagtcggtgacggcaagctaatctcttaaagccagtctcagttcggattgtaggctgcaactcgcctacatgaagtcggaatcgctagtaatcgcggatcagcacgccgcggtgaatacgttcccgggccttgtacacaccgcccgtcacaccacgagagtttgtaacacccgaagtcggtgaggtaaccttttaggagccagccgcctaaggtgggatagatgattggggtgaagtcgtaacaaggtagccgtatcggaaggtgcggctggatcacctcctt

SEQ ID NO: 500 - DNA, 1553 bp, artificial sequence
  >GCF_003944105.1_01999 Streptococcus_gordonii
  misc_feature (191)..(191): n is a, c, g, or t
  misc_feature (209)..(209): n is a, c, g, or t
  misc_feature (218)..(218): n is a, c, g, or t
  misc_feature (222)..(222): n is a, c, g, or t
  misc_feature (229)..(229): n is a, c, g, or t
aatgagagtttgatcctggctcaggacgaacgctggcggcgtgcctaatacatgcaagtagaacgcacagtttataccgtagcttgctacaccatagactgtgagttgcgaacgggtgagtaacgcgtaggtaacctgcctggtagcgggggataactattggaaacgatagctaataccgcataatattnattattgcatgataattnattgaaagntgcnattgcancactaccagatggacctgcgttgtattagctagtaggtgaggtaacggctcacctaggcgacgatacatagccgacctgagagggtgatcggccacactgggactgagacacggcccagactcctacgggaggcagcagtagggaatcttcggcaatggacgaaagtctgaccgagcaacgccgcgtgagtgaagaaggttttcggatcgtaaagctctgttgtaagagaagaacgggtgtgagagtggaaagttcacactgtgacggtatcttaccagaaagggacggctaactacgtgccagcagccgcggtaatacgtaggtcccgagcgttgtccggatttattgggcgtaaagcgagcgcaggcggttagataagtctgaagttaaaggctgtggcttaaccatagtacgctttggaaactgtttaacttgagtgcagaaggggagagtggaattccatgtgtagcggtgaaatgcgtagatatatggaggaacaccggtggcgaaagcggctctctggtctgtaactgacgctgaggctcgaaagcgtggggagcgaacaggattagataccctggtagtccacgccgtaaacgatgagtgctaggtgttaggccctttccggggcttagtgccgcagctaacgcattaagcactccgcctggggagtacgaccgcaaggttgaaactcaaaggaattgacgggggcccgcacaagcggtggagcatgtggtttaattcgaagcaacgcgaagaaccttaccaggtcttgacatcccgatgcccgctctagagatagagttttacttcggtacatcggtgacaggtggtgcatggttgtcgtcagctcgtgtcgtgagatgttgggttaagtcccgcaacgagcgcaacccttattgttagttgccatcattcagttgggcactctagcgagactgccggtaataaaccggaggaaggtggggatgacgtcaaatcatcatgccccttatgacctgggctacacacgtgctacaatggctggtacaacgagtcgcaagtcggtgacggcaagctaatctcttaaagccagtctcagttcggattgtaggctgcaactcgcctacatgaagtcggaatcgctagtaatcgcggatcagcacgccgcggtgaatacgttcccgggccttgtacacaccgcccgtcacaccacgagagtttgtaacacccgaagtcggtgaggtaaccttttaggagccagccgcctaaggtgggatagatgattggggtgaagtcgtaacaaggtagccgtatcggaaggtgcggctggatcacctcctt

SEQ ID NO: 501 - DNA, 1337 bp, artificial sequence
  >GCF_003944345.1_01810 Streptococcus_australis
  misc_feature (818)..(818): n is a, c, g, or t
aaaaaacaataacactaccagatggacctgcgttgtattagctagttggtgaggtaacggctcaccaaggcgacgatacatagccgacctgagagggtgatcggccacactgggactgagacacggcccagactcctacgggaggcagcagtagggaatcttcggcaatggacggaagtctgaccgagcaacgccgcgtgagtgaagaaggttttcggatcgtaaagctctgttgtaagagaagaacgagtgtgagagtggaaagttcacactgtgacggtatcttaccagaaagggacggctaactacgtgccagcagccgcggtaatacgtaggtcccgagcgttatccggatttattgggcgtaaagcgagcgcaggcggttagataagtctgaagttaaaggctgtggcttaaccatagtacgctttggaaactgtttaacttgagtgcaagaggggagagtggaattccatgtgtagcggtgaaatgcgtagatatatggaggaacaccggtggcgaaagcggctctctggcttgtaactgacgctgaggctcgaaagcgtggggagcaaacaggattagataccctggtagtccacgccgtaaacgatgagtgctaggtgttgggtcctttccgggactcagtgccgcagctaacgcattaagcactccgcctggggagtacgaccgcaaggttgaaactcaaaggaattgacgggggcccgcacaagcggtggagcatgtggtttaattcgaagcaacgcgaagaaccttaccaggtcttgacatccctctgaccgctctagagatagagntttccttcgggacagaggtgacaggtggtgcatggttgtcgtcagctcgtgtcgtgagatgttgggttaagtcccgcaacgagcgcaacccctattgttagttgccatcattcagttgggcactctagcgagactgccggtaataaaccggaggaaggtggggatgacgtcaaatcatcatgccccttatgacctgggctacacacgtgctacaatggctggtacaacgagtcgcaagtcggtgacggcaagctaatctcttaaagccagtctcagttcggattgtaggctgcaactcgcctacatgaagtcggaatcgctagtaatcgcggatcagcacgccgcggtgaatacgttcccgggccttgtacacaccgcccgtcacaccacgagagtttgtaacacccgaagtcggtgaggtaaccttttaggagccagccgcctaaggtgggatagatgattggggtgaagtcgtaacaaggtagccgtatcggaaggtgcggctggatcacctccttt

SEQ ID NO: 502 - DNA, 1531 bp, artificial sequence
  >GCF_004123145.1_00013 Fusicatenibacter_sp2
ttagagagtttgatcctggctcaggatgaacgctggcggcgtgcttaacacatgcaagtcgaacgaagcacttgaaacggattcttcggatgaagtttcctgtgactgagtggcggacgggtgagtaacgcgtgggtaacctgcctcatacagggggataacagttagaaatggctgctaataccgcataagcgcacggcatcgcatgatgcagtgtgaaaaactccggtggtatgagatggacccgcgttggattagctagttggcagggtaacggcctaccaaggcgacgatccatagccggcctgagagggtggacggccacattgggactgagacacggcccagactcctacgggaggcagcagtggggaatattgcacaatgggggaaaccctgatgcagcgacgccgcgtgagcgaagaagtatttcggtatgtaaagctctatcagcagggaagaaaatgacggtacctgactaagaagccccggctaactacgtgccagcagccgcggtaatacgtagggggcaagcgttatccggatttactgggtgtaaagggagcgtagacggaatggcaagtctgatgtgaaaggccggggctcaaccccgggactgcattggaaactgccaatctagagtaccggaggggtaagtggaattcctagtgtagcggtgaaatgcgtagatattaggaggaacaccagtggcgaaggcggcttactggacggtaactgacgttgaggctcgaaagcgtggggagcaaacaggattagataccctggtagtccacgccgtaaacgatgaatactaggtgttgggtagcaaagctattcggtgccgcagcaaacgcaataagtattccacctggggagtacgttcgcaagaatgaaactcaaaggaattgacggggacccgcacaagcggtggagcatgtggtttaattcgaagcaacgcgaagaaccttaccaaatcttgacatcgatccgaccggaccgtaatgggtcttttcccttcggggacggagaagacaggtggtgcatggttgtcgtcagctcgtgtcgtgagatgttgggttaagtcccgcaacgagcgcaacccttatcctcagtagccagcacataaaggtgggcactctgtggagactgccagggataacctggaggaaggtggggatgacgtcaaatcatcatgccccttatgatttgggctacacacgtgctacaatggcgtaaacaaagggaagcgatcacgcgagtgtgagcaaatctcaaaaataacgtctcagttcggattgtagtctgcaactcgactacatgaagctggaatcgctagtaatcgcaggtcagcatactgcggtgaatacgttcccgggtcttgtacacaccgcccgtcacaccatgggagtcagtaacacccgaagccggtgacctaaccgaaaggaaggagccgtcgaaggtgggaccgataactggggtgaagtcgtaacaaggtagccgtatcggaaggtgcggctggatcacctccttt

SEQ ID NO: 503 - DNA, 1531 bp, artificial sequence
  >GCF_004123145.1_00264 Fusicatenibacter_sp2
ttagagagtttgatcctggctcaggatgaacgctggcggcgtgcttaacacatgcaagtcgaacgaagcacttgaaacggattcttcggatgaagtttcctgtgactgagtggcggacgggtgagtaacgcgtgggtaacctgcctcatacagggggataacagttagaaatggctgctaataccgcataagcgcacagcatcgcatgatgcagtgtgaaaaactccggtggtatgagatggacccgcgttggattagctagttggcagggtaacggcctaccaaggcgacgatccatagccggcctgagagggtggacggccacattgggactgagacacggcccagactcctacgggaggcagcagtggggaatattgcacaatgggggaaaccctgatgcagcgacgccgcgtgagcgaagaagtatttcggtatgtaaagctctatcagcagggaagaaaatgacggtacctgactaagaagccccggctaactacgtgccagcagccgcggtaatacgtagggggcaagcgttatccggatttactgggtgtaaagggagcgtagacggaatggcaagtctgatgtgaaaggccggggctcaaccccgggactgcattggaaactgccaatctagagtaccggaggggtaagtggaattcctagtgtagcggtgaaatgcgtagatattaggaggaacaccagtggcgaaggcggcttactggacggtaactgacgttgaggctcgaaagcgtggggagcaaacaggattagataccctggtagtccacgccgtaaacgatgaatactaggtgttgggtagcaaagctattcggtgccgcagcaaacgcaataagtattccacctggggagtacgttcgcaagaatgaaactcaaaggaattgacggggacccgcacaagcggtggagcatgtggtttaattcgaagcaacgcgaagaaccttaccaaatcttgacatcgatccgaccggaccgtaatgggtcctttcccttcggggacggagaagacaggtggtgcatggttgtcgtcagctcgtgtcgtgagatgttgggttaagtcccgcaacgagcgcaacccttatcctcagtagccagcacatgaaggtgggcactctgtggagactgccagggataacctggaggaaggtggggatgacgtcaaatcatcatgccccttatgatttgggctacacacgtgctacaatggcgtaaacaaagggaagcgatcacgcgagtgtgagcaaatctcaaaaataacgtctcagttcggattgtagtctgcaactcgactacatgaagctggaatcgctagtaatcgcaggtcagcatactgcggtgaatacgttcccgggtcttgtacacaccgcccgtcacaccatgggagtcagtaacacccgaagccggtgacctaaccgaaaggaaggagccgtcgaaggtgggaccgataactggggtgaagtcgtaacaaggtagccgtatcggaaggtgcggctggatcacctccttt

SEQ ID NO: 504 - DNA, 1531 bp, artificial sequence
  >GCF_004123145.1_00306 Fusicatenibacter_sp2
ttagagagtttgatcctggctcaggatgaacgctggcggcgtgcttaacacatgcaagtcgaacgaagcacttgaaacggattcttcggatgaagtttcctgtgactgagtggcggacgggtgagtaacgcgtgggtaacctgcctcatacagggggataacagttagaaatggctgctaataccgcataagcgcacagcatcgcatgatgcagtgtgaaaaactccggtggtatgagatggacccgcgttggattagctagttggcagggtaacggcctaccaaggcgacgatccatagccggcctgagagggtggacggccacattgggactgagacacggcccagactcctacgggaggcagcagtggggaatattgcacaatgggggaaaccctgatgcagcgacgccgcgtgagcgaagaagtatttcggtatgtaaagctctatcagcagggaagaaaatgacggtacctgactaagaagccccggctaactacgtgccagcagccgcggtaatacgtagggggcaagcgttatccggatttactgggtgtaaagggagcgtagacggaatggcaagtctgatgtgaaaggccggggctcaaccccgggactgcattggaaactgccaatctagagtaccggaggggtaagtggaattcctagtgtagcggtgaaatgcgtagatattaggaggaacaccagtggcgaaggcggcttactggacggtaactgacgttgaggctcgaaagcgtggggagcaaacaggattagataccctggtagtccacgccgtaaacgatgaatactaggtgttgggtagcaaagctattcggtgccgcagcaaacgcaataagtattccacctggggagtacgttcgcaagaatgaaactcaaaggaattgacggggacccgcacaagcggtggagcatgtggtttaattcgaagcaacgcgaagaaccttaccaagtcttgacatcgatctgaccggactgtaatgagtcctttcccttcggggacagagaagacaggtggtgcatggttgtcgtcagctcgtgtcgtgagatgttgggttaagtcccgcaacgagcgcaacccttatcctcagtagccagcacataaaggtgggcactctggggagactgccagggataacctggaggaaggtggggatgacgtcaaatcatcatgccccttatgatttgggctacacacgtgctacaatggcgtaaacaaagggaagcgatcacgcgagtgtgagcaaatctcaaaaataacgtctcagttcggattgtagtctgcaactcgactacatgaagctggaatcgctagtaatcgcaggtcagcatactgcggtgaatacgttcccgggtcttgtacacaccgcccgtcacaccatgggagtcagtaacacccgaagccggtgacctaaccgaaaggaaggagccgtcgaaggtgggaccgataactggggtgaagtcgtaacaaggtagccgtatcggaaggtgcggctggatcacctccttt

SEQ ID NO: 505 - DNA, 1531 bp, artificial sequence
  >GCF_004123145.1_00359 Fusicatenibacter_sp2
ttagagagtttgatcctggctcaggatgaacgctggcggcgtgcttaacacatgcaagtcgaacgaagcacttgaaacggattcttcggatgaagtttcctgtgactgagtggcggacgggtgagtaacgcgtgggtaacctgcctcatacagggggataacagttagaaatggctgctaataccgcataagcgcacagcatcgcatgatgcagtgtgaaaaactccggtggtatgagatggacccgcgttggattagctagttggcagggcaacggcctaccaaggcgacgatccatagccggcctgagagggtggacggccacattgggactgagacacggcccagactcctacgggaggcagcagtggggaatattgcacaatgggggaaaccctgatgcagcgacgccgcgtgagcgaagaagtatttcggtatgtaaagctctatcagcagggaagaaaatgacggtacctgactaagaagccccggctaactacgtgccagcagccgcggtaatacgtagggggcaagcgttatccggatttactgggtgtaaagggagcgtagacggaatggcaagtctgatgtgaaaggccggggctcaaccccgggactgcattggaaactgccaatctagagtaccggaggggtaagtggaattcctagtgtagcggtgaaatgcgtagatattaggaggaacaccagtggcgaaggcggcttactggacggtaactgacgttgaggctcgaaagcgtggggagcaaacaggattagataccctggtagtccacgccgtaaacgatgaatactaggtgttgggtagcaaagctattcggtgccgcagcaaacgcaataagtattccacctggggagtacgttcgcaagaatgaaactcaaaggaattgacggggacccgcacaagcggtggagcatgtggtttaattcgaagcaacgcgaagaaccttaccaaatcttgacatcgatccgaccggaccgtaatgggtcttttcccttcggggacggagaagacaggtggtgcatggttgtcgtcagctcgtgtcgtgagatgttgggttaagtcccgcaacgagcgcaacccttatcctcagtagccagcacataaaggtgggcactctgtggagactgccagggataacctggaggaaggtggggatgacgtcaaatcatcatgccccttatgatttgggctacacacgtgctacaatggcgtaaacaaagggaagcgatcacgcgagtgtgagcaaatctcaaaaataacgtctcagttcggattgtagtctgcaactcgactacatgaagctggaatcgctagtaatcgcaggtcagcatactgcggtgaatacgttcccgggtcttgtacacaccgcccgtcacaccatgggagtcagtaacacccgaagccggtgacctaaccgaaaggaaggagccgtcgaaggtgggaccgataactggggtgaagtcgtaacaaggtagccgtatcggaaggtgcggctggatcacctccttt

SEQ ID NO: 506 - DNA, 1531 bp, artificial sequence
  >GCF_004123145.1_00818 Fusicatenibacter_sp2
ttagagagtttgatcctggctcaggatgaacgctggcggcgtgcttaacacatgcaagtcgaacgaagcgcttgaaacggattcttcggatgaagtttcctgtgactgagtggcggacgggtgagtaacgcgtgggtaacctgcctcatacagggggataacagttagaaatggctgctaataccgcataagcgcacggcatcgcatgatgcagtgtgaaaaactccggtggtatgagatggacccgcgttggattagctagttggcagggtaacggcctaccaaggcgacgatccatagccggcctgagagggtggacggccacattgggactgagacacggcccagactcctacgggaggcagcagtggggaatattgcacaatgggggaaaccctgatgcagcgacgccgcgtgagcgaagaagtatttcggtatgtaaagctctatcagcagggaagaaaatgacggtacctgactaagaagccccggctaactacgtgccagcagccgcggtaatacgtagggggcaagcgttatccggatttactgggtgtaaagggagcgtagacggaatggcaagtctgatgtgaaaggccggggctcaaccccgggactgcattggaaactgccaatctagagtaccggaggggtaagtggaattcctagtgtagcggtgaaatgcgtagatattaggaggaacaccagtggcgaaggcggcttactggacggtaactgacgttgaggctcgaaagcgtggggagcaaacaggattagataccctggtagtccacgccgtaaacgatgaatactaggtgttgggtagcaaagctattcggtgccgcagcaaacgcaataagtattccacctggggagtacgttcgcaagaatgaaactcaaaggaattgacggggacccgcacaagcggtggagcatgtggtttaattcgaagcaacgcgaagaaccttaccaagtcttgacatcgatctgaccggactgtaatgagtcctttcccttcggggacagagaagacaggtggtgcatggttgtcgtcagctcgtgtcgtgagatgttgggttaagtcccgcaacgagcgcaacccttatcctcagtagccagcaggtagagctgggcactctggggagactgccagggataacctggaggaaggtggggatgacgtcaaatcatcatgccccttatgatttgggctacacacgtgctacaatggcgtaaacaaagggaagcgatcacgcgagtgtgagcaaatctcaaaaataacgtctcagttcggattgtagtctgcaactcgactacatgaagctggaatcgctagtaatcgcaggtcagcatactgcggtgaatacgttcccgggtcttgtacacaccgcccgtcacaccatgggagtcagtaacacccgaagccggtgacctaaccgaaaggaaggagccgtcgaaggtgggaccgataactggggtgaagtcgtaacaaggtagccgtatcggaaggtgcggctggatcacctccttt

SEQ ID NO: 507 - DNA, 1531 bp, artificial sequence
  >GCF_004123145.1_02082 Fusicatenibacter_sp2
ttagagagtttgatcctggctcaggatgaacgctggcggcgtgcttaacacatgcaagtcgaacgaagcacttgaaacggattcttcggatgaagtttcctgtgactgagtggcggacgggtgagtaacgcgtgggtaacctgcctcatacagggggataacagttagaaatggctgctaataccgcataagcgcacagcatcgcatgatgcagtgtgaaaaactccggtggtatgagatggacccgcgttggattagctagttggcagggtaacggcctaccaaggcgacgatccatagccggcctgagagggtggacggccacattgggactgagacacggcccagactcctacgggaggcagcagtggggaatattgcacaatgggggaaaccctgatgcagcgacgccgcgtgagcgaagaagtatttcggtatgtaaagctctatcagcagggaagaaaatgacggtacctgattaagaagccccggctaactacgtgccagcagccgcggtaatacgtagggggcaagcgttatccggatttactgggtgtaaagggagcgtagacggaatggcaagtctgatgtgaaaggccggggctcaaccccgggactgcattggaaactgccaatctagagtaccggaggggtaagtggaattcctagtgtagcggtgaaatgcgtagatattaggaggaacaccagtggcgaaggcggcttactggacggtaactgacgttgaggctcgaaagcgtggggagcaaacaggattagataccctggtagtccacgccgtaaacgatgaatactaggtgttgggtagcaaagctattcggtgccgcagcaaacgcaataagtattccacctggggagtacgttcgcaagaatgaaactcaaaggaattgacggggacccgcacaagcggtggagcatgtggtttaattcgaagcaacgcgaagaaccttaccaaatcttgacatcgatccgaccggaccgtaatgggtcctttcccttcggggacggagaagacaggtggtgcatggttgccgtcagctcgtgtcgtgagatgttgggttaagtcccgcaacgagcgcaacccttatcctcagtagccagcacatgaaggtgggcactctggggagactgccagggataacctggaggaaggtggggatgacgtcaaatcatcatgccccttatgatttgggctacacacgtgctacaatggcgtaaacaaagggaagcgatcacgcgagtgtgagcaaatctcaaaaataacgtctcagttcggattgtagtctgcaactcgactacatgaagctggaatcgctagtaatcgcaggtcagcatactgcggtgaatacgttcccgggtcttgtacacaccgcccgtcacaccatgggagtcagtaacacccgaagccggtgacctaaccgaaaggaaggagccgtcgaaggtgggaccgataactggggtgaagtcgtaacaaggtagccgtatcggaaggtgcggctggatcacctccttt

SEQ ID NO: 508 - DNA, 1545 bp, artificial sequence
  >GCF_004125815.1_01871 Streptococcus_australis
aatgagagtttgatcctggctcaggatgaacgctggcggcgtgcctaatacatgcaagtagaacgctgaaggaaggagcttgctctttccggatgagttgcgaacgggtgagtaacgcgtaggtaacctgcctggtagcgggggataactattggaaacgatagctaataccgcataacagtagatattgcatgatatctgcttgaaaggtgcaattgcatcactaccagatggacctgcgttgtattagctagttggtgaggtaacggctcaccaaggcgacgatacatagccgacctgagagggtgatcggccacactgggactgagacacggcccagactcctacgggaggcagcagtagggaatcttcggcaatggacggaagtctgaccgagcaacgccgcgtgagtgaagaaggttttcggatcgtaaagctctgttgtaagagaagaacgagtgtgagagtggaaagttcacactgtgacggtatcttaccagaaagggacggctaactacgtgccagcagccgcggtaatacgtaggtcccgagcgttatccggatttattgggcgtaaagcgagcgcaggcggttagataagtctgaagttaaaggctgtggcttaaccatagtacgctttggaaactgtttaacttgagtgcaagaggggagagtggaattccatgtgtagcggtgaaatgcgtagatatatggaggaacaccggtggcgaaagcggctctctggcttgtaactgacgctgaggctcgaaagcgtggggagcaaacaggattagataccctggtagtccacgccgtaaacgatgagtgctaggtgttgggtcctttccgggactcagtgccgcagctaacgcattaagcactccgcctggggagtacgaccgcaaggttgaaactcaaaggaattgacgggggcccgcacaagcggtggagcatgtggtttaattcgaagcaacgcgaagaaccttaccaggtcttgacatccctctgaccgctctagagatagagttttccttcgggacagaggtgacaggtggtgcatggttgtcgtcagctcgtgtcgtgagatgttgggttaagtcccgcaacgagcgcaacccctattgttagttgccatcattcagttgggcactctagcgagactgccggtaataaaccggaggaaggtggggatgacgtcaaatcatcatgccccttatgacctgggctacacacgtgctacaatggctggtacaacgagtcgcaagtcggtgacggcaagctaatctcttaaagccagtctcagttcggattgtaggctgcaactcgcctacatgaagtcggaatcgctagtaatcgcggatcagcacgccgcggtgaatacgttcccgggccttgtacacaccgcccgtcacaccacgagagtttgtaacacccgaagtcggtgaggtaaccttttaggagccagccgcctaaggtgggatagatgattggggtgaagtcgtaacaaggtagccgtatcggaaggtgcggctggatcacctcctt

SEQ ID NO: 509 - DNA, 1511 bp, artificial sequence
  >GCF_004134775.1_00919 Christensenellaceae_NG5_sp2
ttaagagtttgattctggctcaggatgaacgctggcggcgtgcttaacacatgcaagtcgaacggagtaagaaagcttgcttttttacttagtggcggacgggtgagtaacgcgtgagcaatctgcccataccaggggaataacacatagaaatgtgtgctaataccgcataagaccacagagaggcatctctcagtggtaaaagatttatcgggtatggatgagctcgcgtcccattagatagttggtgaggtaacggcccaccaagtctgcgatgggtagccgacctgagagggtgatcggccacattggaactgagaaacggtccagactcctacgggaggcagcagtggggaatattgggcaatggaggcaactctgacccagcaacgccgcgtgagtgatgaaggtcttcggattgtaaagctctgtgatgggagacgaagaaagtgacggtatcccaatagcaagcctcggctaactacgtgccagcagccgcggtaatacgtaggaggcaagcgttatccggaatgactgggcgtaaagggtgcgtaggtggcttggcaagttggtagcgtaattccgaggctcaacctcggcgctactaccaaaactgtcaggctcgagtgcaggaggggtaagtggaattcctagtgtagcggtggaatgcgtagatattaggaggaacatcggtggcgaaggcgacttactggactgtaactgacactgaagcacgaaagcgtggggagcaaacaggattagataccctggtagtccacgccgtaaacgatgtatgctaggtgtagggggtatcgactccctctgtgccgacgttaacacattaagcataccgcctggggagtacggccgcaaggttgaaactcaaagaaattgacggggacccgcacaagcagcggagcatgtggtttaattcgacgcaacgcgaaaaaccttaccaggacttgacatcgagtgaaagcctaagagattaggccctccttcgggacacgaagacaggtgttgcatggttgtcgtcagctcgtgtcgtgagatgttgggttaagtcccgcaacgagcgcaaccctcatatacagttgccaatattcagttaggaactctgtatagactgccgtggttaacacggaggaaggtggggatgacgtcaaatcatcacggcccttacgtcctgggctacacacgtgctacaatggctattacaaagagctgctatacagtaatgttgagcgaatctcataaagatagtctcagttcggatcgtgggctgcaacccgcccacgtgaagtcggagttgctagtaatcccgaatcagcatgtcggggtgaatgcgttcccgggtcttgtacacaccgcccgtcacgccatgggagttgggagtacccaaagtcagtgacttaaccgcaaggggagaactgcctaaggtaataccaatgactggggtgaagtcgtaacaaggtagccgtatcggaaggtgcggctggatcacctccttt

SEQ ID NO: 510 - DNA, 1545 bp, artificial sequence
  >GCF_004166885.1_01923 Streptococcus_australis
aatgagagtttgatcctggctcaggatgaacgctggcggcgtgcctaatacatgcaagtagaacgctgaaggaaggagcttgctctttccggatgagttgcgaacgggtgagtaacgcgtaggtaacctgcctggtagcgggggataactattggaaacgatagctaataccgcataacagtagatattgcatgatatctgcttgaaaggtgcaattgcaccactaccagatggacctgcgttgtattagctagttggtgaggtaacggctcaccaaggcgacgatacatagccgacctgagagggtgatcggccacactgggactgagacacggcccagactcctacgggaggcagcagtagggaatcttcggcaatggacggaagtctgaccgagcaacgccgcgtgagtgaagaaggttttcggatcgtaaagctctgttgtaagagaagaacgagtgtgagagtggaaagttcacactgtgacggtatcttaccagaaagggacggctaactacgtgccagcagccgcggtaatacgtaggtcccgagcgttatccggatttattgggcgtaaagcgagcgcaggcggttagataagtctgaagttaaaggctgtggcttaaccatagtacgctttggaaactgtttaacttgagtgcaagaggggagagtggaattccatgtgtagcggtgaaatgcgtagatatatggaggaacaccggtggcgaaagcggctctctggcttgtaactgacgctgaggctcgaaagcgtggggagcaaacaggattagataccctggtagtccacgccgtaaacgatgagtgctaggtgttgggtcctttccgggactcagtgccgcagctaacgcattaagcactccgcctggggagtacgaccgcaaggttgaaactcaaaggaattgacgggggcccgcacaagcggtggagcatgtggtttaattcgaagcaacgcgaagaaccttaccaggtcttgacatccctctgaccgctctagagatagagttttccttcgggacagaggtgacaggtggtgcatggttgtcgtcagctcgtgtcgtgagatgttgggttaagtcccgcaacgagcgcaacccctattgttagttgccatcattcagttgggcactctagcgagactgccggtaataaaccggaggaaggtggggatgacgtcaaatcatcatgccccttatgacctgggctacacacgtgctacaatggctggtacaacgagtcgcaagtcggtgacggcaagctaatctcttaaagccagtctcagttcggattgtaggctgcaactcgcctacatgaagtcggaatcgctagtaatcgcggatcagcacgccgcggtgaatacgttcccgggccttgtacacaccgcccgtcacaccacgagagtttgtaacacccgaagtcggtgaggtaaccttttaggagccagccgcctaaggtgggatagatgattggggtgaagtcgtaacaaggtagccgtatcggaaggtgcggctggatcacctcctt

SEQ ID NO: 511 - DNA, 1304 bp, artificial sequence
  >GCF_004167315.1_03369 Blautia_luti_group
tccggtggtataagatggacccgcgttggattagctagttggtgaggtaacggcccaccaaggcgacgatccatagccggcctgagagggtgaacggccacattgggactgagacacggcccagactcctacgggaggcagcagtggggaatattgcacaatgggggaaaccctgatgcagcgacgccgcgtgaaggaagaagtatctcggtatgtaaacttctatcagcagggaagaaaatgacggtacctgactaagaagccccggctaactacgtgccagcagccgcggtaatacgtagggggcaagcgttatccggatttactgggtgtaaagggagcgtagacggatggacaagtctgatgtgaaaggctggggctcaaccccgggactgcattggaaactgcccgtcttgagtgccggagaggtaagcggaattcctagtgtagcggtgaaatgcgtagatattaggaggaacaccagtggcgaaggcggcttactggacggtaactgacgttgaggctcgaaagcgtggggagcaaacaggattagataccctggtagtccacgcggtaaacgatgaatgctaggtgtcggggagcaaagctcttcggtgccgccgcaaacgcattaagcattccacctggggagtacgttcgcaagaatgaaactcaaaggaattgacggggacccgcacaagcggtggagcatgtggtttaattcgaagcaacgcgaagaaccttaccaagtcttgacatccctctgaccgactcttaaccgagtctttccttcgggacagaggagacaggtggtgcatggttgtcgtcagctcgtgtcgtgagatgttgggttaagtcccgcaacgagcgcaacccctatcctcagtagccagcggttcggccgggcactctggggagactgccagggataacctggaggaaggcggggatgacgtcaaatcatcatgccccttatgatttgggctacacacgtgctacaatggcgtaaacaaagggaagcgaacctgcgagggtgggcaaatcccaaaaataacgtcccagttcggactgtagtctgcaacccgactacacgaagctggaatcgctagtaatcgcggatcagaatgccgcggtgaatacgttcccgggtcttgtacacaccgcccgtcacaccatgggagtcagtaacgcccgaagtcagtgacctaaccgcaaggaaggagctgccgaaggcgggaccgatgactggggtgaagtcgtaacaaggtagccgtatcggaaggtgcggctggatcacctccttt

SEQ ID NO: 512 - DNA, 1572 bp, artificial sequence
  >GCF_004208815.1_00128 [Lactobacillus]_fermentum
tatgagagtttgatcctggctcaggatgaacgccggcggtgtgcctaatacatgcaagtcgaacgcgttggcccaattgattgatggtgcttgcacctgattgattttggtcgccaacgagtggcggacgggtgagtaacacgtaggtaacctgcccagaagcgggggacaacatttggaaacagatgctaataccgcataacaacgttgttcgcatgaacaacgcttaaaagatggcttctcgctatcacttctggatggacctgcggtgcattagcttgttggtggggtaacggcctaccaaggcgatgatgcatagccgagttgagagactgatcggccacaatgggactgagacacggcccatactcctacgggaggcagcagtagggaatcttccacaatgggcgcaagcctgatggagcaacaccgcgtgagtgaagaagggtttcggctcgtaaagctctgttgttaaagaagaacacgtatgagattaactgttcatacgttgacggtatttaaccagaaagtcacggctaactacgtgccagcagccgcggtaatacgtaggtggcaagcgttatccggatttattgggcgtaaagagagtgcaggcggttttctaagtctgatgtgaaagccttcggcttaaccggagaagtgcatcggaaactggataacttgagtgcagaagagggtagtggaactccatgtgtagcggtggaatgcgtagatatatggaagaacaccagtggcgaaggcggctacctggtctgcaactgacgctgagactcgaaagcatgggtagcgaacaggattagataccctggtagtccatgccgtaaacgatgagtgctaggtgttggagggtttccgcccttcagtgccggagctaacgcattaagcactccgcctggggagtacgaccgcaaggttgaaactcaaaggaattgacgggggcccgcacaagcggtggagcatgtggtttaattcgaagctacgcgaagaaccttaccaggtcttgacatcttgcgccaaccctagagatagggcgtttccttcgggaacgcaatgacaggtggtgcatggtcgtcgtcagctcgtgtcgtgagatgttgggttaagtcccgcaacgagcgcaacccttgttactagttgccagcattaagttgggcactctagtgagactgccggtgacaaaccggaggaaggtggggacgacgtcagatcatcatgccccttatgacctgggctacacacgtgctacaatggacggtacaacgagtcgcgaactcgcgagggcaagcaaatctcttaaaaccgttctcagttcggactgcaggctgcaactcgcctgcacgaagtcggaatcgctagtaatcgcggatcagcatgccgcggtgaatacgttcccgggccttgtacacaccgcccgtcacaccatgagagtttgtaacacccaaagtcggtggggtaaccttttaggagccagccgcctaaggtgggacagatgattagggtgaagtcgtaacaaggtagccgtaggagaacctgcggctggatcacctcctt

SEQ ID NO: 513 - DNA, 1573 bp, artificial sequence
  >GCF_004208815.1_00155 [Lactobacillus]_fermentum
  misc_feature (34)..(34): n is a, c, g, or t
tatgagagtttgatcctggctcaggatgaacgcnggcggtgtgcctaatacatgcaagtcgaacgcgttggcccaattgattgacgatgcttgcacctgattgattttggccgccaacgagtggcggacgggtgagtaacacgtaggtaacctgcccagaagcgggggacaacatttggaaacagatgctaataccgcataacaacgttgttcgcatgaacaacgcttaaaagatggcttctcgctatcacttctggatggacctgcggtgcattagcttgttggtggggtaacggcctaccaaggcgatgatgcatagccgagttgagagactgatcggccacaatgggactgagacacggcccatactcctacgggaggcagcagtagggaatcttccacaatgggcgcaagcctgatggagcaacaccgcgtgagtgaagaagggtttcggctcgtaaagctctgttgttaaagaagaatacgtatgagagtaactgttcatacgttgacggtatttaaccagaaagtcacggctaactacgtgccagcagccgcggtaatacgtaggtggcaagcgttatccggatttattgggcgtaaagagagtgcaggcggttttctaagtctgatgtgaaagccttcggcttaaccggagaagtgcatcggaaactggataacttgagtgcagaagagggtagtggaactccatgtgtagcggtggaatgcgtagatatatggaagaacaccagtggcgaaggcggctacctggtctgcaactgacgctgagactcgaaagcatgggtagcgaacaggattagataccctggtagtccatgccgtaaacgatgagtgctaggtgttggagggtttccgcccttcagtgccggagctaacgcattaagcactccgcctggggagtacgaccgcaaggttgaaactcaaaggaattgacgggggcccgcacaagcggtggagcatgtggtttaattcgaagctacgcgaagaaccttaccaggtcttgacatcttgcgccaaccctagagatagggcgtttccttcgggaacgcaatgacaggtggtgcatggtcgtcgtcagctcgtgtcgtgagatgttgggttaagtcccgcaacgagcgcaacccttgttactagttgccagcattaagttgggcactctagtgagactgccggtgacaaaccggaggaaggtggggacgacgtcagatcatcatgccccttatgacctgggctacacacgtgctacaatggacggtacaacgagtcgcgaactcgcgagggcaagcaaatctcttaaaaccgttctcagttcggactgcaggctgcaactcgcctgcacgaagtcggaatcgctagtaatcgcggatcagcatgccgcggtgaatacgttcccgggccttgtacacaccgcccgtcacaccatgagagtttgtaacacccaaagtcggtggggtaaccttttaggagccagccgcctaaggtgggacagatgattagggtgaagtcgtaacaaggtagccgtaggagaacctgcggctggatcacctccttt

SEQ ID NO: 514 - DNA, 1572 bp, artificial sequence
  >GCF_004208815.1_00554 [Lactobacillus]_fermentum
tatgagagtttgatcctggctcaggatgaacgctggcggtgtgcctaatacatgcaagtcgaacgcgttggcccaattgattgatggtgcttgcacctgattgattttggtcgccaacgagtggcggacgggtgagtaacacgtaggtaacctgcccagaagcgggggacaacatttggaaacagatgctaataccgcataacaacgttgttcgcatgaacaacgcttaaaagatggcttctcgctatcacttctggatggacctgcggtgcattagcttgttggtggggtaacggcctaccaaggcgatgatgcatagccgagttgagagactgatcggccacaatgggactgagacacggcccatactcctacgggaggcagcagtagggaatcttccacaatgggcgcaagcctgatggagcaacaccgcgtgagtgaagaagggtttcggctcgtaaagctctgttgttaaagaagaacacgtatgagagtaactgttcatacgttgacggtatttaaccagaaagtcacggctaactacgtgccagcagccgcggtaatacgtaggtggcaagcgttatccggatttattgggcgtaaagagagtgcaggcggttttctaagtctgatgtgaaagccttcggcttaaccggagaagtgcatcggaaactggataacttgagtgcagaagagggtagtggaactccatgtgtagcggtggaatgcgtagatatatggaagaacaccagtggcgaaggcggctacctggtctgcaactgacgctgagactcgaaagcatgggtagcgaacaggattagataccctggtagtccatgccgtaaacgatgagtgctaggtgttggagggtttccgcccttcagtgccggagctaacgcattaagcactccgcctggggagtacgaccgcaaggttgaaactcaaaggaattgacgggggcccgcacaagcggtggagcatgtggtttaattcgaagctacgcgaagaaccttaccaggtcttgacatcttgcgccaaccctagagatagggcgtttccttcgggaacgcaatgacaggtggtgcatggtcgtcgtcagctcgtgtcgtgagatgttgggttaagtcccgcaacgagcgcaacccttgttactagttgccagcattaagttgggcactctagtgagactgccggtgacaaaccggaggaaggtggggacgacgtcagatcatcatgccccttatgacctgggctacacacgtgctacaatggacggtacaacgagtcgcaaactcgcgagggcaagcaaatctcttaaaaccgttctcagttcggactgcaggctgcaactcgcctgcacgaagtcggaatcgctagtaatcgcggatcagcatgccgcggtgaatacgttcccgggccttgtacacaccgcccgtcacaccatgagagtttgtaacacccaaagtcggtggggtaaccttttaggagccagccgcctaaggtgggacagatgattagggtgaagtcgtaacaaggtagccgtaggagaacctgcggctggatcacctcctt

SEQ ID NO: 515 - DNA, 1572 bp, artificial sequence
  >GCF_004208815.1_01376 [Lactobacillus]_fermentum
  misc_feature (154)..(154): n is a, c, g, or t
tatgagagtttgatcctggctcaggatgaacgctggcggtgtgcctaatacatgcaagtcgaacgcgttggcccaattgattgatggtgcttgcacctgattgattttggtcgccaacgagtggcggacgggtgagtaacacgtaggtaacctncccagaagcgggggacaacatttggaaacagatgctaataccgcataacagcgttgttcgcatgaacaacgcttaaaagatggcttctcgctatcacttctggatggacctgcggtgcattagcttgttggtggggtaacggcctaccaaggcgatgatgcatagccgagttgagagactgatcggccacaatgggactgagacacggcccatactcctacgggaggcagcagtagggaatcttccacaatgggcgcaagcctgatggagcaacaccgcgtgagtgaagaagggtttcggctcgtaaagctctgttgttaaagaagaacacgtatgagagtaactgttcatacgttgacggtatttaaccagaaagtcacggctaactacgtgccagcagccgcggtaatacgtaggtggcaagcgttatccggatttattgggcgtaaagagagtgcaggcggttttctaagtctgatgtgaaagccttcggcttaaccggagaagtgcatcggaaactggataacttgagtgcagaagagggtagtggaactccatgtgtagcggtggaatgcgtagatatatggaagaacaccagtggcgaaggcggctacctggtctgcaactgacgctgagactcgaaagcatgggtagcgaacaggattagataccctggtagtccatgccgtaaacgatgagtgctaggtgttggagggtttccgcccttcagtgccggagctaacgcattaagcactccgcctggggagtacgaccgcaaggttgaaactcaaaggaattgacgggggcccgcacaagcggtggagcatgtggtttaattcgaagctacgcgaagaaccttaccaggtcttgacatcttgcgccaaccctagagatagggcgtttccttcgggaacgcaatgacaggtggtgcatggtcgtcgtcagctcgtgtcgtgagatgttgggttaagtcccgcaacgagcgcaacccttgttactagttgccagcattaagttgggcactctagtgagactgccggtgacaaaccggaggaaggtggggacgacgtcagatcatcatgccccttatgacctgggctacacacgtgctacaatggacggtacaacgagtcgcgaactcgcgagggcaagcaaatctcttaaaaccgttctcagttcggactgcaggctgcaactcgcctgcacgaagtcggaatcgctagtaatcgcggatcagcatgccgcggtgaatacgttcccgggccttgtacacaccgcccgtcacaccatgagagtttgtaacacccaaagtcggtggggtaaccttttaggagccagccgcctaaggtgggacagatgattagggtgaagtcgtaacaaggtagccgtaggagaacctgcggctggatcacctcctt

SEQ ID NO: 516 - DNA, 1532 bp, artificial sequence
  >GCF_004216775.1_03251 Cuneatibacter_caecimuris
atgagagtttgatcctggctcaggatgaacgctggcggcgtgcttaacacatgcaagtcgaacgaagcagttgcgaggaagttttcggatggaattgcgattgactgagtggcggacgggtgagtaacgcgtgggtaacctgcctcacacagggggataacagttagaaatgactgctaataccgcataacccgctagggccgcatggcccggacggaaaagaaatatcggtgtgagatggacccgcgtctgattagctggttggtagggtaacggcctaccaaggcgacgatcagtagccgacttgagagagtgatcggccacattgggactgagacacggcccaaactcctacgggaggcagcagtggggaatattgcacaatgggggaaaccctgatgcagcgacgccgcgtgactgaagaagtacttcggtatgtaaaggtctatcagcagggaagaagaaagacggtacctgactaagaagccccggctaactacgtgccagcagccgcggtaatacgtagggggcaagcgttatccggatttactgggtgtaaagggagcgtaggcggtagcgcaagtcagaagtgaaagcccggggctcaaccccgcggactgcttttgaaactgcgtaactggagtgcaggagaggtaagtggaattcctagtgtagcggtgaaatgcgtagatattaggaggaacaccagtggcgaaggcggcttactggactgtaactgacgctgaggctcgaaagcgtggggagcaaacaggattagataccctggtagtccacgctgtaaacgatgaatactaggtgtcggggagcaaagctcttcggtgccgtcgcaaacgcagtaagtattccacctggggagtacgttcgcaagaatgaaactcaaaggaattgacggggacccgcacaagcggtggagcatgtggtttaattcgaagcaacgcgaagaaccttacctgctcttgacatccccctgacgcagaggtaatgctctgtttctttcgagacaggggagacaggtggtgcatggttgtcgtcagctcgtgtcgtgagatgttgggttaagtcccgcaacgagcgcaacccttatccttagtagccagcaggtagagctgggcactctggggagactgccggggataacccggaggaaggtggggatgacgtcaaatcatcatgccccttatgagcagggctacacacgtgctacaatggcgtaaacagagggaagcgaaggggtgacctgaagcgaatctcaaaaataacgtctcagttcggattgtagtctgcaactcgactacatgaagctggaatcgctagtaatcgcgaatcagaatgtcgcggtgaatacgttcccgggtcttgtacacaccgcccgtcacaccatgggagtcggtaacgcccgaagccagtgacctaacctgaaaagggaggagctgtcgaaggcgggactggtaactggggtgaagtcgtaacaaggtagccgtatcggaaggtgcggctggatcacctccttt

SEQ ID NO: 517 - DNA, 1528 bp, artificial sequence
  >GCF_004347525.1_00556 Bacteroides_dorei_group
atgaagagtttgatcctggctcaggatgaacgctagctacaggcttaacacatgcaagtcgaggggcagcatggtcttagcttgctaaggctgatggcgaccggcgcacgggtgagtaacacgtatccaacctgccgtctactcttggccagccttctgaaaggaagattaatccaggatggcatcatgagttcacatgtccgcatgattaaaggtattttccggtagacgatggggatgcgttccattagatagtaggcggggtaacggcccacctagtcaacgatggataggggttctgagaggaaggtcccccacattggaactgagacacggtccaaactcctacggggggcagcagtgaggaatattggtcaatgggcgatggcctgaaccagccaagtagcgtgaaggatgactgccctatgggttgtaaacttcttttataaaggaataaagtcgggtatgcatacccgtttgcatgtactttatgaataaggatcggctaactccgtgccagcagccgcggtaatacggaggatccgagcgttatccggatttattgggtttaaagggagcgtagatggatgtttaagtcagttgtgaaagtttgcggctcaaccgtaaaattgcagttgatactggatgtcttgagtgcagttgaggcaggcggaattcgtggtgtagcggtgaaatgcttagatatcacgaagaactccgattgcgaaggcagcctgctaagctgcaactgacattgaggctcgaaagtgtgggtatcaaacaggattagataccctggtagtccacacggtaaacgatgaatactcgctgtttgcgatatacggcaagcggccaagcgaaagcgttaagtattccacctggggagtacgccggcaacggtgaaactcaaaggaattgacgggggcccgcacaagcggaggaacatgtggtttaattcgatgatacgcgaggaaccttacccgggcttaaattgcactcgaatgatccggaaacggttcagctagcaatagcgagtgtgaaggtgctgcatggttgtcgtcagctcgtgccgtgaggtgtcggcttaagtgccataacgagcgcaacccttgttgtcagttactaacaggtgatgctgaggactctgacaagactgccatcgtaagatgtgaggaaggtggggatgacgtcaaatcagcacggcccttacgtccggggctacacacgtgttacaatggggggtacagagggccgctaccacgcgagtggatgccaatccctaaaacccctctcagttcggactggagtctgcaacccgactccacgaagctggattcgctagtaatcgcgcatcagccacggcgcggtgaatacgttcccgggccttgtacacaccgcccgtcaagccatgggagccgggggtacctgaagtgcgtaaccgcgaggatcgccctagggtaaaactggtgactggggctaagtcgtaacaaggtagccgtaccggaaggtgcggctggaacacctcctt

SEQ ID NO: 518 - DNA, 1528 bp, artificial sequence
  >GCF_004347525.1_03129 Bacteroides_dorei_group
atgaagagtttgatcctggctcaggatgaacgctagctacaggcttaacacatgcaagtcgaggggcagcatggtcttagcttgctaaggctgatggcgaccggcgcacgggtgagtaacacgtatccaacctgccgtctactcttggccagccttctgaaaggaagattaatccaggatggcatcatgagttcacatgtccgcatgattaaaggtattttccggtagacgatggggatgcgttccattagatagtaggcggggtaacggcccacctagtcaacgatggataggggttctgagaggaaggtcccccacattggaactgagacacggtccaaactcctacgggaggcagcagtgaggaatattggtcaatgggcgatggcctgaaccagccaagtagcgtgaaggatgactgccctatgggttgtaaacttcttttataaaggaataaagtcgggtatgcatacccgtttgcatgtactttatgaataaggatcggctaactccgtgccagcagccgcggtaatacggaggatccgagcgttatccggatttattgggtttaaagggagcgtagatggatgtttaagtcagttgtgaaagtttgcggctcaaccgtaaaattgcagttgatactggatgtcttgagtgcagttgaggcaggcggaattcgtggtgtagcggtgaaatgcttagatatcacgaagaactccgattgcgaaggcagcctgctaagctgcaactgacattgaggctcgaaagtgtgggtatcaaacaggattagataccctggtagtccacacggtaaacgatgaatactcgctgtttgcgatatacggtaagcggccaagcgaaagcgttaagtattccacctggggagtacgccggcaacggtgaaactcaaaggaattgacgggggcccgcacaagcggaggaacatgtggtttaattcgatgatacgcgaggaaccttacccgggcttaaattgcactcgaatgatccggaaacggttcagctagcaatagcgagtgtgaaggtgctgcatggttgtcgtcagctcgtgccgtgaggtgtcggcttaagtgccataacgagcgcaacccttgttgtcagttactaacaggtgatgctgaggactctgacaagactgccatcgtaagatgtgaggaaggtggggatgacgtcaaatcagcacggcccttacgtccggggctacacacgtgttacaatggggggtacagagggccgctaccacgcgagtggatgccaatccctaaaacccctctcagttcggactggagtctgcaacccgactccacgaagctggattcgctagtaatcgcgcatcagccacggcgcggtgaatacgttcccgggccttgtacacaccgcccgtcaagccatgggagccgggggtacctgaagtgcgtaaccgcgaggatcgccctagggtaaaactggtgactggggctaagtcgtaacaaggtagccgtaccggaaggtgcggctggaacacctcctt

SEQ ID NO: 519 - DNA, 1527 bp, artificial sequence
  >GCF_004347525.1_05238 Bacteroides_dorei_group
atgaagagtttgatcctggctcaggatgaacgctagctacaggcttaacacatgcaagtcgagggggcagcatggtcttagcttgctaaggctgatggcgaccggcgcacgggtgagtaacacgtatccaacctgccgtctactcttggccagccttctgaaaggaagattaatccaggatggcatcatgagttcacatgtccgcatgattaaaggtattttccggtagacgatggggatgcgttccattagatagtaggcgggggtaacggcccacctagtcaacgatggataggggttctgagaggaaggtcccccacattggaactgagacacggtccaaactcctacgggagcaagcagtgaggaatattggtcaatgggcgatggcctgaaccagccaagtagcgtgaaggatgactgccctatgggttgtaaacttcttttataaaggaataaagtcgggtatgcatacccgtttgcatgtactttatgaataaggatcggctaactccgtgccagcagccgcggtaatacggaggatccgagcgttatccggatttattgggtttaaagggagcgtagatggatgtttaagtcagttgtgaagtttgcggctcaaccgtaaaattgcagttgatactgatgtcttgagtgcagttgaggcaggcggaattcgtggtgtagcggtgaaatgcttagatatcacgaagaactccgattgcgaaggcagcctgctaagctgcaactgacattgaggctcgaaagtgtgggtatcaaaacaggattagataccctggtagtccacacggtaaacgatgaatactcgctgtttgcgatatacggcaagcggccaagcgaaagcgttaagtattccacctggggagtacgccggcaacggtgaaactcaaaggaattgacgggggcccgcacaagcggaggaacatgtggtttaattcgatgatacgcgaggaaccttacccgggcttaaattgcactcgaatgatccggaaacggttcagctagcaatagcgagtgtgaaggtgctgcatggttgtcgtcagctcgtgcgtgaggtgtcggcttaagtgccataacgagcgcaacccttgttgtcagttactaacaggtgatgctgaggactctgacaagactgccatcgtaagatgtgaggaaggtgggatgacgtcaaatcagcacggcccttacgtccggggctacacacgtgttacaatggggggtacagagggccgctaccacgcgagtgggatgccaatccctaaaacccctctcagttcggactggagtctgcaacccgactccacgaagctggattcgctagtaatcgcgcatcagccacggcgcggtgaatacgttcccgggccttgtacacaccgccgtcaagccatgggagccgggggtacctgaagtgcgtaacgcgaggatcgccctagggtaaaactggtggactggggctaagtcgtaacaaggtagccgtaccggaaggtgcggctggaacacctcctt

SEQ ID NO: 520 - DNA, 1582 bp, artificial sequence
  >GCF_005341425.1_01691 [Lactobacillus]_fermentum
tatgagagtttgatcctggctcaggatgaacgccggcggtgtgcctaatacatgcaagtcgaacgcgttggcccaattgattgatggtgcttgcacctgattgattttggttgccagcgagtggcggacgggtgagtaacacgtaggtaacctgcccagaagcgggggacaacatttggaaacagatgctaataccgcataacaacgttgttcgcatgaacaacgcttaaaagatggcttctcgctatcacttctggatggacctgcggtgcattagcttgttggtggggtaacggcctaccaaggcgatgatgcatagccgagttgagagactgatcggccacaatgggactgagacacggcccatactcctacgggaggcagcagtagggaatcttccacaatgggcgcaagcctgatggagcaacaccgcgtgagtgaagaagggtttcggctcgtaaagctctgttgttaaagaagaacacgtatgagagtaactgttcatacgttgacggtatttaaccagaaagtcacggctaactacgtgccagcagccgcggtaatacgtaggtggcaagcgttatccggatttattgggcgtaaagagagtgcaggcggttttctaagtctgatgtgaaagccttcggcttaaccggagaagtgcatcggaaactggataacttgagtgcagaagagggtagtggaactccatgtgtagcggtggaatgcgtagatatatggaagaacaccagtggcgaaggcggctacctggtctgcaactgacgctgagactcgaaagcatgggtagcgaacaggattagataccctggtagtccatgccgtaaacgatgagtgctaggtgttggagggtttccgcccttcagtgccggagctaacgcattaagcactccgcctggggagtacgaccgcaaggttgaaactcaaaggaattgacgggggcccgcacaagcggtggagcatgtggtttaattcgaagctacgcgaagaaccttaccaggtcttgacatcttgcgccaaccctagagatagggcgtttccttcgggaacgcaatgacaggtggtgcatggtcgtcgtcagctcgtgtcgtgagatgttgggttaagtcccgcaacgagcgcaacccttgttactagttgccagcattaagttgggcactctagtgagactgccggtgacaaaccggaggaaggtggggacgacgtcagatcatcatgccccttatgacctgggctacacacgtgctacaatggacggtacaacgagtcgcgaactcgcgagggcaagcaaatctcttaaaaccgttctcagttcggactgcaggctgcaactcgcctgcacgaagtcggaatcgctagtaatcgctagtaatcgcggatcagcatgccgcggtgaatacgttcccgggccttgtacacaccgcccgtcacaccatgagagtttgtaacacccaaagtcggtggggtaaccttttaggagccagccgcctaaggtgggacagatgattagggtgaagtcgtaacaaggtagccgtaggagaacctgcggctggatcacctcctt

SEQ ID NO: 521 - DNA, 1535 bp, artificial sequence
  >GCF_005696695.1_00446 Schaalia_odontolytica
tcggagagtttgatcctggctcaggacgaacgctggcggcgtgcttaacacatgcaagtcgaacgctgaagcccagcttgctgggtggatgagtggcgaacgggtgagtaacacgtgagtaacctgcccccttctttgggataacgcccggaaacgggtgctaatactggatattcactggccttcgcatgggggttggtggaaaggttttttctggtgggggatgggctcgcggcctatcagcttgttggtggggtgatggcctaccaaggctttgacgggtagccggcctgagagggtgaccggtcacattgggactgagatacggcccagactcctacgggaggcagcagtggggaatattgcacaatgggcgaaagcctgatgcagcgacgccgcgtgagggatgacggccttcgggttgtaaacctctttcgctcatggtcaagccgcaacaatggttgtggtgagggtagtgggtaaagaagcgccggctaactacgtgccagcagccgcggtaatacgtagggcgcgagcgttgtccggaattattgggcgtaaagggcttgtaggcggttggtcgcgtctgccgtgaaatcctctggcttaactgggggcgtgcggtgggtacgggctgacttgagtgcggtaggggagactggaactcctggtgtagcggtggaatgcgcagatatcaggaagaacaccggtggcgaaggcgggtctctgggccgttactgacgctgaggagcgaaagcgtggggagcgaacaggattagataccctggtagtccacgctgtaaacgttgggcactaggtgtgggggccacccgtggtttctgcgccgtagctaacgctttaagtgccccgcctggggagtacggccgcaaggctaaaactcaaaggaattgacgggggcccgcacaagcggcggagcatgcggattaattcgatgcaacgcgaagaaccttaccaaggcttgacatgcacggcgacactgcagagatgtggtggcatttagttggtcgtgtgcaggtggtgcatggttgtcgtcagctcgtgtcgtgagatgttgggttaagtcccgcaacgagcgcaacccttgccctatgttgccagcacgttatggtggggactcgtgggggactgccggggttaactcggaggaaggtggggatgacgtcaaatcatcatgccccttatgtcttgggcttcacgcatgctacaatggttggtacagagggttgcgaaatcgtgaggtggagcgaatcccttaaagccagtctcagttcggattggggtctgcaactcgaccccatgaaggtggagtcgctagtaatcgcagatcagcaacgctgcggtgaatacgttctcgggccttgtacacaccgcccgtcacgtcacgaaagttggtaacacccgaagcccatggcctaaccgtttatcggggggagtggtcgaaggtgggattggcgattgggacgaagtcgtaacaaggtagccgtaccggaaggtgcggctggatcacctccttt

SEQ ID NO: 522 - DNA, 1527 bp, artificial sequence
  >GCF_005848555.1_00221 Blautia_luti_group
tcagagagtttgatcctggctcaggatgaacgctggcggcgtgcttaacacatgcaagtcgaacgggaattactttattgaaacttcggtcgatttaatttaattctagtggcggacgggtgagtaacgcgtgggtaacctgccttgtacagggggataacagtcagaaatgactgctaataccgcataagcgcacaggaccgcatggtccggtgtgaaaaactccggtggtataagatggacccgcgttggattagctggttggtgaggtaacggcccaccaaggcgacgatccatagccggcctgagagggtgaacggccacattgggactgagacacggcccagactcctacgggaggcagcagtggggaatattgcacaatgggggaaaccctgatgcagcgacgccgcgtgaaggaagaagtatctcggtatgtaaacttctatcagcagggaagagattgacggtacctgactaagaagccccggctaactacgtgccagcagccgcggtaatacgtagggggcaagcgttatccggatttactgggtgtaaagggagcgtagacggatggacaagtctgatgtgaaaggctggggctcaaccccgggactgcattggaaactgcccgtcttgagtgccggagaggtaagcggaattcctagtgtagcggtgaaatgcgtagatattaggaggaacaccagtggcgaaggcggcttactggacggtaactgacgttgaggctcgaaagcgtggggagcaaacaggattagataccctggtagtccacgcggtaaacgatgaatgctaggtgtcgggaagcaaagcttttcggtgccgccgcaaacgcattaagcattccacctggggagtacgttcgcaagaatgaaactcaaaggaattgacggggacccgcacaagcggtggagcatgtggtttaattcgaagcaacgcgaagaaccttaccaagtcttgacatccctctgacggactcttaaccgagtcttttcttcgggacagaggagacaggtggtgcatggttgtcgtcagctcgtgtcgtgagatgttgggttaagtcccgcaacgagcgcaacccctatcctcagtagccagcatttaaggtgggcactctggggagactgccagggataacctggaggaaggcggggatgacgtcaaatcatcatgccccttatgatttgggctacacacgtgctacaatggcgtaaacaaagggaagcgaacccgcgagggtgggcaaatcccaaaaataacgtcccagttcggactgtagtctgtaacccgactacacgaagctggaatcgctagtaatcgcggatcagaatgccgcggtgaatacgttcccgggtcttgtacacaccgcccgtcacaccatgggagtcagtaacgcccgaagtcagtgacctaaccgcaaggaaggagctgccgaaggcgggaccgatgactggggtgaagtcgtaacaaggtagccgtatcggaaggtgcggctggatcacctccttt

SEQ ID NO: 523 - DNA, 1527 bp, artificial sequence
  >GCF_005848555.1_00716 Blautia_luti_group
tcagagagtttgatcctggctcaggatgaacgctggcggcgtgcttaacacatgcaagtcgaacgggaattattttattgaaacttcggtcgatttaatttaattctagtggcggacgggtgagtaacgcgtgggtaacctgccttgtacagggggataacagtcagaaatgactgctaataccgcataagcgcacagagctgcatggctcagtgtgaaaaactccggtggtataagatggacccgcgttggattagctagttggtgaggtaacggcccaccaaggcgacgatccatagccggcctgagagggtgaacggccacattgggactgagacacggcccagactcctacgggaggcagcagtggggaatattgcacaatgggggaaaccctgatgcagcgacgccgcgtgaaggaagaagtatctcggtatgtaaacttctatcagcagggaagaaaatgacggtacctgactaagaaaccccggctaactacgtgccagcagccgcggtaatacgtagggggcaagcgttatccggatttactgggtgtaaagggagcgtagacggatggacaagtctgatgtgaaaggctggggctcaaccccgggactgcattggaaactgcccgtcttgagtgccggagaggtaagcggaattcctagtgtagcggtgaaatgcgtagatattaggaggaacaccagtggcgaaggcggcttactggacggtaactgacgttgaggctcgaaagcgtggggagcaaacaggattagataccctggtagtccacgcggtaaacgatgaatgctaggtgtcgggaagcaaagcttttcggtgccgccgcaaacgcattaagcattccacctggggagtacgttcgcaagaatgaaactcaaaggaattgacggggacccgcacaagcggtggagcatgtggtttaattcgaagcaacgcgaagaaccttaccaagtcttgacatccctctgaccgactcttaatcgagtctttccttcgggacagaggagacaggtggtgcatggttgtcgtcagctcgtgtcgtgagatgttgggttaagtcccgcaacgagcgcaacccctatcctcagtagccagcatttaaggtgggcactctggggagactgccagggataacctggaggaaggcggggatgacgtcaaatcatcatgccccttatgatttgggctacacacgtgctacaatggcgtaaacaaagggaagcgaacccgcgagggtgggcaaatcccaaaaataacgtcccagttcggactgtagtctgcaacccgactacacgaagctggaatcgctagtaatcgcggatcagaatgccgcggtgaatacgttcccgggtcttgtacacaccgcccgtcacaccatgggagtcagtaacgcccgaagtcagtgacctaaccgcaaggaaggagctgccgaaggcgggaccgatgactggggtgaagtcgtaacaaggtagccgtatcggaaggtgcggctggatcacctccttt

SEQ ID NO: 524 - DNA, 1527 bp, artificial sequence
  >GCF_005848555.1_01018 Blautia_luti_group
tcagagagtttgatcctggctcaggatgaacgctggcggcgtgcttaacacatgcaagtcgaacgggaaaccttttattgaagcttcggcagatttagattgtttctagtggcggacgggtgagtaacgcgtgggtaacctgccttatacagggggataacagtcagaaatgactgctaataccgcataagcgcacagagctgcatggctcggtgtgaaaaactccggtggtataagatggacccgcgttggattagctagttggtgaggtaacggcccaccaaggcgacgatccatagccggcctgagagggtgaacggccacattgggactgagacacggcccagactcctacgggaggcagcagtggggaatattgcacaatgggggaaaccctgatgcagcgacgccgcgtgaaggaagaagtatctcggtatgtaaacttctatcagcagggaagaaaatgacggtacctgactaagaagccccggctaactacgtgccagcagccgcggtaatacgtagggggcaagcgttatccggatttactgggtgtaaagggagcgtagacggatggacaagtctgatgtgaaaggctggggctcaaccccgggactgcattggaaactgcccgtcttgagtgccggagaggtaagcggaattcctagtgtagcggtgaaatgcgtagatattaggaggaacaccagtggcgaaggcggcttactggacggtaactgacgttgaggctcgaaagcgtggggagcaaacaggattagataccctggtagtccacgcggtaaacgatgaatgctaggtgtcgggaagcaaagcttttcggtgccgccgcaaacgcattaagcattccacctggggagtacgttcgcaagaatgaaactcaaaggaattgacggggacccgcacaagcggtggagcatgtggtttaattcgaagcaacgcgaagaaccttaccaagtcttgacatccctctgacggattcttaaccgagtctttccttcgggacagaggagacaggtggtgcatggttgtcgtcagctcgtgtcgtgagatgttgggttaagtcccgcaacgagcgcaacccctatcctcagtagccagcatttaaggtgggcactctggggagactgccagggataacctggaggaaggcggggatgacgtcaaatcatcatgccccttatgatttgggctacacacgtgctacaatggcgtaaacaaagggaagcgaacccgcgagggtgggcaaatcccaaaaataacgtcccagttcggactgtagtctgcaacccgactacacgaagctggaatcgctagtaatcgcggatcagaatgccgcggtgaatacgttcccgggtcttgtacacaccgcccgtcacaccatgggagtcagtaacgcccgaagtcagtgacctaaccgcaaggaaggagctgccgaaggcgggaccgatgactggggtgaagtcgtaacaaggtagccgtatcggaaggtgcggctggatcacctccttt

SEQ ID NO: 525 - DNA, 1527 bp, artificial sequence
  >GCF_005848555.1_01282 Blautia_luti_group
tcagagagtttgatcctggctcaggatgaacgctggcggcgtgcttaacacatgcaagtcgaacgggaattactttattgaaacttcggtcgatttaatttaattctagtggcggacgggtgagtaacgcgtgggtaacctgccttgtacagggggataacagtcagaaatgactgctaataccgcataagcgcacagagctgcatggctcagtgtgaaaaactccggtggtataagatggacccgcgttggattagctagttggtgaggtaacggcccaccaaggcgacgatccatagccggcctgagagggtgaacggccacattgggactgagacacggcccagactcctacgggaggcagcagtggggaatattgcacaatgggggaaaccctgatgcagcgacgccgcgtgaaggaagaagtatctcggtatgtaaacttctatcagcagggaagaaaatgacggtacctgactaagaagccccggctaactacgtgccagcagctgcggtaatacgtagggggcaagcgttatccggatttactgggtgtaaagggagcgtagacggatggacaagtctgatgtgaaaggctggggctcaaccccgggactgcattggaaactgcccgtcttgagtgccggagaggtaagcggaattcctagtgtagcggtgaaatgcgtagatattaggaggaacaccagtggcgaaggcggcttactggacggtaactgacgttgaggctcgaaagcgtggggagcaaacaggattagataccctggtagtccacgcggtaaacgatgaatgctaggtgtcgggtgacaaagtcattcggtgccgccgcaaacgcattaagcattccacctggggagtacgttcgcaagaatgaaactcaaaggaattgacggggacccgcacaagcggtggagcatgtggtttaattcgaagcaacgcgaagaaccttaccaagtcttgacatccccctgaccggaacttaaccgttccttcccttcggggcaggggagacaggtggtgcatggttgtcgtcagctcgtgtcgtgagatgttgggttaagtcccgcaacgagcgcaacccctatcctcagtagccagcatttaaggtgggcactctggggagactgccagggataacctggaggaaggcggggatgacgtcaaatcatcatgccccttatgatttgggctacacacgtgctacaatggcgtaaacaaagggaagcgaacctgcgagggtgggcaaatcccaaaaataacgtcccagttcggactgtagtctgcaacccgactacacgaagctggaatcgctagtaatcgcggatcagaatgccgcggtgaatacgttcccgggtcttgtacacaccgcccgtcacaccatgggagtcagtaacgcccgaagtcagtgacctaaccgcaaggaaggagctgccgaaggcgggaccgatgactggggtgaagtcgtaacaaggtagccgtatcggaaggtgcggctggatcacctccttt

SEQ ID NO: 526 - DNA, 1527 bp, artificial sequence
  >GCF_005848555.1_02045 Blautia_luti_group
tcagagagtttgatcctggctcaggatgaacgctggcggcgtgcttaacacatgcaagtcgaacgggaaaccttttattgaagcttcggcagatttagctggtttctagtggcggacgggtgagtaacgcgtgggtaacctgccttgtacagggggataacagtcagaaatgactgctaataccgcataagcgcacggagctgcatggctcagtgtgaaaaactccggtggtataagatggacccgcgttggattagctagttggtgaggtaacggcccaccaaggcgacgatccatagccggcctgagagggtgaacggccacattgggactgagacacggcccagactcctacgggaggcagcagtggggaatattgcacaatgggggaaaccctgatgcagcgacgccgcgtgaaggaagaagtatctcggtatgtaaacttctatcagcagggaagaaaatgacggtacctgactaagaagccccggctaactacgtgccagcagccgcggtaatacgtagggggcaagcgttatccggatttactgggtgtaaagggagcgtagacggatggacaagtctgatgtgaaaggctggggctcaaccccgggactgcattggaaactgcccgtcttgagtgccggagaggtaagcggaattcctagtgtagcggtgaaatgcgtagatattaggaggaacaccagtggcgaaggcggcttactggacggtaactgacgttgaggctcgaaagcgtggggagcaaacaggattagataccctggtagtccacgcggtaaacgatgaatgctaggtgtcgggtgacaaagtcattcggtgccgccgcaaacgcattaagcattccacctggggagtacgttcgcaagaatgaaactcaaaggaattgacggggacccgcacaagcggtggagcatgtggtttaattcgaagcaacgcgaagaaccttaccaagtcttgacatccccctgaccggaacttaaccgttccttcccttcggggcaggggagacaggtggtgcatggttgtcgtcagctcgtgtcgtgagatgttgggttaagtcccgcaacgagcgcaacccctatcctcagtagccagcatttaaggtgggcactctggggagactgccagggataacctggaggaaggcggggatgacgtcaaatcatcatgccccttatgatttgggctacacacgtgctacaatggcgtaaacaaagggaagcgaacccgcgagggtgggcaaatcccaaaaataacgtcccagttcggactgtagtctgcaacccgactacacgaagctggaatcgctagtaatcgcggatcagaatgccgcggtgaatacgttcccgggtcttgtacacaccgcccgtcacaccatgggagtcagtaacgcccgaagtcagtgacctaaccgcaaggaaggagctgccgaaggcgggaccgatgactggggtgaagtcgtaacaaggtagccgtatcggaaggtgcggctggatcacctccttt

SEQ ID NO: 527 - DNA, 1527 bp, artificial sequence
  >GCF_005848555.1_02312 Blautia_luti_group
tcagagagtttgatcctggctcaggatgaacgctggcggcgtgcttaacacatgcaagtcgaacgggaaaccttttattgaagcttcggcggatttagctggtttctagtggcggacgggtgagtaacgcgtgggcaacctgccttgtacagggggataacagtcagaaatgactgctaataccgcataagcgcacagagctgcatggctcagtgtgaaaaactccggtggtataagatggacccgcgttggattagctagttggtgaggtaacggcccaccaaggcgacgatccatagccggcctgagagggtgaacggccacattgggactgagacacggcccagactcctacgggaggcagcagtggggaatattgcacaatgggggaaaccctgatgcagcgacgccgcgtgaaggaagaagtatctcggtatgtaaacttctatcagcagggaagaaaatgacggtacctgactaagaagccccggctaactacgtgccagcagccgcggtaatacgtagggggcaagcgttatccggatttactgggtgtaaagggagcgtagacggatggacaagtctgatgtgaaaggctggggctcaaccccgggactgcattggaaactgcccgtcttgagtgccggagaggtaagcggaattcctagtgtagcggtgaaatgcgtagatattaggaggaacaccagtggcgaaggcggcttactggacggtaactgacgttgaggctcgaaagcgtggggagcaaacaggattagataccctggtagtccacgcggtaaacgatgaatgctaggtgtcgggaagcaaagcttttcggtgccgccgcaaacgcattaagcattccacctggggagtacgttcgcaagaatgaaactcaaaggaattgacggggacccgcacaagcggtggagcatgtggtttaattcgaagcaacgcgaagaaccttaccaagtcttgacatccctctgacggactcttaaccgagtctttccttcgggacagaggagacaggtggtgcatggttgtcgtcagctcgtgtcgtgagatgttgggttaagtcccgcaacgagcgcaacccctatcctcagtagccagcatttaaggtgggcactctggggagactgccagggataacctggaggaaggcggggatgacgtcaaatcatcatgccccttatgatttgggctacacacgtgctacaatggcgtaaacaaagggaagcgaacccgcgagggtgggcaaatcccaaaaataacgtcccagttcggactgtagtctgcaacccgactacacgaagctggaatcgctagtaatcgcggatcagaatgccgcggtgaatacgttcccgggtcttgtacacaccgcccgtcacaccatgggagtcagtaacgcccgaagtcagtgacctaaccgcaaggaaggagctgccgaaggcgggaccgatgactggggtgaagtcgtaacaaggtagccgtatcggaaggtgcggctggatcacctccttt

SEQ ID NO: 528 - DNA, 1527 bp, artificial sequence
  >GCF_005848555.1_03315 Blautia_luti_group
tcagagagtttgatcctggctcaggatgaacgctggcggcgtgcttaacacatgcaagtcgaacgggaattactttattgaaacttcggtcgatttaatttaattctagtggcggacgggtgagtaacgcgtgggtaacctgccttgtacagggggataacagtcagaaatgactgctaataccgcataagcacacggagctgcatggctcggtgtgaaaaactccggtggtataagatggacccgcgttggattagctagttggtgaggtaacggcccaccaaggcgacgatccatagccggcctgagagggtgaacggccacattgggactgagacacggcccagactcctacgggaggcagcagtggggaatattgcacaatgggggaaaccctgatgcagcgacgccgcgtgaaggaagaagtatctcggtatgtaaacttctatcagcagggaagaaaatgacggtacctgactaagaagccccggctaactacgtgccagcagccgcggtaatacgtagggggcaagcgttatccggatttactgggtgtaaagggagcgtagacggatggacaagtctgatgtgaaaggctggggctcaaccccgggactgcattggaaactgcccgtcttgagtgccggagaggtaagcggaattcctagtgtagcggtgaaatgcgtagatattaggaggaacaccagtggcgaaggcggcttactggacggtaactgacgttgaggctcgaaagcgtggggagcaaacaggattagataccctggtagtccacgcggtaaacgatgaatgctaggtgtcgggaagcaaagcttttcggtgccgccgcaaacgcattaagcattccacctggggagtacgttcgcaagaatgaaactcaaaggaattgacggggacccgcacaagcggtggagcatgtggtttaattcgaagcaacgcgaagaaccttaccaagtcttgacatccctctgaccgactcttaatcgagtctttccttcgggacagaggagacaggtggtgcatggttgtcgtcagctcgtgtcgtgagatgttgggttaagtcccgcaacgagcgcaacccctatccccagtagccagcggtttggccgggcactctgaggagactgccagggataacctggaggaaggcggggatgacgtcaaatcatcatgccccttatgatttgggctacacacgtgctacaatggcgtaaacaaagggaagcgaacccgcgagggtgggcaaatctcaaaaataacgtcccagttcggactgtagtctgcaacccgactacacgaagctggaatcgctagtaatcgcggatcagaatgccgcggtgaatacgttcccgggtcttgtacacaccgcccgtcacaccatgggagtcagtaacgcccgaagtcagtgacctaaccgcaaggaaggagctgccgaaggcgggaccgatgactggggtgaagtcgtaacaaggtagccgtatcggaaggtgcggctggatcacctccttt

SEQ ID NO: 529 - DNA, 1527 bp, artificial sequence
  >GCF_005848555.1_03403 Blautia_luti_group
tcagagagtttgatcctggctcaggatgaacgctggcggcgtgcttaacacatgcaagtcgaacgggaaaccttttattgaagcttcggcggatttagctggtttctagtggcggacgggtgagtaacgcgtgggtaacctgccttgtacagggggataacagtcagaaatgactgctaataccgcataagcgcacggagctgcatggctcagtgtgaaaaactccggtggtataagatggacccgcgttggattagctagttggtgaggtaacggcccaccaaggcgacgatccatagccggcctgagagggtgaacggccacattgggactgagacacggcccagactcctacgggaggcagcagtggggaatattgcacaatgggggaaaccctgatgcagcgacgccgcgtgaaggaagaagtatctcggtatgtaaacttctatcagcagggaagaaaatgacggtacctgactaagaagccccggctaactacgtgccagcagccgcggtaatacgtagggggcaagcgttatccggatttactgggtgtaaagggagcgtagacggatggacaagtctgatgtgaaaggctggggctcaaccccgggactgcattggaaactgcccgtcttgagtgccggagaggtaagcggaattcctagtgtagcggtgaaatgcgtagatattaggaggaacaccagtggcgaaggcggcttactggacggtaactgacgttgaggctcgaaagcgtggggagcaaacaggattagataccctggtagtccacgcggtaaacgatgaatgctaggtgtcgggaagcaaagcttttcggtgccgccgcaaacgcattaagcattccacctggggagtacgttcgcaagaatgaaactcaaaggaattgacggggacccgcacaagcggtggagcatgtggtttaattcgaagcaacgcgaagaaccttaccaagtcttgacatccctctgacggactcttaaccgagtctttccttcgggacagaggagacaggtggtgcatggttgtcgtcagctcgtgtcgtgagatgttgggttaagtcccgcaacgagcgcaacccctatcctcagtagccagcatttaaggtgggcactctggggagactgccagggataacctggaggaaggcggggatgacgtcaaatcatcatgccccttatgatttgggctacacacgtgctacaatggcgtaaacaaagggaagcgaacccgcgagggtgggcaaatcccaaaaataacgtcccagttcggactgtagtctgcaacccgactacacgaagctggaatcgctagtaatcgcggatcagaatgccgcggtgaatacgttcccgggtcttgtacacaccgcccgtcacaccatgggagtcagtaacgcccgaagtcagtgacctaaccgcaaggaaggagctgccgaaggcgggaccgatgactggggtgaagtcgtaacaaggtagccgtatcggaaggtgcggctggatcacctccttt

SEQ ID NO: 530 - DNA, 1000 bp, artificial sequence
  >GCF_006227745.1_01543 Streptococcus_salivarius_group
aatgagagtttgatcctggctcaggacgaacgctggcggcgtgcctaatacatgcaagtagaacgctgaagagaggagcttgctcttcttggatgagttgcgaacgggtgagtaacgcgtaggtaacctgccttgtagcgggggataactattggaaacgatagctaataccgcataacaatggatgacacatgtcatttatttgaaaggggcaattgctccactacaagatggacctgcgttgtattagctagtaggtgaggtaacggctcacctaggcgacgatacatagccgacctgagagggtgatcggccacactgggactgagacacggcccagactcctacgggaggcagcagtagggaatcttcggcaatgggggcaaccctgaccgagcaacgccgcgtgagtgaagaaggttttcggatcgtaaagctctgttgtaagtcaagaacgagtgtgagagtggaaaattcacactgtgacggtagcttaccagaaagggacggctaactacgtgccagcagccgcggtaatacgtaggtcccgagcgttgtccggatttattgggcgtaaagcgagcgcaggcggtttgataagtctgaagttaaaggctgtggctcaaccatagttcgctttggaaactgtcaaacttgagtgcagaaggggagagtggaattccatgtgtagcggtgaaatgcgtagatatatggaggaacaccggtggcgaaagcggctctctggtctgtaactgacgctgaggctcgaaagcgtggggagcgaacaggattagataccctggtagtccacgccgtaaacgatgagtgctaggtgttggatcctttccgggattcagtgccgcagctaacgcattaagcactccgcctggggagtacgaccgcaaggttgaaactcaaaggaattgacgggggcccgcacaagcggtggagcatgtggtttaattcgaagcaacgcgaagaaccacctaaacttttctta

SEQ ID NO: 531 - DNA, 1542 bp, artificial sequence
  >GCF_900043115.1_02011 Streptococcus_salivarius_group
aatgagagtttgatcctggctcaggacgaacgctggcggcgtgcctaatacatgcaagtagaacgctgaaggaggagcttgcttctctggatgagttgcgaacgggtgagtaacgcgtaggtaacctgcctggtagcgggggataactattggaaacgatagctaataccgcataagagtagatgttgcatgacatttacttaaaaggtgcaattgcatcactaccagatggacctgcgttgtattagctagttggtgaggtaacggctcaccaaggcaacgatacatagccgacctgagagggtgatcggccacactgggactgagacacggcccagactcctacgggaggcagcagtagggaatcttcggcaatggacggaagtctgaccgagcaacgccgcgtgagtgaagaaggttttcggatcgtaaagctctgttgtaagagaagaacgagtgtgagagtggaaagttcacactgtgacggtatcttaccagaaagggacggctaactacgtgccagcagccgcggtaatacgtaggtcccgagcgttgtccggatttattgggcgtaaagcgagcgcaggcggttagataagtctgaagttaaaggctgtggcttaaccatagtacgctttggaaactgtttaacttgagtgcaagaggggagagtggaattccatgtgtagcggtgaaatgcgtagatatatggaggaacaccggtggcgaaagcggctctctggcttgtaactgacgctgaggctcgaaagcgtggggagcaaacaggattagataccctggtagtccacgccgtaaacgatgagtgctaggtgttagaccctttccggggtttagtgccgcagctaacgcattaagcactccgcctggggagtacgaccgcaaggttgaaactcaaaggaattgacgggggcccgcacaagcggtggagcatgtggtttaattcgaagcaacgcgaagaaccttaccaggtcttgacatccctctgaccgctctagagatagagttttcctttgggacagaggtgacaggtggtgcatggttgtcgtcagctcgtgtcgtgagatgttgggttaagtcccgcaacgagcgcaacccctattgttagttgccatcattcagttgggcactctagcgagactgccggtaataaaccggaggaaggtggggatgacgtcaaatcatcatgccccttatgacctgggctacacacgtgctacaatggctggtacaacgagtcgcaagccggtgacggcaagctaatctcttaaagccagtctcagttcggattgtaggctgcaactcgcctacatgaagtcggaatcgctagtaatcgcggatcagcacgccgcggtgaatacgttcccgggccttgtacacaccgcccgtcacaccacgagagtttgtaacacccgaagtcggtgaggtaaccttttggagccagccgcctaaggtgggatagatgattggggtgaagtcgtaacaaggtagccgtatcggaaggtgcggctggatcacctcctt

SEQ ID NO: 532 - DNA, 1530 bp, artificial sequence
  >GCF_900067245.1_01060 [Ruminococcus]_gnavus
aacgagagtttgatcctggctcaggatgaacgctggcggcgtgcttaacacatgcaagtcgagcgaagcaccttgagacggatttcttcggattgaagccttggtgactgagcggcggacgggtgagtaacgcgtgggtaacctgcctcatacagggggataacagttggaaacggctgctaataccgcataagcgcacagtaccgcatggtaccgtgtgaaaaactccggtggtatgagatggacccgcgtctgattagctagttggtggggtaacggcctaccaaggcgacgatcagtagccgacctgagagggtgaccggccacattgggactgagacacggcccaaactcctacgggaggcagcagtggggaatattgcacaatgggggaaaccctgatgcagcgacgccgcgtgagcgatgaagtatttcggtatgtaaagctctatcagcagggaagaaaatgacggtacctgactaagaagccccggctaactacgtgccagcagccgcggtaatacgtagggggcaagcgttatccggatttactgggtgtaaagggagcgtagacggcatggcaagccagatgtgaaagcccggggctcaaccccgggactgcatttggaactgtcaggctagagtgtcggagaggaaagcggaattcctagtgtagcggtgaaatgcgtagatattaggaggaacaccagtggcgaaggcggctttctggacgatgactgacgttgaggctcgaaagcgtggggagcaaacaggattagataccctggtagtccacgccgtaaacgatgaatactaggtgtcgggtggcaaagccattcggtgccgcagcaaacgcaataagtattccacctggggagtacgttcgcaagaatgaaactcaaaggaattgacggggacccgcacaagcggtggagcatgtggtttaattcgaagcaacgcgaagaaccttacctggtcttgacatccctctgaccgctctttaatcggagctttccttcgggacagaggagacaggtggtgcatggttgtcgtcagctcgtgtcgtgagatgttgggttaagtcccgcaacgagcgcaacccctatctttagtagccagcatttaaggtgggcactctagagagactgccagggataacctggaggaaggtggggatgacgtcaaatcatcatgccccttatgaccagggctacacacgtgctacaatggcgtaaacaaagggaagcgagcccgcgagggggagcaaatcccaaaaataacgtctcagttcggattgtagtctgcaactcgactacatgaagctggaatcgctagtaatcgcgaatcagaatgtcgcggtgaatacgttcccgggtcttgtacacaccgcccgtcacaccatgggagtcagtaacgcccgaagtcagtgacccaaccgaaaggagggagctgccgaaggtgggaccgataactggggtgaagtcgtaacaaggtagccgtatcggaaggtgcggctggatcacctccttt

SEQ ID NO: 533 - DNA, 1532 bp, artificial sequence
  >GCF_900067245.1_01299 [Ruminococcus]_gnavus
  misc_feature (646)..(646): n is a, c, g, or t
  misc_feature (720)..(720): n is a, c, g, or t
  misc_feature (734)..(734): n is a, c, g, or t
  misc_feature (742)..(742): n is a, c, g, or t
  misc_feature (745)..(745): n is a, c, g, or t
  misc_feature (747)..(747): n is a, c, g, or t
  misc_feature (750)..(750): n is a, c, g, or t
  misc_feature (752)..(752): n is a, c, g, or t
  misc_feature (755)..(755): n is a, c, g, or t
  misc_feature (758)..(758): n is a, c, g, or t
  misc_feature (760)..(760): n is a, c, g, or t
  misc_feature (768)..(768): n is a, c, g, or t
  misc_feature (773)..(773): n is a, c, g, or t
  misc_feature (776)..(777): n is a, c, g, or t
  misc_feature (782)..(782): n is a, c, g, or t
  misc_feature (792)..(793): n is a, c, g, or t
aacgagagtttgatcctggctcaggatgaacgctggcggcgtgcttaacacatgcaagtcgagcgaagcaccttgacggatttcttcggattgaagccttggtgactgagcggcggacgggtgagtaacgcgtgggtaacctgcctcatacagggggataacagttggaaacggctgctaataccgcataagcgcacagtaccgcatggtacggtgtgaaaaactccggtggtatgagatggacccgcgtctgattaggtagttggtggggtaacggcctaccaagccgacgatcagtagccgacctgagagggtgaccggccacattgggactgagacacggcccaaactcctacgggaggcagcagtggggaatattgcacaatgggggaaaccctgatgcagcgacgccgcgtgagcgatgaagtatttcggtatgtaaagctctatcagcagggaagaaaatgacggtacctgactaagaagccccggctaactacgtgccagcagccgcggtaatacgtagggggcaagcgttatccggatttactgggtgtaaagggagcgtagacggcatggcaagccagatgtgaaagcccggggctcaaccccgggactgcatttggaactgtcaggctagagtgtnggagaggtaagcggaattcctagtgtagcggtgaaatgcgtagatattaggaggaacaccagtggcgaaggcgncttactggacgatnactgacgntgngnctngnaantcntngggagcanacagntanncaagntaccctggtnntcagtcttgtaaacgatgaatactaggtgtcgggtggcaaagccattcggtgccgcagcaaacgcaataagtattccacctggggagtacgttcgcaagaatgaaactcaaaggaattgacggggacccgcacaagcggtggagcatgtggtttaattcgaagcaacgcgaagaaccttacctggtcttgacatccctctgaccgctctttaatcggagctttccttcgggacagaggagacaggtggtgcatggttgtcgtcagctcgtgtcgtgagatgttgggttaagtcccgcaacgagcgcaacccctatctttagtagccagcatttaaggtgggcactctagagagactgccagggataacctggaggaaggtggggatgacgtcaaatcatcatgccccttatgaccagggctacacacgtgctacaatggcgtaaacaaagggaagcgagcccgcgagggggagcaaatcccaaaaataacgtctcagttcggattgtagtctgcaactcgactacatgaagctggaatcgctagtaatcgcgaatcagaatgtcgcggtgaatacgttcccgggtcttgtacacaccgcccgtcacaccatgggagtcagtaacgcccgaagtcagtgacccaaccgaaaggagggagctgccgaaggtgggaccgataactggggtgaagtcgtaacaaggtagccgtatcggaaggtgcggctggatcacctccttt

SEQ ID NO: 534 - DNA, 1528 bp, artificial sequence
  >GCF_900067245.1_01904 [Ruminococcus]_gnavus
aacgagagtttgatcctggctcaggatgaacgctggcggcgtgcttaacacatgcaagtcgagcgaagcaccttgacggatttcttcggattgaagtcttggtgactgagcggcggacgggtgagtaacgcgtgggtaacctgcctcatacagggggataacagttggaaacggctgctaataccgcataagcgcacagtaccgcatggtacggtgtgaaaaactccggtggtatgagatggacccgcgtctgattaggtagttggtggggtaacggcctaccaagccgacgatcagtagccgacctgagagggtgaccggccacattgggactgagacacggcccaaactcctacgggaggcagcagtggggaatattgcacaatgggggaaaccctgatgcagcgacgccgcgtgagcgatgaagtatttcggtatgtaaagctctatcagcagggaagaaaatgacggtacctgactaagaagccccggctaactacgtgccagcagccgcggtaatacgtagggggcaagcgttatccggatttactgggtgtaaagggagcgtagacggcatggcaagccagatgtgaaagcccggggctcaaccccgggactgcatttggaactgtcaggctagagtgtcggagaggaaagcggaattcctagtgtagcggtgaaatgcgtagatattaggaggaacaccagtggcgaaggcggctttctggacgatgactgacgttgaggctcgaaagcgtggggagcaaacaggattagataccctggtagtccacgccgtaaacgatgaatactaggtgtcgggtggcaaagccattcggtgccgcagcaaacgcaataagtattccacctggggagtacgttcgcaagaatgaaactcaaaggaattgacggggacccgcacaagcggtggagcatgtggtttaattcgaagcaacgcgaagaaccttacctggtcttgacatccctctgaccgctctttaatcggagctttccttcgggacagaggagacaggtggtgcatggttgtcgtcagctcgtgtcgtgagatgttgggttaagtcccgcaacgagcgcaacccctatctttagtagccagcatttaaggtgggcactctagagagactgccagggataacctggaggaaggtggggatgacgtcaaatcatcatgccccttatgaccagggctacacacgtgctacaatggcgtaaacaaagggaagcgagcccgcgagggggagcaaatcccaaaaataacgtctcagttcggattgtagtctgcaactcgactacatgaagctggaatcgctagtaatcgcgaatcagaatgtcgcggtgaatacgttcccgggtcttgtacacaccgcccgtcacaccatgggagtcagtaacgcccgaagtcagtgacccaaccgaaaggagggagctgccgaaggtgggaccgataactggggtgaagtcgtaacaaggtagccgtatcggaaggtgcggctggatcacctccttt

SEQ ID NO: 535 - DNA, 1530 bp, artificial sequence
  >GCF_900067245.1_01967 [Ruminococcus]_gnavus
  misc_feature (36)..(36): n is a, c, g, or t
  misc_feature (96)..(96): n is a, c, g, or t
  misc_feature (98)..(98): n is a, c, g, or t
  misc_feature (101)..(101): n is a, c, g, or t
aacgagagtttgatcctggctcaggatgaacgctgncggcgtgcttaacacatgcaagtcgagcgaagcacttttgcggatttcttcggattgaancnacngtgactgagcggcggacgggtgagtaacgcgtgggtaacctgcctcatacagggggataacagttggaaacggctgctaataccgcataagcgcacagtaccgcatggtacggtgtgaaaaactccggtggtatgagatggacccgcgtctgattaggtagttggtggggtaacggcctaccaagccgacgatcagtagccgacctgagagggtgaccggccacattgggactgagacacggcccaaactcctacgggaggcagcagtggggaatattgcacaatgggggaaaccctgatgcagcgacgccgcgtgagcgatgaagtatttcggtatgtaaagctctatcagcagggaagaaaatgacggtacctgactaagaagccccggctaactacgtgccagcagccgcggtaatacgtagggggcaagcgttatccggatttactgggtgtaaagggagcgtagacggcatggcaagccagatgtgaaagcccggggctcaaccccgggactgcatttggaactgtcaggctagagtgtcggagaggaaagcggaattcctagtgtagcggtgaaatgcgtagatattaggaggaacaccagtggcgaaggcgatactttctggacgatgactgacgttgaggctcgaaagcgtggggagcaaacaggattagataccctggtagtccacgccgtaaacgatgaatactaggtgtcgggtggcaaagccattcggtgccgcagcaaacgcaataagtattccacctggggagtacgttcgcaagaatgaaactcaaaggaattgacggggacccgcacaagcggtggagcatgtggtttaattcgaagcaacgcgaagaaccttacctggtcttgacatccctctgaccgctctttaatcggagctttccttcgggacagaggagacaggtggtgcatggttgtcgtcagctcgtgtcgtgagatgttgggttaagtcccgcaacgagcgcaacccctatctttagtagccagcatttaaggtgggcactctagagagactgccagggataacctggaggaaggtggggatgacgtcaaatcatcatgccccttatgaccagggctacacacgtgctacaatggcgtaaacaaagggaagcgagcccgcgagggggagcaaatcccaaaaataacgtctcagttcggattgtagtctgcaactcgactacatgaagctggaatcgctagtaatcgcgaatcagaatgtcgcggtgaatacgttcccgggtcttgtacacaccgcccgtcacaccatgggagtcagtaacgcccgaagtcagtgacccaaccgcaaggagggagctgccgaaggtgggaccgataactggggtgaagtcgtaacaaggtagccgtatcggaaggtgcggctggatcacctccttt

SEQ ID NO: 536 - DNA, 1531 bp, artificial sequence
  >GCF_900067245.1_02127 [Ruminococcus]_gnavus
  misc_feature (98)..(98): n is a, c, g, or t
  misc_feature (102)..(102): n is a, c, g, or t
aacgagagtttgatcctggctcaggatgaacgctggcggcgtgcttaacacatgcaagtcgagcgaagcaccttttgactgatttcttcggattgaancagnctgtgactgagcggcggacgggtgagtaacgcgtgggtaacctgcctcatacagggggataacagttggaaacggctgctaataccgcataagcgcacagtaccgcatggtaccgtgtgaaaaactccggtggtatgagatggacccgcgtctgattagctagttggtggggtaacggcctaccaaggcgacgatcagtagccgacctgagagggtgaccggccacattgggactgagacacggcccaaactcctacgggaggcagcagtggggaatattgcacaatgggggaaaccctgatgcagcgacgccgcgtgagcgatgaagtatttcggtatgtacagttctatcagcagggaagaaaatgacggtacctgactaagaagccccggctaactacgtgccagcagccgcggtaatacgtagggggcaagcgttatccggatttactgggtgtaaagggagcgtagacggcatggcaagccagatgtgaaagcccggggctcaaccccgggactgcatttggaactgtcaggctagagtgtcggagaggaaagcggaattcctagtgtagcggtgaaatgcgtagatattaggaggaacaccagtggcgaaggcggctttctggacgatgactgacgttgaggctcgaaagcgtggggagcaaacaggattagataccctggtagtccacgccgtaaacgatgaatactaggtgtcgggtggcaaagccattcggtgccgcagcaaacgcaataagtattccacctggggagtacgttcgcaagaatgaaactcaaaggaattgacggggacccgcacaagcggtggagcatgtggtttaattcgaagcaacgcgaagaaccttacctggtcttgacatccctctgaccgctctttaatcggagctttccttcgggacagaggagacaggtggtgcatggttgtcgtcagctcgtgtcgtgagatgttgggttaagtcccgcaacgagcgcaacccctatctttagtagccagcatttaaggtgggcactctagagagactgccagggataacctggaggaaggtggggatgacgtcaaatcatcatgccccttatgaccagggctacacacgtgctacaatggcgtaaacaaagggaagcgagcccgcgagggggagcaaatcccaaaaataacgtctcagttcggattgtagtctgcaactcgactacatgaagctggaatcgctagtaatcgcgaatcagaatgtcgcggtgaatacgttcccgggtcttgtacacaccgcccgtcacaccatgggagtcagtaacgcccgaagtcagtgacccaaccgaaaggagggagctgccgaaggtgggaccgataactggggtgaagtcgtaacaaggtagccgtatcggaaggtgcggctggatcacctccttt

SEQ ID NO: 537 - DNA, 1542 bp, artificial sequence
  >GCF_900095845.1_01436 Streptococcus_infantis_group
aatgagagtttgatcctggctcaggacgaacgctggcggcgtgcctaatacatgcaagtagaacgctgaaggaggagcttgcttctctggatgagttgcgaacgggtgagtaacgcgtaggtaacctgcctggtagcgggggataactattggaaacgatagctaataccgcataatattgattattgcatgatagtcaattaaaaggtgcaattgcaccactaccagatggacctgcgttgtattagctagttggtggggtaacggctcaccaaggcgacgatacatagccgacctgagagggtgatcggccacactgggactgagacacggcccagactcctacgggaggcagcagtagggaatcttcggcaatggacggaagtctgaccgagcaacgccgcgtgagtgaagaaggttttcggatcgtaaagctctgttgtaagagaagaacgagtgtgagagtggaaagttcacactgtgacggtatcttaccagaaagggacggctaactacgtgccagcagccgcggtaatacgtaggtcccgagcgttgtccggatttattgggcgtaaagcgagcgcaggcggttagataagtctgaagttaaaggctgtggcttaaccatagtacgctttggaaactgtttaacttgagtgcaagaggggagagtggaattccatgtgtagcggtgaaatgcgtagatatatggaggaacaccggtggcgaaagcggctctctggcttgtaactgacgctgaggctcgaaagcgtggggagcaaacaggattagataccctggtagtccacgccgtaaacgatgagtgctaggtgttagaccctttccggggtttagtgccgtagctaacgcattaagcactccgcctggggagtacgaccgcaaggttgaaactcaaaggaattgacgggggcccgcacaagcggtggagcatgtggtttaattcgaagcaacgcgaagaaccttaccaggtcttgacatccctctgaccgctctagagatagagttttccttcgggacagaggtgacaggtggtgcatggttgtcgtcagctcgtgtcgtgagatgttgggttaagtcccgcaacgagcgcaacccctattgttagttgccatcattcagttgggcactctagcgagactgccggtaataaaccggaggaaggtggggatgacgtcaaatcatcatgccccttatgacctgggctacacacgtgctacaatggttggtacaacgagtcgcaagccggtgacggcaagctaatctcttaaagccaatctcagttcggattgtaggctgcaactcgcctacatgaagtcggaatcgctagtaatcgcggatcagcacgccgcggtgaatacgttcccgggccttgtacacaccgcccgtcacaccacgagagtttgtaacacccgaagtcggtgaggtaaccatttggagccagccgcctaaggtgggatagatgattggggtgaagtcgtaacaaggtagccgtatcggaaggtgcggctggatcacctcctt

SEQ ID NO: 538 - DNA, 1508 bp, artificial sequence
  >GCF_900104675.1_02004 Angelakisella_massiliensis
aatgaagagtttgatcctggctcaggacgaacgctggcggcgcgcctaacacatgcaagtcgaacggagtaagatgagcttgcttatcttacttagtggcggacgggtgagtaacacgtgagcaacctgccttcgagtggggaataacagtcggaaacgactgctaataccgcataacacattgggatggcatcatcctgatgtcaaagatttatcgctcgaagatgggctcgcgtccgattagctagttggcggggtaacggcccaccaaggcgacgatcggtagccggactgagaggttgatcggccacattgggactgagacacggcccagactcctacgggaggcagcagtgggggatattgcacaatgggggaaaccctgatgcagcgacgccgcgtgtaggaagacggtcctctggattgtaaactactgtcttcagggacgataatgacggtacctgaggaggaagctccggctaactacgtgccagcagccgcggtaatacgtagggagcgagcgttgtccggaattactgggtgtaaagggagcgtaggcggggaggcaagttggatgtgaaaactatcggctcaactgatagactgcattcaaaactgtttctcttgagtgaagtagaggcaggcggaattcctagtgtagcggtgaaatgcgtagatattaggaggaacaccagtggcgaaggcggcctgctgggcttttactgacgctgaggctcgaaagtgtggggagcaaacaggattagataccctggtagtccacaccgtaaacgatgattactaggtgtggggggtctgaccccttccgtgccggagttaacacaataagtaatccacctggggagtacggccgcaaggttgaaactcaaaggaattgacgggggcccgcacaagcagtggagtatgtggtttaattcgaagcaacgcgaagaaccttaccaggtcttgacatctcctgcataacctagagataggtgaagtccttcgggacaggaagacaggtggtgcatggttgtcgtcagctcgtgtcgtgagatgttgggttaagtcccgcaacgagcgcaacccttgtttttagttgctacgcaagagcactctaaagagactgccgttgacaaaacggaggaaggtggggatgacgtcaaatcatcatgccccttatgacctgggctacacacgtactacaatggcaattaacagagggaagcgacaccgcgaggtggagcaaaaccctaaaaattgtcccagttcagattgcaggctgcaactcgcctgcatgaagtcggaattgctagtaatcgcggatcagcatgccgcggtgaatacgttcccgggccttgtacacaccgcccgtcacaccatgggagtcggtaacacccgaagtcagtagcctaaccgcaaggagggcgctgccgaaggtgggattgatgactggggtgaagtcgtaacaaggtagccgtatcggaaggtgcggctggatcacctccttt

SEQ ID NO: 539 - DNA, 1501 bp, artificial sequence; identical to SEQ ID NO: 127
  >GCF_900106845.1_00099 [Romboutsia]_timonensis

SEQ ID NO: 540 - DNA, 891 bp, artificial sequence; identical to SEQ ID NO: 128
  >GCF_900106845.1_02861 [Romboutsia]_timonensis
  misc_feature (7)..(7): n is a, c, g, or t

SEQ ID NO: 541 - DNA, 1426 bp, artificial sequence; identical to SEQ ID NO: 129
  >GCF_900129135.1_00002 Lactonifactor_longoviformis

SEQ ID NO: 542 - DNA, 1525 bp, artificial sequence
  >GCF_900129515.1_01161 Bittarella_massiliensis
ataaagagtttgatcctggctcaggacgaacgctggcggcgcgcctaacacatgcaagtcgaacggacacatccgacggaatagcttgctaggaagatggatgttgttagtggcggacgggtgagtaacacgtgagcaacctgcctcggagtgggggacaacagttggaaacgactgctaataccgcatacggtggtcgggggacatcccctgaccaagaaaggatttatatccgctctgagatgggctcgcgtctgattagctagttggcggggtaacggcccaccaaggcaacgatcagtagccggactgagaggttgaacggccacattgggactgagacacggcccagactcctacgggaggcagcagtggggaatattgcacaatggggggaaccctgatgcagcgacgccgcgtgagggaagaaggttttcggattgtaaacctctgtcttgtgggacgataatgacggtaccacaggaggaagccatggctaactacgtgccagcagccgcggtaatacgtagatggcgagcgttgtccggaattactgggtgtaaagggagtgtaggcgggatcataagttgcgtgtgaaatgcaggggctcaacccctgaactgcgcgcaaaactgtggttcttgagtgaagtagaggcaggcggaattcccggtgtagcggtggaatgcgtagatatcgggaggaacaccagtggcgaaggcggcctgctgggcttttactgacgctgaggctcgaaagcatggggagcaaacaggattagataccctggtagtccatgccgtaaacgatgattactaggtgtggggggataaccccctccgtgccggagttaacacaataagtaatccacctggggagtacgaccgcaaggttgaaactcaaaggaattgacgggggcccgcacaagcagtggagtatgtggtttaattcgaagcaacgcgaaaaaccttaccaggtcttgacatctatcgctatcccaagagattgggagttcccttcggggacggtaagacaggtggtgcatggttgtcgtcagctcgtgtcgtgagatgttgggttaagtcccgcaacgagcgcaacccttactgttagttgctacgcaagagcactctaacgggactgccgttgacaaaacggaggaaggtggggatgacgtcaaatcatcatgccctttatgacctgggctacacacgtactacaatggccgcaaacaacgagcagcgaaaccgcgaggtggagcgaatctataaaagcggtctcagttcggattgcaggctgcaactcgcctgcatgaagtcggaattgctagtaatcgcggatcagcatgccgcggtgaatacgttcccgggccttgtacacaccgcccgtcacaccatgagagccggtaacacccgaagtcagtagtctaaccgcaagggggacgctgccgaaggtggggctggtgattggggtgaagtcgtaacaaggtagccgtatcggaaggtgcggctggatcacctccttt

SEQ ID NO: 543 - DNA, 1537 bp, artificial sequence
  >GCF_900445025.1_01919 Schaalia_odontolytica
tcggagagtttgatcctggctcaggacgaacgctggcggcgtgcttaacacatgcaagtcgaacgctgaagctcagcttgctgggtggatgagtggcgaacgggtgagtaacacgtgagtaacctgcccccttctttgggataacgcccggaaacgggtgctaatactggatattcactgatcttcgcatgggggttggtggaaaggtttgttctggtgggggatgggctcgcggcctatcagcttgttggtggggtgatggcctaccaaggctttgacgggtagccggcctgagagggtgaccggtcacattgggactgagatacggcccagactcctacgggaggcagcagtggggaatattgcacaatgggcgaaagcctgatgcagcgacgccgcgtgagggatggaggccttcgggttgtaaacctctttcgctcatggtcaagccgcaacagtggttgtggtgagggtagtgggtaaagaagcgccggctaactacgtgccagcagccgcggtaatacgtagggcgcgagcgttgtccggaattattgggcgtaaagggcttgtaggcggttggtcgcgtctgccgtgaaatcctctggcttaactgggggcgtgcggtgggtacgggctgacttgagtgcggtaggggagactggaactcctggtgtagcggtggaatgcgcagatatcaggaagaacaccggtggcgaaggcgggtctctgggccgttactgacgctgaggagcgaaagcgtggggagcgaacaggattagataccctggtagtccacgctgtaaacgttgggcactaggtgtgggggccacccgtggtttctgcgccgtagctaacgctttaagtgccccgcctggggagtacggccgcaaggctaaaactcaaaggaattgacgggggcccgcacaagcggcggagcatgcggattaattcgatgcaacgcgaagaaccttaccaaggcttgacatgcacggcggcactgcagagatgtggtggcatttagttggtcgtgtgcaggtggtgcatggttgtcgtcagctcgtgtcgtgagatgttgggttaagtcccgcaacgagcgcaacccttgccctatgttgccagcacgtgatggtggggactcgtgggggactgccggggttaactcggaggaaggtggggatgacgtcaaatcatcatgccccttatgtcttgggcttcacgcatgctacaatggttggtacagagggttgcgatactgtgaggtggagcgaatcccttaaagccagtctcagttcggattggggtctgcaactcgaccccatgaaggtggagtcgctagtaatcgcagatcagcaacgctgcggtgaatacgttctcgggccttgtacacaccgcccgtcacgtcacgaaagttggtaacacccgaagcccatggcctaaccgctttgtgcggggggagtggtcgaaggtgggattggcgattgggacgaagtcgtaacaaggtagccgtaccggaaggtgcggctggatcacctccttt

SEQ ID NO: 544 - DNA, 1544 bp, artificial sequence
  >GCF_900459415.1_01287 Streptococcus_infantis_group
taatgagagtttgatcctggctcaggacgaacgctggcggcgtgcctaatacatgcaagtagaacgctgaaggaggagcttgcttctccggatgagttgcgaacgggtgagtaacgcgtaggtaacctgcctggtagcgggggataactattggaaacgatagctaataccgcataacagtagatatcgcatgatagctgcttgaaaggtgcaattgcaccactaccagatggacctgcgttgtattagctagttggtgaggtaacggctcaccaaggcgacgatacatagccgacctgagagggtgatcggccacactgggactgagacacggcccagactcctacgggaggcagcagtagggaatcttcggcaatggacggaagtctgaccgagcaacgccgcgtgagtgaagaaggttttcggatcgtaaagctctgttgtaagagaagaacgagtgtgagagtggaaagttcacactgtgacggtatcttaccagaaagggacggctaactacgtgccagcagccgcggtaatacgtaggtcccgagcgttgtccggatttattgggcgtaaagcgagcgcaggcggttagataagtctgaagttaaaggctgtggcttaaccatagtacgctttggaaactgtttaacttgagtgcaagaggggagagtggaattccatgtgtagcggtgaaatgcgtagatatatggaggaacaccggtggcgaaagcggctctctggcttgtaactgacgctgaggctcgaaagcgtggggagcaaacaggattagataccctggtagtccacgccgtaaacgatgagtgctaggtgttagaccctttccggggtttagtgccgaagctaacgcattaagcactccgcctggggagtacgaccgcaaggttgaaactcaaaggaattgacgggggcccgcacaagcggtggagcatgtggtttaattcgaagcaacgcgaagaaccttaccaggtcttgacatccctctgaccgctctagagatagagttttccttcgggacagaggtgacaggtggtgcatggttgtcgtcagctcgtgtcgtgagatgttgggttaagtcccgcaacgagcgcaacccctattgttagttgccatcattcagttgggcactctagcgagactgccggtaataaaccggaggaaggtggggatgacgtcaaatcatcatgccccttatgacctgggctacacacgtgctacaatggttggtacaacgagtcgcaagccggtgacggcaagctaatctcttaaagccaatctcagttcggattgtaggctgcaactcgcctacatgaagtcggaatcgctagtaatcgcggatcagcacgccgcggtgaatacgttcccgggccttgtacacaccgcccgtcacaccacgagagtttgtaacacccgaagtcggtgaggtaaccatttggagccagccgcctaaggtgggatagatgattggggtgaagtcgtaacaaggtagccgtatcggaaggtgcggctggatcacctccttt

SEQ ID NO: 545 - DNA, 1542 bp, artificial sequence
  >GCF_900459415.1_01711 Streptococcus_infantis_group
aatgagagtttgatcctggctcaggacgaacgctggcggcgtgcctaatacatgcaagtagaacgctgaaggaggagcttgctcttctggatgagttgcgaacgggtgagtaacgcgtaggtaacctgcctggtagcgggggataactattggaaacgatagctaataccgcataacagtagatatcgcatgatagctgcttgaaaggtgcaattgcaccactaccagatggacctgcgttgtattagctagttggtgaggtaacggctcaccaaggcaacgatacatagccgacctgagagggtgatcggccacactgggactgagacacggcccagactcctacgggaggcagcagtagggaatcttcggcaatggacggaagtctgaccgagcaacgccgcgtgagtgaagaaggttttcggatcgtaaagctctgttgtaagagaagaacgagtgtgagagtggaaagttcacactgtgacggtatcttaccagaaagggacggctaactacgtgccagcagccgcggtaatacgtaggtcccgagcgttgtccggatttattgggcgtaaagcgagcgcaggcggttagataagtctgaagttaaaggctgtggcttaaccatagtacgctttggaaactgtttaacttgagtgcaagaggggagagtggaattccatgtgtagcggtgaaatgcgtagatatatggaggaacaccggtggcgaaagcggctctctggcttgtaactgacgctgaggctcgaaagcgtggggagcaaacaggattagataccctggtagtccacgccgtaaacgatgagtgctaggtgttagaccctttccggggtttagtgccgaagctaacgcattaagcactccgcctggggagtacgaccgcaaggttgaaactcaaaggaattgacgggggcccgcacaagcggtggagcatgtggtttaattcgaagcaacgcgaagaaccttaccaggtcttgacatccctctgaccgctctagagatagagttttccttcgggacagaggtgacaggtggtgcatggttgtcgtcagctcgtgtcgtgagatgttgggttaagtcccgcaacgagcgcaacccctattgttagttgccatcatttagttgggcactctagcgagactgccggtaataaaccggaggaaggtggggatgacgtcaaatcatcatgccccttatgacctgggctacacacgtgctacaatggttggtacaacgagtcgcaagccggtgacggcaagctaatctcttaaagccaatctcagttcggattgtaggctgcaactcgcctacatgaagtcggaatcgctagtaatcgcggatcagcacgccgcggtgaatacgttcccgggccttgtacacaccgcccgtcacaccacgagagtttgtaacacccgaagtcggtgaggtaaccatttggagccagccgcctaaggtgggatagatgattggggtgaagtcgtaacaaggtagccgtatcggaaggtgcggctggatcacctcctt

SEQ ID NO: 546 - DNA, 1553 bp, artificial sequence
  >GCF_900475015.1_00570 Streptococcus_gordonii
aatgagagtttgatcctggctcaggacgaacgctggcggcgtgcctaatacatgcaagtagaacgcacagtttataccgtagcttgctacaccatagactgtgagttgcgaacgggtgagtaacgcgtaggtaacctgcctggtagcgggggataactattggaaacgatagctaataccgcataatattaattattgcatgataattaattgaaaggtgcaattgcaccactaccagatggacctgcgttgtattagctagtaggtgaggtaacggctcacctaggcgacgatacatagccgacctgagagggtgatcggccacactgggactgagacacggcccagactcctacgggaggcagcagtagggaatcttcggcaatggacgaaagtctgaccgagcaacgccgcgtgagtgaagaaggttttcggatcgtaaagctctgttgtaagagaagaacgggtgtgagagtggaaagttcacactgtgacggtatcttaccagaaagggacggctaactacgtgccagcagccgcggtaatacgtaggtcccgagcgttgtccggatttattgggcgtaaagcgagcgcaggcggttagataagtctgaagttaaaggctgtggcttaaccatagtacgctttggaaactgtttaacttgagtgcagaaggggagagtggaattccatgtgtagcggtgaaatgcgtagatatatggaggaacaccggtggcgaaagcggctctctggtctgtaactgacgctgaggctcgaaagcgtggggagcgaacaggattagataccctggtagtccacgccgtaaacgatgagtgctaggtgttaggccctttccggggcttagtgccgcagctaacgcattaagcactccgcctggggagtacgaccgcaaggttgaaactcaaaggaattgacgggggcccgcacaagcggtggagcatgtggtttaattcgaagcaacgcgaagaaccttaccaggtcttgacatcccgatgcccgctctagagatagagttttacttcggtacatcggtgacaggtggtgcatggttgtcgtcagctcgtgtcgtgagatgttgggttaagtcccgcaacgagcgcaacccttattgttagttgccatcattcagttgggcactctagcgagactgccggtaataaaccggaggaaggtggggatgacgtcaaatcatcatgccccttatgacctgggctacacacgtgctacaatggctggtacaacgagtcgcaagtcggtgacggcaagctaatctcttaaagccagtctcagttcggattgtaggctgcaactcgcctacatgaagtcggaatcgctagtaatcgcggatcagcacgccgcggtgaatacgttcccgggccttgtacacaccgcccgtcacaccacgagagtttgtaacacccgaagtcggtgaggtaaccttttaggagccagccgcctaaggtgggatagatgattggggtgaagtcgtaacaaggtagccgtatcggaaggtgcggctggatcacctcctt

SEQ ID NO: 547 - DNA, 1545 bp, artificial sequence
  >GCF_900476055.1_00017 Streptococcus_australis
aatgagagtttgatcctggctcaggatgaacgctggcggcgtgcctaatacatgcaagtagaacgctgaaggaaggagcttgctctttccggatgagttgcgaacgggtgagtaacgcgtaggtaacctgcctggtagcgggggataactattggaaacgatagctaataccgcataacagtagatgttgcatgatatttacttgaaaggggcaattgctccactaccagatggacctgcgttgtattagctagttggtgaggtaacggctcaccaaggcgacgatacatagccgacctgagagggtgatcggccacactgggactgagacacggcccagactcctacgggaggcagcagtagggaatcttcggcaatggacggaagtctgaccgagcaacgccgcgtgagtgaagaaggttttcggatcgtaaagctctgttgtaagagaagaacgagtgtgagagtggaaagttcacactgtgacggtatcttaccagaaagggacggctaactacgtgccagcagccgcggtaatacgtaggtcccgagcgttatccggatttattgggcgtaaagcgagcgcaggcggttagataagtctgaagttaaaggctgtggcttaaccatagtacgctttggaaactgtttaacttgagtgcagaaggggagagtggaattccatgtgtagcggtgaaatgcgtagatatatggaggaacaccggtggcgaaagcggctctctggtctgtaactgacgctgaggctcgaaagcgtggggagcaaacaggattagataccctggtagtccacgccgtaaacgatgagtgctaggtgttgggtcctttccgggactcagtgccgcagctaacgcattaagcactccgcctggggagtacgaccgcaaggttgaaactcaaaggaattgacgggggcccgcacaagcggtggagcatgtggtttaattcgaagcaacgcgaagaaccttaccaggtcttgacatccctctgatcgctctagagatagagttttccttcgggacagaggtgacaggtggtgcatggttgtcgtcagctcgtgtcgtgagatgttgggttaagtcccgcaacgagcgcaacccctattgttagttgccatcattcagttgggcactctagcgagactgccggtaataaaccggaggaaggtggggatgacgtcaaatcatcatgccccttatgacctgggctacacacgtgctacaatggctggtacaacgagtcgcaagtcggtgacggcaagctaatctcttaaagccagtctcagttcggattgtaggctgcaactcgcctacatgaagtcggaatcgctagtaatcgcggatcagcacgccgcggtgaatacgttcccgggccttgtacacaccgcccgtcacaccacgagagtttgtaacacccgaagtcggtgaggtaaccttttaggagccagccgcctaaggtgggatagatgattggggtgaagtcgtaacaaggtagccgtatcggaaggtgcggctggatcacctcctt

SEQ ID NO: 548 - DNA, 1545 bp, artificial sequence
  >GCF_900476055.1_00536 Streptococcus_australis
aatgagagtttgatcctggctcaggatgaacgctggcggcgtgcctaatacatgcaagtagaacgctgaaggaaggagcttgctctttctggatgagttgcgaacgggtgagtaacgcgtaggtaacctgcctggtagcgggggataactattggaaacgatagctaataccgcataacagtagatgttgcatgatatctgcttgaaaggggcaattgctccactaccagatggacctgcgttgtattagctagttggtgaggtaacggctcaccaaggcgacgatacatagccgacctgagagggtgatcggccacactgggactgagacacggcccagactcctacgggaggcagcagtagggaatcttcggcaatggacggaagtctgaccgagcaacgccgcgtgagtgaagaaggttttcggatcgtaaagctctgttgtaagagaagaacgagtgtgagagtggaaagttcacactgtgacggtatcttaccagaaagggacggctaactacgtgccagcagccgcggtaatacgtaggtcccgagcgttatccggatttattgggcgtaaagcgagcgcaggcggttagataagtctgaagttaaaggctgtggcttaaccatagtacgctttggaaactgtttaacttgagtgcagaaggggagagtggaattccatgtgtagcggtgaaatgcgtagatatatggaggaacaccggtggcgaaagcggctctctggtctgtaactgacgctgaggctcgaaagcgtggggagcaaacaggattagataccctggtagtccacgccgtaaacgatgagtgctaggtgttgggtcctttccgggactcagtgccgtagctaacgcattaagcactccgcctggggagtacgaccgcaaggttgaaactcaaaggaattgacgggggcccgcacaagcggtggagcatgtggtttaattcgaagcaacgcgaagaaccttaccaggtcttgacatccctctgatcgctctagagatagagttttccttcgggacagaggtgacaggtggtgcatggttgtcgtcagctcgtgtcgtgagatgttgggttaagtcccgcaacgagcgcaacccctattgttagttgccatcattcagttgggcactctagcgagactgccggtaataaaccggaggaaggtggggatgacgtcaaatcatcatgccccttatgacctgggctacacacgtgctacaatggctggtacaacgagtcgcaagtcggtgacggcaagctaatctcttaaagccagtctcagttcggattgtaggctgcaactcgcctacatgaagtcggaatcgctagtaatcgcggatcagcacgccgcggtgaatacgttcccgggccttgtacacaccgcccgtcacaccacgagagtttgtaacacccgaagtcggtgaggtaaccttttaggagccagccgcctaaggtgggatagatgattggggtgaagtcgtaacaaggtagccgtatcggaaggtgcggctggatcacctcctt

SEQ ID NO: 549 - DNA, 1528 bp, artificial sequence
  >GCF_900624655.1_03941 Bacteroides_dorei_group
atgaagagtttgatcctggctcaggatgaacgctagctacaggcttaacacatgcaagtcgaggggcagcatggtcttagcttgctaaggctgatggcgaccggcgcacgggtgagtaacacgtatccaacctgccgtctactcttggccagccttctgaaaggaagattaatccaggatgggatcatgagttcacatgtccgcatgattaaaggtattttccggtagacgatggggatgcgttccattagatagtaggcggggtaacggcccacctagtcaacgatggataggggttctgagaggaaggtcccccacattggaactgagacacggtccaaactcctacgggaggcagcagtgaggaatattggtcaatgggcgatggcctgaaccagccaagtagcgtgaaggatgactgccctatgggttgtaaacttcttttataaaggaataaagtcgggtatgcatacccgtttgcatgtactttatgaataaggatcggctaactccgtgccagcagccgcggtaatacggaggatccgagcgttatccggatttattgggtttaaagggagcgtagatggatgtttaagtcagttgtgaaagtttgcggctcaaccgtaaaattgcagttgatactggatgtcttgagtgcagttgaggcaggcggaattcgtggtgtagcggtgaaatgcttagatatcacgaagaactccgattgcgaaggcagcctgctaagctgcaactgacattgaggctcgaaagtgtgggtatcaaacaggattagataccctggtagtccacacggtaaacgatgaatactcgctgtttgcgatatacggcaagcggccaagcgaaagcgttaagtattccacctggggagtacgccggcaacggtgaaactcaaaggaattgacgggggcccgcacaagcggaggaacatgtggtttaattcgatgatacgcgaggaaccttacccgggcttaaattgcactcgaatgatccggaaacggttcagctagcaatagcgagtgtgaaggtgctgcatggttgtcgtcagctcgtgccgtgaggtgtcggcttaagtgccataacgagcgcaacccttgttgtcagttactaacaggtgatgctgaggactctgacaagactgccatcgtaagatgtgaggaaggtggggatgacgtcaaatcagcacggcccttacgtccggggctacacacgtgttacaatggggggtacagagggccgctaccacgcgagtggatgccaatccctaaaacccctctcagttcggactggagtctgcaacccgactccacgaagctggattcgctagtaatcgcgcatcagccacggcgcggtgaatacgttcccgggccttgtacacaccgcccgtcaagccatgggagccgggggtacctgaagtgcgtaaccgcgaggatcgccctagggtaaaactggtgactggggctaagtcgtaacaaggtagccgtaccggaaggtgcggctggaacacctcctt

SEQ ID NO: 550 - DNA, 1545 bp, artificial sequence
  >GCF_900636365.1_00160 Streptococcus_australis
aatgagagtttgatcctggctcaggatgaacgctggcggcgtgcctaatacatgcaagtagaacgctgaaggaaggagcttgctctttccggatgagttgcgaacgggtgagtaacgcgtaggtaacctgcctggtagcgggggataactattggaaacgatagctaataccgcataacagtagatgttgcatgacatttacttgaaaggggcaattgctccactaccagatggacctgcgttgtattagctagttggtgaggtaacggctcaccaaggcgacgatacatagccgacctgagagggtgatcggccacactgggactgagacacggcccagactcctacgggaggcagcagtagggaatcttcggcaatggacggaagtctgaccgagcaacgccgcgtgagtgaagaaggttttcggatcgtaaagctctgttgtaagagaagaacgagtgtgagagtggaaagttcacactgtgacggtatcttaccagaaagggacggctaactacgtgccagcagccgcggtaatacgtaggtcccgagcgttatccggatttattgggcgtaaagcgagcgcaggcggttagataagtctgaagttaaaggctgtggcttaaccatagtacgctttggaaactgtttaacttgagtgcagaaggggagagtggaattccatgtgtagcggtgaaatgcgtagatatatggaggaacaccggtggcgaaagcggctctctggtctgtaactgacgctgaggctcgaaagcgtggggagcaaacaggattagataccctggtagtccacgccgtaaacgatgagtgctaggtgttgggtcctttccgggactcagtgccgcagctaacgcattaagcactccgcctggggagtacgaccgcaaggttgaaactcaaaggaattgacgggggcccgcacaagcggtggagcatgtggtttaattcgaagcaacgcgaagaaccttaccaggtcttgacatccctctgaccgctctagagatagagttttccttcgggacagaggtgacaggtggtgcatggttgtcgtcagctcgtgtcgtgagatgttgggttaagtcccgcaacgagcgcaacccctattgttagttgccatcattcagttgggcactctagcgagactgccggtaataaaccggaggaaggtggggatgacgtcaaatcatcatgccccttatgacctgggccacacacgtgctacaatggctggtacaacgagtcgcaagtcggtgacggcaagctaatctcttaaagccagtctcagttcggattgtaggctgcaactcgcctacatgaagtcggaatcgctagtaatcgcggatcagcacgccgcggtgaatacgttcccgggccttgtacacaccgcccgtcacaccacgagagtttgtaacacccgaagtcggtgaggtaaccttttaggagccagccgcctaaggtgggatagatgattggggtgaagtcgtaacaaggtagccgtatcggaaggtgcggctggatcacctcctt

SEQ ID NO: 551 - DNA, 1545 bp, artificial sequence
  >GCF_900636365.1_00433 Streptococcus_australis
aatgagagtttgatcctggctcaggatgaacgctggcggcgtgcctaatacatgcaagtagaacgctgaaggaaggagcttgctctttccggatgagttgcgaacgggtgagtaacgcgtaggtaacctgcctggtagcgggggataactattggaaacgatagctaataccgcataacagtagatgttgcatgacaactatttgaaaggggcaattgctccactaccagatggacctgcgttgtattagctagttggtgaggtaacggctcaccaaggcgacgatacatagccgacctgagagggtgatcggccacactgggactgagacacggcccagactcctacgggaggcagcagtagggaatcttcggcaatggacggaagtctgaccgagcaacgccgcgtgagtgaagaaggttttcggatcgtaaagctctgttgtaagagaagaacgagtgtgagagtggaaagttcacactgtgacggtatcttaccagaaagggacggctaactacgtgccagcagccgcggtaatacgtaggtcccgagcgttatccggatttattgggcgtaaagcgagcgcaggcggttagataagtctgaagttaaaggctgtggcttaaccatagtacgctttggaaactgtttaacttgagtgcagaaggggagagtggaattccatgtgtagcggtgaaatgcgtagatatatggaggaacaccggtggcgaaagcggctctctggtctgtaactgacgctgaggctcgaaagcgtggggagcaaacaggattagataccctggtagtccacgccgtaaacgatgagtgctaggtgttgggtcctttccgggactcagtgccgcagctaacgcattaagcactccgcctggggagtacgaccgcaaggttgaaactcaaaggaattgacgggggcccgcacaagcggtggagcatgtggtttaattcgaagcaacgcgaagaaccttaccaggtcttgacatccctctgaccgctctagagatagagctttccttcgggacagaggtgacaggtggtgcatggttgtcgtcagctcgtgtcgtgagatgttgggttaagtcccgcaacgagcgcaacccctattgttagttgccatcattcagttgggcactctagcgagactgccggtaataaaccggaggaaggtggggatgacgtcaaatcatcatgccccttatgacctgggctacacacgtgctacaatggctggtacaacgagtcgcaagtcggtgacggcaagctaatctcttaaagccagtctcagttcggattgtaggctgcaactcgcctacatgaagtcggaatcgctagtaatcgcggatcagcacgccgcggtgaatacgttcccgggccttgtacacaccgcccgtcacaccacgagagtttgtaacacccgaagtcggtgaggtaaccttttaggagccagccgcctaaggtgggatagatgattggggtgaagtcgtaacaaggtagccgtatcggaaggtgcggctggatcacctcctt

SEQ ID NO: 552 - DNA, 1546 bp, artificial sequence
  >GCF_900636365.1_00523 Streptococcus_australis
taatgagagtttgatcctggctcaggatgaacgctggcggcgtgcctaatacatgcaagtagaacgctgaagcttggtgcttgcaccgagcggatgagttgcgaacgggtgagtaacgcgtaggtaacctgcctggtagcgggggataactattggaaacgatagctaataccgcataacagtagatgttgcatgacatttacttgaaaggggcaattgctccactaccagatggacctgcgttgtattagctagttggtgaggtaacggctcaccaaggcgacgatacatagccgacctgagagggtgatcggccacactgggactgagacacggcccagactcctacgggaggcagcagtagggaatcttcggcaatggacggaagtctgaccgagcaacgccgcgtgagtgaagaaggttttcggatcgtaaagctctgttgtaagagaagaacgagtgtgagagtggaaagttcacactgtgacggtatcttaccagaaagggacggctaactacgtgccagcagccgcggtaatacgtaggtcccgagcgttatccggatttattgggcgtaaagcgagcgcaggcggttagataagtctgaagttaaaggctgtggcttaaccatagtacgctttggaaactgtttaacttgagtgcagaaggggagagtggaattccatgtgtagcggtgaaatgcgtagatatatggaggaacaccggtggcgaaagcggctctctggtctgtaactgacgctgaggctcgaaagcgtggggagcaaacaggattagataccctggtagtccacgccgtaaacgatgagtgctaggtgttgggtcctttccgggactcagtgccgcagctaacgcattaagcactccgcctggggagtacgaccgcaaggttgaaactcaaaggaattgacgggggcccgcacaagcggtggagcatgtggtttaattcgaagcaacgcgaagaaccttaccaggtcttgacatccctctgaccgctctagagatagagctttccttcgggacagaggtgacaggtggtgcatggttgtcgtcagctcgtgtcgtgagatgttgggttaagtcccgcaacgagcgcaacccctattgttagttgccatcattcagttgggcactctagcgagactgccggtaataaaccggaggaaggtggggatgacgtcaaatcatcatgccccttatgacctgggctacacacgtgctacaatggctggtacaacgagtcgcaagtcggtgacggcaagctaatctcttaaagccagtctcagttcggattgtaggctgcaactcgcctacatgaagtcggaatcgctagtaatcgcggatcagcacgccgcggtgaatacgttcccgggccttgtacacaccgcccgtcacaccacgagagtttgtaacacccgaagtcggtgaggtaaccttttaggagccagccgcctaaggtgggatagatgattggggtgaagtcgtaacaaggtagccgtatcggaaggtgcggctggatcacctcctt

SEQ ID NO: 553 - DNA, 1544 bp, artificial sequence
  >GCF_900636445.1_00167 Streptococcus_salivarius_group
aatgagagtttgatcctggctcaggacgaacgctggcggcgtgcctaatacatgcaagtagaacgctgaagagaggagcttgctcttcttgaatgagttgcgaacgggtgagtaacgcgtaggtaacctgccttgtagcgggggataactattggaaacgatagctaataccgcataacaatgggtgacacatgtcatttatttgaaaggggcaattgctccactacaagatggacctgcgttgtattagctagtaggtgaggtaacggctcacctaggcgacgatacatagccgacctgagagggtgatcggccacactgggactgagacacggcccagactcctacgggaggcagcagtagggaatcttcggcaatgggggcaaccctgaccgagcaacgccgcgtgagtgaagaaggttttcggatcgtaaagctctgttgtaagtcaagaacgagtgtgagagtggaaagttcacactgtgacggtagcttaccagaaagggacggctaactacgtgccagcagccgcggtaatacgtaggtcccgagcgttgtccggatttattgggcgtaaagcgagcgcaggcggtttgataagtctgaagttaaaggctgtggctcaaccatagttcgctttggaaactgtcaaacttgagtgcagaaggggagagtggaattccatgtgtagcggtgaaatgcgtagatatatggaggaacaccggtggcgaaagcggctctctggtctgtaactgacgctgaggctcgaaagcgtggggagcgaacaggattagataccctggtagtccacgccgtaaacgatgagtgctaggtgttggatcctttccgggattcagtgccgcagctaacgcattaagcactccgcctggggagtacgaccgcaaggttgaaactcaaaggaattgacgggggcccgcacaagcggtggagcatgtggtttaattcgaagcaacgcgaagaaccttaccaggtcttgacatcccgatgctatttctagagatagaaagttacttcggtacatcggtgacaggtggtgcatggttgtcgtcagctcgtgtcgtgagatgttgggttaagtcccgcaacgagcgcaacccctattgttagttgccatcattcagttgggcactctagcgagactgccggtaataaaccggaggaaggtggggatgacgtcaaatcatcatgccccttatgacctgggctacacacgtgctacaatggttggtacaacgagttgcgagtcggtgacggcaagctaatctcttaaagccaatctcagttcggattgtaggctgcaactcgcctacatgaagtcggaatcgctagtaatcgcggatcagcacgccgcggtgaatacgttcccgggccttgtacacaccgcccgtcacaccacgagagtttgtaacacccgaagtcggtgaggtaaccttttggagccagccgcctaaggtgggatagatgattggggtgaagtcgtaacaaggtagccgtatcggaaggtgcggctggatcacctcctt

SEQ ID NO: 554 - DNA, 827 bp, artificial sequence
  STR00253_Streptococcus_parasanguinis
acaccggtggcgaaagcggctctctggtctgtaactgacgctgaggctcgaaagcgtggggagcaaacaggattagataccctggtagtccacgccgtaaacgatgagtgctaggtgttgggtcctttccgggactcagtgccgcagctaacgcattaagcactccgcctggggagtacgaccgcaaggttgaaactcaaaggaattgacgggggcccgcacaagcggtggagcatgtggtttaattcgaagcaacgcgaagaaccttaccaggtcttgacatccctctgaccgctctagagatagagttttccttcgggacagaggtgacaggtggtgcatggttgtcgtcagctcgtgtcgtgagatgttgggttaagtcccgcaacgagcgcaacccctattgttagttgccatcattgagttgggcactctagcgagactgccggtaataaaccggaggaaggtggggatgacgtcaaatcatcatgccccttatgacctgggctacacacgtgctacaatggctggtacaacgagtcgcgagtcggtgacggcaagctaatctcttaaagccagtctcagttcggattgtaggctgcaactcgcctacatgaagtcggaatcgctagtaatcgcggatcagcacgccgcggtgaatacgttcccgggccttgtacacaccgcccgtcacaccacgagagtttgtaacacccgaagtcggtgaggtaaccatttggagccagccgcctaaggtgggatagatgattggggtgaagtcgtaacaaggtagccgtatcggaaggtgcggctggatcacctccttt

SEQ ID NO: 555 - DNA, 1280 bp, artificial sequence
  STR00253.1_Streptococcus_parasanguinis
taatgagagtttgatcctggctcaggatgaacgctggcggcgtgcctaatacatgcaagtagaacgctgaagcttggtgcttgcaccgagcggatgagttgcgaacgggtgagtaacgcgtaggtaacctgcctgttagcgggggataactattggaaacgatagctaataccgcataacagtcgacattgcatgatgttgatttgaaaggggcaaatgctccactaccagatggacctgcgttgtattagctagttggtgaggtaacggctcaccaaggcgacgatacatagccgacctgagagggtgatcggccacactgggactgagacacggcccagactcctacgggaggcagcagtagggaatcttcggcaatgggggcaaccctgaccgagcaacgccgcgtgagtgaagaaggttttcggatcgtaaagctctgttgtaagagaagaacgagtgtgagagtggaaagttcacactgtgacggtaacttaccagaaagggacggctaactacgtgccagcagccgcggtaatacgtaggtcccgagcgttatccggatttattgggcgtaaagcgagcgcaggcggttagataagtctgaagttaaaggctgtggcttaaccatagtacgctttggaaactgtttaacttgagtgcagaaggggagagtggaattccatgtgtagcggtgaaatgcgtagatatatggaggaacaccggtggcgaaagcggctctctggtctgtaactgacgctgaggctcgaaagcgtggggagcaaacaggattagataccctggtagtccacgccgtaaacgatgagtgctaggtgttgggtcctttccgggactcagtgccgcagctaacgcattaagcactccgcctggggagtacgaccgcaaggttgaaactcaaaggaattgacgggggcccgcacaagcggtggagcatgtggtttaattcgaagcaacgcgaagaaccttaccaggtcttgacatccctctgaccgctctagagatagagttttccttcgggacagaggtgacaggtggtgcatggttgtcgtcagctcgtgtcgtgagatgttgggttaagtcccgcaacgagcgcaacccctattgttagttgccatcattgagttgggcactctagcgagactgccggtaataaaccggaggaaggtggggatgacgtcaaatcatcatgccccttatgacctgggctacacacgtgctacaatggctggtacaacgagtcgcgagtcggtgacggcaag

SEQ ID NO: 556 - DNA, 1525 bp, artificial sequence
  STR00041_Bacteroides_dorei_group
atgaagagtttgatcctggctcaggatgaacgctagctacaggcttaacacatgcaagtcgaggggcagcatggtcttagcttgctaaggccgatggcgaccggcgcacgggtgagtaacacgtatccaacctgccgtctactcttggacagccttctgaaaggaagattaatacaagatggcatcatgagtccgcatgttcacatgattaaaggtattccggtagacgatggggatgcgttccattagatagtaggcggggtaacggcccacctagtcttcgatggataggggttctgagaggaaggtcccccacattggaactgagacacggtccaaactcctacgggaggcagcagtgaggaatattggtcaatgggcgagagcctgaaccagccaagtagcgtgaaggatgactgccctatgggttgtaaacttcttttataaaggaataaagtcgggtatggatacccgtttgcatgtactttatgaataaggatcggctaactccgtgccagcagccgcggtaatacggaggatccgagcgttatccggatttattgggtttaaagggagcgtagatggatgtttaagtcagttgtgaaagtttgcggctcaaccgtaaaattgcagttgatactggatatcttgagtgcagttgaggcaggcggaattcgtggtgtagcggtgaaatgcttagatatcacgaagaactccgattgcgaaggcagcctgctaagctgcaactgacattgaggctcgaaagtgtgggtatcaaacaggattagataccctggtagtccacacggtaaacgatgaatactcgctgtttgcgatatactgcaagcggccaagcgaaagcgttaagtattccacctggggagtacgccggcaacggtgaaactcaaaggaattgacgggggcccgcacaagcggaggaacatgtggtttaattcgatgatacgcgaggaaccttacccgggcttaaattgcagatgaattacggtgaaagccgtaagccgcaaggcatctgtgaaggtgctgcatggttgtcgtcagctcgtgccgtgaggtgtcggcttaagtgccataacgagcgcaacccttgttgtcagttactaacaggttttgctgaggactctgacaagactgccatcgtaagatgtgaggaaggtggggatgacgtcaaatcagcacggcccttacgtccggggctacacacgtgttacaatggggggtacagagggccgctaccacgcgagtggatgccaatccccaaaacctctctcagttcggactggagtctgcaacccgactccacgaagctggattcgctagtaatcgcgcatcagccacggcgcggtgaatacgttcccgggccttgtacacaccgcccgtcaagccatgggagccgggggtacctgaagtgcgtaaccgcgaggagcgccctagggtaaaactggtgactggggctaagtcgtaacaaggtagccgtaccggaaggtgcggctggaacacctccttt

SEQ ID NO: 557 - DNA, 1125 bp, artificial sequence
  STR00051_Bacteroides_dorei_group
atgaagagtttgatcctggctcaggatgaacgctagctacaggcttaacacatgcaagtcgaggggcagcatggtcttagcttgctaaggctgatggcgaccggcgcacgggtgagtaacacgtatccaacctgccgtctactcttggacagccttctgaaaggaagattaatacaagatggcatcatgagtccgcatgttcacatgattaaaggtattccggtagacgatggggatgcgttccattagatagtaggcggggtaacggcccacctagtcttcgatggataggggttctgagaggaaggtcccccacattggaactgagacacggtccaaactcctacgggaggcagcagtgaggaatattggtcaatgggcgagagcctgaaccagccaagtagcgtgaaggatgactgccctatgggttgtaaacttcttttataaaggaataaagtcgggtatgtatacccgtttgcatgtactttatgaataaggatcggctaactccgtgccagcagccgcggtaatacggaggatccgagcgttatccggatttattgggtttaaagggagcgtagatggatgtttaagtcagttgtgaaagtttgcggctcaaccgtaaaattgcagttgatactggatatcttgagtgcagttgaggcaggcggaattcgtggtgtagcggtgaaatgcttagatatcacgaagaactccgattgcgaaggcagcctgctaagctgcaactgacattgaggctcgaaagtgtgggtatcaaacaggattagataccctggtagtccacacggtaaacgatgaatactcgctgtttgcgatatactgcaagcggccaagcgaaagcgttaagtattccacctggggagtacgccggcaacggtgaaactcaaaggaattgacgggggcccgcacaagcggaggaacatgtggtttaattcgatgatacgcgaggaaccttacccgggcttaaattgcagatgaattacggtgaaagccgtaagccgcaaggcatctgtgaaggtgctgcatggttgtcgtcagctcgtgccgtgaggtgtcggcttaagtgccataacgagcgcaacccttgttgtcagttactaacag

SEQ ID NO: 558 - DNA, 1525 bp, artificial sequence
  STR00067_Bacteroides_dorei_group
atgaagagtttgatcctggctcaggatgaacgctagctacaggcttaacacatgcaagtcgaggggcagcatggtcttagcttgctaaggccgatggcgaccggcgcacgggtgagtaacacgtatccaacctgccgtctactcttggacagccttctgaaaggaagattaatacaagatggcatcatgagtccgcatgttcacatgattaaaggtattccggtagacgatggggatgcgttccattagatagtaggcggggtaacggcccacctagtcttcgatggataggggttctgagaggaaggtcccccacattggaactgagacacggtccaaactcctacgggaggcagcagtgaggaatattggtcaatgggcgagagcctgaaccagccaagtagcgtgaaggatgactgccctatgggttgtaaacttcttttataaaggaataaagtcgggtatgcatacccgtttgcatgtactttatgaataaggatcggctaactccgtgccagcagccgcggtaatacggaggatccgagcgttatccggatttattgggtttaaagggagcgtagatggatgtttaagtcagttgtgaaagtttgcggctcaaccgtaaaattgcagttgatactggatatcttgagtgcagttgaggcaggcggaattcgtggtgtagcggtgaaatgcttagatatcacgaagaactccgattgcgaaggcagcctgctaagctgcaactgacattgaggctcgaaagtgtgggtatcaaacaggattagataccctggtagtccacacggtaaacgatgaatactcgctgtttgcgatatacagcaagcggccaagcgaaagcgttaagtattccacctggggagtacgccggcaacggtgaaactcaaaggaattgacgggggcccgcacaagcggaggaacatgtggtttaattcgatgatacgcgaggaaccttacccgggcttaaattgcagatgaattacggtgaaagccgtaagccgcaaggcatctgtgaaggtgctgcatggttgtcgtcagctcgtgccgtgaggtgtcggcttaagtgccataacgagcgcaacccttgttgtcagttactaacaggttccgctgaggactctgacaagactgccatcgtaagatgtgaggaaggtggggatgacgtcaaatcagcacggcccttacgtccggggctacacacgtgttacaatggggggtacagagggccgctaccacgcgagtggatgccaatccccaaaacctctctcagttcggactggagtctgcaacccgactccacgaagctggattcgctagtaatcgcgcatcagccacggcgcggtgaatacgttcccgggccttgtacacaccgcccgtcaagccatgggagccgggggtacctgaagtgcgtaaccgcgaggagcgccctagggtaaaactggtgactggggctaagtcgtaacaaggtagccgtaccggaaggtgcggctggaacacctccttt

SEQ ID NO: 559 - DNA, 1275 bp, artificial sequence
  STR00082_Bacteroides_dorei_group
atgaagagtttgatcctggctcaggatgaacgctagctacaggcttaacacatgcaagtcgaggggcagcatggtcttagcttgctaaggctgatggcgaccggcgcacgggtgagtaacacgtatccaacctgccgtctactcttggacagccttctgaaaggaagattaatacaagatggcatcatgagtccgcatgttcacatgattaaaggtattccggtagacgatggggatgcgttccattagatagtaggcggggtaacggcccacctagtcttcgatggataggggttctgagaggaaggtcccccacattggaactgagacacggtccaaactcctacgggaggcagcagtgaggaatattggtcaatgggcgagagcctgaaccagccaagtagcgtgaaggatgactgccctatgggttgtaaacttcttttataaaggaataaagtcgggtatgcatacccgtttgcatgtactttatgaataaggatcggctaactccgtgccagcagccgcggtaatacggaggatccgagcgttatccggatttattgggtttaaagggagcgtagatggatgtttaagtcagttgtgaaagtttgcggctcaaccgtaaaattgcagttgatactggatatcttgagtgcagttgaggcaggcggaattcgtggtgtagcggtgaaatgcttagatatcacgaagaactccgattgcgaaggcagcctgctaagctgcaactgacattgaggctcgaaagtgtgggtatcaaacaggattagataccctggtagtccacacggtaaacgatgaatactcgctgtttgcgatatacagcaagcggccaagcgaaagcgttaagtattccacctggggagtacgccggcaacggtgaaactcaaaggaattgacgggggcccgcacaagcggaggaacatgtggtttaattcgatgatacgcgaggaaccttacccgggcttaaattgcagatgaattacggtgaaagccgtaagccgcaaggcatctgtgaaggtgctgcatggttgtcgtcagctcgtgccgtgaggtgtcggcttaagtgccataacgagcgcaacccttgttgtcagttactaacaggttccgctgaggactctgacaagactgccatcgtaagatgtgaggaaggtggggatgacgtcaaatcagcacggcccttacgtccggggctacacacgtgttacaatggggggtacagagggccgctaccacgcgagtggatgccaatcc

SEQ ID NO: 560 - DNA, 1526 bp, artificial sequence
  STR00212_Bacteroides_caccae
atgaagagtttgatcctggctcaggatgaacgctagctacaggcttaacacatgcaagtcgaggggcatcagtttggtttgcttgcaaaccaaagctggcgaccggcgcacgggtgagtaacacgtatccaacctgcctcatactcggggatagcctttcgaaagaaagattaatatccgatagcatatatttcccgcatgggttttatattaaagaaattcggtatgagatggggatgcgttccattagtttgttggcggggtaacggcccaccaagactacgatggataggggttctgagaggaaggtcccccacattggaactgagacacggtccaaactcctacgggaggcagcagtgaggaatattggtcaatggacgcgagtctgaaccagccaagtagcgtgaaggatgactgccctatgggttgtaaacttcttttatatgggaataaagtggtccacgtgtggatttttgtatgtaccatatgaataaggatcggctaactccgtgccagcagccgcggtaatacggaggatccgagcgttatccggatttattgggtttaaagggagcgtaggcggattgttaagtcagttgtgaaagtttgcggctcaaccgtaaaattgcagttgatactggcagtcttgagtgcagtagaggtgggcggaattcgtggtgtagcggtgaaatgcttagatatcacgaagaactccgattgcgaaggcagctcactggagtgtaactgacgctgatgctcgaaagtgtgggtatcaaacaggattagataccctggtagtccacacagtaaacgatgaatactcgctgtttgcgatatacagtaagcggccaagcgaaagcattaagtattccacctggggagtacgccggcaacggtgaaactcaaaggaattgacgggggcccgcacaagcggaggaacatgtggtttaattcgatgatacgcgaggaaccttacccgggcttaaattgcaaatgaattatggggaaacccatacgccgcaaggcatttgtgaaggtgctgcatggttgtcgtcagctcgtgccgtgaggtgtcggcttaagtgccataacgagcgcaacccttatcttcagttactaacaggtcatgctgaggactctggagagactgccgtcgtaagatgtgaggaaggtggggatgacgtcaaatcagcacggcccttacgtccggggctacacacgtgttacaatggggggtacagaaggccgctacctggtgacaggatgccaatcccaaaaacctctctcagttcggatcgaagtctgcaacccgacttcgtgaagctggattcgctagtaatcgcgcatcagccatggcgcggtgaatacgttcccgggccttgtacacaccgcccgtcaagccatgaaagccgggggtacctgaagtacgtaaccgcaaggagcgtcctagggtaaaactggtaattggggctaagtcgtaacaaggtagccgtaccggaaggtgcggctggaacacctccttt

SEQ ID NO: 561 - DNA, 1029 bp, artificial sequence
  STR00252_Clostridium_saudiense
cgtgccagcagccgcggtaatacgtaggtggcgagcgttgtccggatttactgggcgtaaagggagcgtaggcggacttttaagtgagatgtgaaatacccgggctcaacttgggtgctgcatttcaaactggaagtctagagtgcaggagaggagaatggaattcctagtgtagcggtgaaatgcgtagagattaggaagaacaccagtggcgaaggcgattctctggactgtaactgacgctgaggctcgaaagcgtggggagcaaacaggattagataccctggtagtccacgccgtaaacgatgaatactaggtgtaggggttgtcatgacctctgtgccgccgctaacgcattaagtattccgcctggggagtacggtcgcaagattaaaactcaaaggaattgacgggggcccgcacaagcagcggagcatgtggtttaattcgaagcaacgcgaagaaccttacctagacttgacatctcctgcattacccttaatcggggaagttccttcgggaacaggaagacaggtggtgcatggttgtcgtcagctcgtgtcgtgagatgttgggttaagtcccgcaacgagcgcaacccttattgttagttgctaccatttagttgagcactctagcgagactgcccgggttaaccgggaggaaggtggggatgacgtcaaatcatcatgccccttatgtctagggctacacacgtgctacaatggcaagtacaaagagaagcaagaccgcgaggtggagcaaaactcaaaaacttgtctcagttcggattgtaggctgaaactcgcctacatgaagctggagttgctagtaatcgcgaatcagcatgtcgcggtgaatacgttcccgggccttgtacacaccgcccgtcacaccatgagagttggcaatacccaaagtgcgtgatctgactcgcaagagaggaagcgccctaaggtagggtcagcgattggggtgaagtcgtaacaaggtagccgtaggagaacctgcggctggatcacctccttt

SEQ ID NO: 562 - DNA, 1525 bp, artificial sequence
  STR00308_Bacteroides_dorei_group
atgaagagtttgatcctggctcaggatgaacgctagctacaggcttaacacatgcaagtcgaggggcagcatggtcttagcttgctaagactgatggcgaccggcgcacgggtgagtaacacgtatccaacctgccgtctactcttggacagccttctgaaaggaagattaatacaagatggcatcatgagtccacatgttcacatgattaaaggtattccggtagacgatggggatgcgttccattagatagtaggcggggtaacggcccacctagtcttcgatggataggggttctgagaggaaggtcccccacattggaactgagacacggtccaaactcctacgggaggcagcagtgaggaatattggtcaatgggcgagagcctgaaccagccaagtagcgtgaaggatgactgccctatgggttgtaaacttcttttataaaggaataaagtcgggtatgcatacccgtttgcatgtactttatgaataaggatcggctaactccgtgccagcagccgcggtaatacggaggatccgagcgttatccggatttattgggtttaaagggagcgtagatggatgtttaagtcagttgtgaaagtttgcggctcaaccgtaaaattgcagttgatactggatatcttgagtgcagttgaggcaggcggaattcgtggtgtagcggtgaaatgcttagatatcacgaagaactccgattgcgaaggcagcctgctaagctgcaactgacattgaggctcgaaagtgtgggtatcaaacaggattagataccctggtagtccacacggtaaacgatgaatactcgctgtttgcgatatacggcaagcggccaagcgaaagcgttaagtattccacctggggagtacgccggcaacggtgaaactcaaaggaattgacgggggcccgcacaagcggaggaacatgtggtttaattcgatgatacgcgaggaaccttacccgggcttaaattgcagatgaattacggtgaaagccgtaagccgcaaggcatctgtgaaggtgctgcatggttgtcgtcagctcgtgccgtgaggtgtcggcttaagtgccataacgagcgcaacccttgttgtcagttactaacaggtcatgctgaggactctgacaagactgccatcgtaagatgtgaggaaggtggggatgacgtcaaatcagcacggcccttacgtccggggctacacacgtgttacaatggggggtacagagggccgctaccacgcgagtggatgccaatcccaaaaacctctctcagttcggactggagtctgcaacccgactccacgaagctggattcgctagtaatcgcgcatcagccacggcgcggtgaatacgttcccgggccttgtacacaccgcccgtcaagccatgggagccgggggtacctgaagtgcgtaaccgcgaggagcgccctagggtaaaactggtgactggggctaagtcgtaacaaggtagccgtaccggaaggtgcggctggaacacctccttt

SEQ ID NO: 563 - DNA, 1525 bp, artificial sequence
  STR00311_Bacteroides_dorei_group
atgaagagtttgatcctggctcaggatgaacgctagctacaggcttaacacatgcaagtcgaggggcagcatggtcttagcttgctaaggccgatggcgaccggcgcacgggtgagtaacacgtatccaacctgccgtctactcttggacagccttctgaaaggaagattaatacaagatggcatcatgagtccgcatgttcacatgattaaaggtattccggtagacgatggggatgcgttccattagatagtaggcggggtaacggcccacctagtcttcgatggataggggttctgagaggaaggtcccccacattggaactgagacacggtccaaactcctacgggaggcagcagtgaggaatattggtcaatgggcgagagcctgaaccagccaagtagcgtgaaggatgactgccctatgggttgtaaacttcttttataaaggaataaagtcgggtatgcatacccgtttgcatgtactttatgaataaggatcggctaactccgtgccagcagccgcggtaatacggaggatccgagcgttatccggatttattgggtttaaagggagcgtagatggatgtttaagtcagttgtgaaagtttgcggctcaaccgtaaaattgcagttgatactggatatcttgagtgcagttgaggcaggcggaattcgtggtgtagcggtgaaatgcttagatatcacgaagaactccgattgcgaaggcagcctgctaagctgcaactgacattgaggctcgaaagtgtgggtatcaaacaggattagataccctggtagtccacacggtaaacgatgaatactcgctgtttgcgatatacggcaagcggccaagcgaaagcgttaagtattccacctggggagtacgccggcaacggtgaaactcaaaggaattgacgggggcccgcacaagcggaggaacatgtggtttaattcgatgatacgcgaggaaccttacccgggcttaaattgcagatgaattacggtgaaagccgtaagccgcaaggcatctgtgaaggtgctgcatggttgtcgtcagctcgtgccgtgaggtgtcggcttaagtgccataacgagcgcaacccttgttgtcagttactaacaggttctgctgaggactctgacaagactgccatcgtaagatgtgaggaaggtggggatgacgtcaaatcagcacggcccttacgtccggggctacacacgtgttacaatggggggtacagagggccgctaccacgcgagtggatgccaatcccaaaaacctctctcagttcggactggagtctgcaacccgactccacgaagctggattcgctagtaatcgcgcatcagccacggcgcggtgaatacgttcccgggccttgtacacaccgcccgtcaagccatgggagccgggggtacctgaagtgcgtaaccgcgaggagcgccctagggtaaaactggtgactggggctaagtcgtaacaaggtagccgtaccggaaggtgcggctggaacacctccttt

SEQ ID NO: 564 - DNA, 971 bp, artificial sequence
  STR00404_Fusicatenibacter_sp2
tttagagagtttgatcctggctcaggatgaacgctggcggcgtgcttaacacatgcaagtcgaacgaagcacttgaaacagattcttcggatgaagtttcctgtgactgagtggcggacgggtgagtaacgcgtgggtaacctgcctcatacagggggataacagttagaaatggctgctaataccgcataagcgcacggcatcgcatgatgcagtgtgaaaaactccggtggtatgagatggacccgcgttggattagctagttggcagggtaacggcctaccaaggcgacgatccatagccggcctgagagggtggacggccacattgggactgagacacggcccagactcctacgggaggcagcagtggggaatattgcacaatgggggaaaccctgatgcagcgacgccgcgtgagcgaagaagtatttcggtatgtaaagctctatcagcagggaagaaaatgacggtacctgactaagaagccccggctaactacgtgccagcagccgcggtaatacgtagggggcaagcgttatccggatttactgggtgtaaagggagcgtagacggaatggcaagtctgatgtgaaaggccggggctcaaccccgggactgcattggaaactgccaatctagagtaccggaggggtaagtggaattcctagtgtagcggtgaaatgcgtagatattaggaggaacaccagtggcgaaggcggcttactggacggtaactgacgttgaggctcgaaagcgtggggagcaaacaggattagataccctggtagtccacgccgtaaacgatgaatactaggtgttgggtagcaaagctattcggtgccgcagcaaacgcaataagtattccacctggggagtacgttcgcaagaatgaaactcaaaggaattgacggggacccgcacaagcggtggagcatgtggtttaattcgaagcaacgcgaagaaccttac

SEQ ID NO: 565 - DNA, 1098 bp, artificial sequence
  STR00405_Fusicatenibacter_sp2
ggtatgtaaagctctatcagcagggaagaaaatgacggtacctgactaagaagccccggctaactacgtgccagcagccgcggtaatacgtagggggcaagcgttatccggatttactgggtgtaaagggagcgtagacggaatggcaagtctgatgtgaaaggccggggctcaaccccgggactgcattggaaactgccaatctagagtaccggaggggtaagtggaattcctagtgtagcggtgaaatgcgtagatattaggaggaacaccagtggcgaaggcggcttactggacggtaactgacgttgaggctcgaaagcgtggggagcaaacaggattagataccctggtagtccacgccgtaaacgatgaatactaggtgttgggtagcaaagctattcggtgccgcagcaaacgcaataagtattccacctggggagtacgttcgcaagaatgaaactcaaaggaattgacggggacccgcacaagcggtggagcatgtggtttaattcgaagcaacgcgaagaaccttaccaaatcttgacatcgatccgaccggaccgtaatgggtcctttcccttcggggacggagaagacaggtggtgcatggttgtcgtcagctcgtgtcgtgagatgttgggttaagtcccgcaacgagcgcaacccttatcctcagtagccagcaagtgaagttgggcactctgtggagactgccagggataacctggaggaaggtggggatgacgtcaaatcatcatgccccttatgatttgggctacacacgtgctacaatggcgtaaacaaagggaagcgatcacgcgagtgtgagcaaatctcaaaaataacgtctcagttcggattgtagtctgcaactcgactacatgaagctggaatcgctagtaatcgcaggtcagcatactgcggtgaatacgttcccgggtcttgtacacaccgcccgtcacaccatgggagtcagtaacacccgaagccggtgacctaaccgaaaggaaggagccgtcgaaggtgggaccgataactggggtgaagtcgtaacaaggtagccgtatcggaaggtgcggctggatcacctccttt

SEQ ID NO: 566 - DNA, 1520 bp, artificial sequence
  STR00432_Bacteroides_intestinalis
atgaagagtttgatcctggctcaggatgaacgctagctacaggcttaacacatgcaagtcgaggggcagcatgacctagcaataggttgatggcgaccggcgcacgggtgagtaacacgtatccaacctgccgattattccgggatagcctttcgaaagaaagattaataccggatagcataacgagaaggcatcttcttgttattaaagaatttcgataatcgatggggatgcgttccattagtttgttggcggggtaacggcccaccaagacatcgatggataggggttctgagaggaaggtcccccacattggaactgagacacggtccaaactcctacgggaggcagcagtgaggaatattggtcaatggacgagagtctgaaccagccaagtagcgtgaaggatgactgccctatgggttgtaaacttcttttatatgggaataaagtgcagtatgtatactgttttgtatgtaccatacgaataaggatcggctaactccgtgccagcagccgcggtaatacggaggatccgagcgttatccggatttattgggtttaaagggagcgtaggcggattattaagtcagttgtgaaagtttgcggctcaaccgtaaaattgcagttgatactggtagtcttgagtgcagcagaggtaggcggaattcgtggtgtagcggtgaaatgcttagatatcacgaagaactccgattgcgaaggcagcttactggactgtaactgacgctgatgctcgaaagtgtgggtatcaaacaggattagataccctggtagtccacacagtaaacgatgaatactcgctgtttgcgatatacagcaagcggccaagcgaaagcattaagtattccacctggggagtacgccggcaacggtgaaactcaaaggaattgacgggggcccgcacaagcggaggaacatgtggtttaattcgatgatacgcgaggaaccttacccgggcttaaattgcaactgacggatttggaaacagatcttccttcgggcagttgtgaaggtgctgcatggttgtcgtcagctcgtgccgtgaggtgtcggcttaagtgccataacgagcgcaacccttatctttagttactaacaggtcatgctgaggactctagagagactgccgtcgtaagatgtgaggaaggtggggatgacgtcaaatcagcacggcccttacgtccggggctacacacgtgttacaatggggggtacagaaggcagctacacagcgatgtgatgctaatcccaaaagcctctctcagttcggattggagtctgcaacccgactccatgaagctggattcgctagtaatcgcgcatcagccacggcgcggtgaatacgttcccgggccttgtacacaccgcccgtcaagccatgaaagccgggggtacctgaagtacgtaaccgcaaggagcgtcctagggtaaaactggtaattggggctaagtcgtaacaaggtagccgtaccggaaggtgcggctggaacacctccttt

SEQ ID NO: 567 - DNA, 1528 bp, artificial sequence
  STR00469_[Ruminococcus]_gnavus
aacgagagtttgatcctggctcaggatgaacgctggcggcgtgcttaacacatgcaagtcgagcgaagcacttttgcggatttcttcggattgaagcaattgtgactgagcggcggacgggtgagtaacgcgtgggtaacctgcctcatacagggggataacagttggaaacggctgctaataccgcataagcgcacagtaccgcatggtacggtgtgaaaaactccggtggtatgagatggacccgcgtctgattaggtagttggtggggtaacggcctaccaagccgacgatcagtagccgacctgagagggtgaccggccacattgggactgagacacggcccaaactcctacgggaggcagcagtggggaatattgcacaatgggggaaaccctgatgcagcgacgccgcgtgagcgatgaagtatttcggtatgtaaagctctatcagcagggaagaaaatgacggtacctgactaagaagccccggctaactacgtgccagcagccgcggtaatacgtagggggcaagcgttatccggatttactgggtgtaaagggagcgtagacggcatggcaagccagatgtgaaagcccggggctcaaccccgggactgcatttggaactgtcaggctagagtgtcggagaggaaagcggaattcctagtgtagcggtgaaatgcgtagatattaggaggaacaccagtggcgaaggcggctttctggacgatgactgacgttgaggctcgaaagcgtggggagcaaacaggattagataccctggtagtccacgccgtaaacgatgaatactaggtgtcgggtggcaaagccattcggtgccgcagcaaacgcaataagtattccacctggggagtacgttcgcaagaatgaaactcaaaggaattgacggggacccgcacaagcggtggagcatgtggtttaattcgaagcaacgcgaagaaccttacctggtcttgacatccctctgaccgctctttaatcggagttttccttcgggacagaggagacaggtggtgcatggttgtcgtcagctcgtgtcgtgagatgttgggttaagtcccgcaacgagcgcaacccctatctttagtagccagcatttaaggtgggcactctagagagactgccagggataacctggaggaaggtggggatgacgtcaaatcatcatgccctttatgaccagggctacacacgtgctacaatggcgtaaacaaagggaagcgagcccgcgagggggagcaaatcccaaaaataacgtctcagttcggattgtagtctgcaactcgactacatgaagctggaatcgctagtaatcgcgaatcagaatgtcgcggtgaatacgttcccgggtcttgtacacaccgcccgtcacaccatgggagtcagtaacgcccgaagtcagtgacccaaccgtaaggagggagctgccgaaggtgggatcgataactggggtgaagtcgtaacaaggtagccgtatcggaaggtgcggctggatcacctccttt

SEQ ID NO: 568 - DNA, 1528 bp, artificial sequence
  STR00469.1_[Ruminococcus]_gnavus
aacgagagtttgatcctggctcaggatgaacgctggcggcgtgcttaacacatgcaagtcgagcgaagcacttttgcggatttcttcggattgaagcaattgtgactgagcggcggacgggtgagtaacgcgtgggtaacctgcctcatacagggggataacagttggaaacggctgctaataccgcataagcgcacagtaccgcatggtaccgtgtgaaaaactccggtggtatgagatggacccgcgtctgattagctagttggtggggtaacggcctaccaaggcgacgatcagtagccgacctgagagggtgaccggccacattgggactgagacacggcccaaactcctacgggaggcagcagtggggaatattgcacaatgggggaaaccctgatgcagcgacgccgcgtgagcgatgaagtatttcggtatgtaaagctctatcagcagggaagaaaatgacggtacctgactaagaagccccggctaactacgtgccagcagccgcggtaatacgtagggggcaagcgttatccggatttactgggtgtaaagggagcgtagacggcatggcaagccagatgtgaaagcccggggctcaaccccgggactgcatttggaactgtcaggctagagtgtcggagaggaaagcggaattcctagtgtagcggtgaaatgcgtagatattaggaggaacaccagtggcgaaggcggctttctggacgatgactgacgttgaggctcgaaagcgtggggagcaaacaggattagataccctggtagtccacgccgtaaacgatgaatactaggtgtcgggtggcaaagccattcggtgccgcagcaaacgcaataagtattccacctggggagtacgttcgcaagaatgaaactcaaaggaattgacggggacccgcacaagcggtggagcatgtggtttaattcgaagcaacgcgaagaaccttacctggtcttgacatccctctgaccgctctttaatcggagctttccttcgggacagaggagacaggtggtgcatggttgtcgtcagctcgtgtcgtgagatgttgggttaagtcccgcaacgagcgcaacccctatctttagtagccagcgtttcggatgggcactctagagagactgccagggataacctggaggaaggtggggatgacgtcaaatcatcatgccccttatgaccagggctacacacgtgctacaatggcgtaaacaaagggaagcgaacctgcgagggggagcaaatcccaaaaataacgtctcagttcggattgtagtctgcaactcgactacatgaagctggaatcgctagtaatcgcgaatcagaatgtcgcggtgaatacgttcccgggtcttgtacacaccgcccgtcacaccatgggagtcagtaacgcccgaagtcagtgacccaaccgcaaggagggagctgccgaaggtgggaccgataactggggtgaagtcgtaacaaggtagccgtatcggaaggtgcggctggatcacctccttt

SEQ ID NO: 569 - DNA, 1528 bp, artificial sequence
  STR00469.2_[Ruminococcus]_gnavus
aacgagagtttgatcctggctcaggatgaacgctggcggcgtgcttaacacatgcaagtcgagcgaagcgcttttgcggatttcttcggattgaagcaactgtgactgagcggcggacgggtgagtaacgcgtgggtaacctacctcatacagggggataacagttggaaacggctgctaataccgcataagcgcacagtaccgcatggtaccgtgtgaaaaactccggtggtatgagatggacccgcgtctgattagctagttggtggggtaacggcctaccaaggcgacgatcagtagccgacctgagagggtgaccggccacattgggactgagacacggcccaaactcctacgggaggcagcagtggggaatattgcacaatgggggaaaccctgatgcagcgacgccgcgtgagcgatgaagtatttcggtatgtaaagctctatcagcagggaagaaaatgacggtacctgactaagaagccccggctaactacgtgccagcagccgcggtaatacgtagggggcaagcgttatccggatttactgggtgtaaagggagcgtagacggcatggcaagccagatgtgaaagcccggggctcaaccccgggactgcatttggaactgtcaggctagagtgtcggagaggaaagcggaattcctagtgtagcggtgaaatgcgtagatattaggaggaacaccagtggcgaaggcggctttctggacgatgactgacgttgaggctcgaaagcgtggggagcaaacaggattagataccctggtagtccacgccgtaaacgatgaatactaggtgtcgggtggcaaagccattcggtgccgcagcaaacgcaataagtattccacctggggagtacgttcgcaagaatgaaactcaaaggaattgacggggacccgcacaagcggtggagcatgtggtttaattcgaagcaacgcgaagaaccttacctggtcttgacatccctctgaccactctttaatcggagctttccttcgggacagaggagacaggtggtgcatggttgtcgtcagctcgtgtcgtgagatgttgggttaagtcccgcaacgagcgcaacccctatctttagtagccagcatttaaggtgggcactctagagagactgccagggataacctggaggaaggtggggatgacgtcaaatcatcatgccccttatgaccagggctacacacgtgctacaatggcgtaaacaaagggaagcgagcccgcgagggggagcaaatcccaaaaataacgtctcagttcggattgtagtctgcaactcgactacatgaagctggaatcgctagtaatcgcgaatcagaatgtcgcggtgaatacgttcccgggtcttgtacacaccgcccgtcacaccatgggagtcagtaacgcccgaagtcagtgacccaaccgtaaggagggagctgccgaaggtgggaccgataactggggtgaagtcgtaacaaggtagccgtatcggaaggtgcggctggatcacctccttt

SEQ ID NO: 570 - DNA, 1528 bp, artificial sequence
  STR00469.3_[Ruminococcus]_gnavus
aacgagagtttgatcctggctcaggatgaacgctggcggcgtgcttaacacatgcaagtcgagcgaagcacttttgcggatttcttcggattgaagcaattgtgactgagcggcggacgggtgagtaacgcgtgggtaacctgcctcatacagggggataacagttggaaacggctgctaataccgcataagcgcacagtaccgcatggtaccgtgtgaaaaactccggtggtatgagatggacccgcgtctgattagctagttggtggggtaacggcctaccaaggcgacgatcagtagccgacctgagagggtgaccggccacattgggactgagacacggcccaaactcctacgggaggcagcagtggggaatattgcacaatgggggaaaccctgatgcagcgacgccgcgtgagcgatgaagtatttcggtatgtaaagctctatcagcagggaagaaaatgacggtacctgactaagaagccccggctaactacgtgccagcagccgcggtaatacgtagggggcaagcgttatccggatttactgggtgtaaagggagcgtagacggcatggcaagccagatgtgaaagcccggggctcaaccccgggactgcatttggaactgtcaggctagagtgtcggagaggaaagcggaattcctagtgtagcggtgaaatgcgtagatattaggaggaacaccagtggcgaaggcggctttctggacgatgactgacgttgaggctcgaaagcgtggggagcaaacaggattagataccctggtagtccacgctgtaaacgatgaatactaggtgtcgggtggcaaagccattcggtgccgcagcaaacgcaataagtattccacctggggagtacgttcgcaagaatgaaactcaaaggaattgacggggacccgcacaagcggtggagcatgtggtttaattcgaagcaacgcgaagaaccttacctggtcttgacatccctctgaccgctctttaatcggagttttccttcgggacagaggagacaggtggtgcatggttgtcgtcagctcgtgtcgtgagatgttgggttaagtcccgcaacgagcgcaacccctatctttagtagccagcatttaaggtgggcactctagagagactgccagggataacctggaggaaggtggggatgacgtcaaatcatcatgccccttatgaccagggctacacacgtgctacaatggcgtaaacaaagggaagcgagcccgcgagggggagcaaatcccaaaaataacgtctcagttcggattgtagtctgcaactcgactacatgaagctggaatcgctagtaatcgcgaatcagaatgtcgcggtgaatacgttcccgggtcttgtacacaccgcccgtcacaccatgggagtcagtaacgcccgaagtcagtgacccaaccgcaaggagggagctgccgaaggtgggaccgataactggggtgaagtcgtaacaaggtagccgtatcggaaggtgcggctggatcacctccttt

SEQ ID NO: 571 - DNA, 1079 bp, artificial sequence
  STR00470_[Ruminococcus]_gnavus
tcagcagggaagaaaatgacggtacctgactaagaagccccggctaactacgtgccagcagccgcggtaatacgtagggggcaagcgttatccggatttactgggtgtaaagggagcgtagacggcatggcaagccagatgtgaaagcccggggctcaaccccgggactgcatttggaactgtcaggctagagtgtcggagaggaaagcggaattcctagtgtagcggtgaaatgcgtagatattaggaggaacaccagtggcgaaggcggctttctggacgatgactgacgttgaggctcgaaagcgtggggagcaaacaggattagataccctggtagtccacgccgtaaacgatgaatactaggtgtcgggtggcaaagccattcggtgccgcagcaaacgcaataagtattccacctggggagtacgttcgcaagaatgaaactcaaaggaattgacggggacccgcacaagcggtggagcatgtggtttaattcgaagcaacgcgaagaaccttacctggtcttgacatccctctgaccgctctttaatcggagttttccttcgggacagaggagacaggtggtgcatggttgtcgtcagctcgtgtcgtgagatgttgggttaagtcccgcaacgagcgcaacccctatctttagtagccagcatttaaggtgggcactctagagagactgccagggataacctggaggaaggtggggatgacgtcaaatcatcatgccccttatgaccagggctacacacgtgctacaatggcgtaaacaaagggaagcgagcccgcgagggggagcaaatcccaaaaataacgtctcagttcggattgtagtctgcaactcgactacatgaagctggaatcgctagtaatcgcgaatcagaatgtcgcggtgaatacgttcccgggtcttgtacacaccgcccgtcacaccatgggagtcagtaacgcccgaagtcagtgacccaaccgcaaggagggagctgccgaaggtgggaccgataactggggtgaagtcgtaacaaggtagccgtatcggaaggtgcggctggatcacctccttt

SEQ ID NO: 572 - DNA, 1528 bp, artificial sequence
  STR00566_[Ruminococcus]_gnavus
aacgagagtttgatcctggctcaggatgaacgctggcggcgtgcttaacacatgcaagtcgagcgaagcacttttgcggatttcttcggattgaagcaattgtgactgagcggcggacgggtgagtaacgcgtgggtaacctgcctcatacagggggataacagttggaaacggctgctaataccgcataagcgcacagtaccgcatggtaccgtgtgaaaaactccggtggtatgagatggacccgcgtctgattagctagttggtggggtaacggcctaccaaggcgacgatcagtagccgacctgagagggtgaccggccacattgggactgagacacggcccaaactcctacgggaggcagcagtggggaatattgcacaatgggggaaaccctgatgcagcgacgccgcgtgagcgatgaagtatttcggtatgtaaagctctatcagcagggaagaaaatgacggtacctgactaagaagccccggctaactacgtgccagcagccgcggtaatacgtagggggcaagcgttatccggatttactgggtgtaaagggagcgtagacggcatggcaagccagatgtgaaagcccggggctcaaccccgggactgcatttggaactgtcaggctagagtgtcggagaggaaagcggaattcctagtgtagcggtgaaatgcgtagatattaggaggaacaccagtggcgaaggcggctttctggacgatgactgacgttgaggctcgaaagcgtggggagcaaacaggattagataccctggtagtccacgccgtaaacgatgaatactaggtgtcgggtggcaaagccattcggtgccgcagcaaacgcaataagtattccacctggggagtacgttcgcaagaatgaaactcaaaggaattgacggggacccgcacaagcggtggagcatgtggtttaattcgaagcaacgcgaagaaccttacctggtcttgacatccctctgaccgctctttaatcggagctttccttcgggacagaggagacaggtggtgcatggttgtcgtcagctcgtgtcgtgagatgttgggttaagtcccgcaacgagcgcaacccctatctttagtagccagcatttaaggtgggcactctagagagactgccagggataacctggaggaaggtggggatgacgtcaaatcatcatgccccttatgaccagggctacacacgtgctacaatggcgtaaacaaagggaagcgagcccgcgagggggagcaaatcccaaaaataacgtctcagttcggattgtagtctgcaactcgactacatgaagctggaatcgctagtaatcgcgaatcagaatgtcgcggtgaatacgttcccgggtcttgtacacaccgcccgtcacaccatgggagtcagtaacgcccgaagtcagtgacccaaccgcaaggagggagctgccgaaggtgggaccgataactggggtgaagtcgtaacaaggtagccgtatcggaaggtgcggctggatcacctccttt

SEQ ID NO: 573 - DNA, 1406 bp, artificial sequence
  STR00581_Streptococcus_parasanguinis
ggggataactattggaaacgatagctaataccgcataaaagtcgacattgcatgatgttgacttgaaaggtgcaactgcaccactaagagatggacctgcgttgtattagctagttggtgaggtaacggctcaccaaggcgacgatacatagccgacctgagagggtgatcggccacactgggactgagacacggcccagactcctacgggaggcagcagtagggaatcttcggcaatggacggaagtctgaccgagcaacgccgcgtgagtgaagaaggttttcggatcgtaaagctctgttgtaagagaagaacgagtgtgagagtggaaagttcacactgtgacggtaacttaccagaaagggacggctaactacgtgccagcagccgcggtaatacgtaggtcccgagcgttatccggatttattgggcgtaaagcgagcgcaggcggttagataagtctgaagttaaaggctgtggcttaaccatagtacgctttggaaactgtttaacttgagtgcagaaggggagagtggaattccatgtgtagcggtgaaatgcgtagatatatggaggaacaccggtggcgaaagcggctctctggtctgtaactgacgctgaggctcgaaagcgtggggagcaaacaggattagataccctggtagtccacgccgtaaacgatgagtgctaggtgttgggtcctttccgggactcagtgccgcagctaacgcattaagcactccgcctggggagtacgaccgcaaggttgaaactcaaaggaattgacgggggcccgcacaagcggtggagcatgtggtttaattcgaagcaacgcgaagaaccttaccaggtcttgacatccctctgaccgctctagagatagagctttccttcgggacagaggtgacaggtggtgcatggttgtcgtcagctcgtgtcgtgagatgttgggttaagtcccgcaacgagcgcaacccctattgttagttgccatcatttagttgggcactctagcgagactgccggtaataaaccggaggaaggtggggatgacgtcaaatcatcatgccccttatgacctgggctacacacgtgctacaatggctggtacaacgagtcgcgagtcggtgacggcaagctaatctcttaaagccagtctcagttcggattgtaggctgcaactcgcctacatgaagtcggaatcgctagtaatcgcggatcagcacgccgcggtgaatacgttcccgggccttgtacacaccgcccgtcacaccacgagagtttgtaacacccgaagtcggtgaggtaaccttttaggagccagccgcctaaggtgggatagatgattggggtgaagtcgtaacaaggtagccgtatcggaaggtgcggctggatcacctccttt

SEQ ID NO: 574 - DNA, 1528 bp, artificial sequence
  STR00584_Blautia_luti_group
atcagagagtttgatcctggctcaggatgaacgctggcggcgtgcttaacacatgcaagtcgaacgggaaaccttttattgaagcttcggcagatttagattgtttctagtggcggacgggtgagtaacgcgtgggtaacctgccttatacagggggataacagtcagaaatgactgctaataccgcataagcgcacagagctgcatggctcggtgtgaaaaactccggtggtataagatggacccgcgttggattagctagttggtgaggtaacggcccaccaaggcgacgatccatagccggcctgagagggtgaacggccacattgggactgagacacggcccagactcctacgggaggcagcagtggggaatattgcacaatgggggaaaccctgatgcagcgacgccgcgtgaaggaagaagtatctcggtatgtaaacttctatcagcagggaagaaaatgacggtacctgactaagaagccccggctaactacgtgccagcagccgcggtaatacgtagggggcaagcgttatccggatttactgggtgtaaagggagcgtagacggatggacaagtctgatgtgaaaggctggggctcaaccccgggactgcattggaaactgcccgtcttgagtgccggagaggtaagcggaattcctagtgtagcggtgaaatgcgtagatattaggaggaacaccagtggcgaaggcggcttactggacggtaactgacgttgaggctcgaaagcgtggggagcaaacaggattagataccctggtagtccacgcggtaaacgatgaatgctaggtgtcggggagcaaagctcttcggtgccgccgcaaacgcattaagcattccacctggggagtacgttcgcaagaatgaaactcaaaggaattgacggggacccgcacaagcggtggagcatgtggtttaattcgaagcaacgcgaagaaccttaccaagtcttgacatccctctgaccggaacttaaccgttcctttccttcgggacagaggagacaggtggtgcatggttgtcgtcagctcgtgtcgtgagatgttgggttaagtcccgcaacgagcgcaacccctatccccagtagccagcggttcggccgggcactctgaggagactgccagggataacctggaggaaggcggggatgacgtcaaatcatcatgccccttatgatttgggctacacacgtgctacaatggcgtaaacaaagggaagcgaacctgcgagggtgggcaaatcccaaaaataacgtcccagttcggactgtagtctgcaacccgactacacgaagctggaatcgctagtaatcgcggatcagaatgccgcggtgaatacgttcccgggtcttgtacacaccgcccgtcacaccatgggagtcagtaacgcccgaagtcagtgacctaaccgcaaggaaggagctgccgaaggcgggaccgatgactggggtgaagtcgtaacaaggtagccgtatcggaaggtgcggctggatcacctccttt

SEQ ID NO: 575 - DNA, 1528 bp, artificial sequence
  STR00641_[Ruminococcus]_gnavus
aacgagagtttgatcctggctcaggatgaacgctggcggcgtgcttaacacatgcaagtcgagcgaagcgcttttgcggatttcttcggattgaagcaactgtgactgagcggcggacgggtgagtaacgcgtgggtaacctgcctcatacagggggataacagttggaaacggctgctaataccgcataagcgcacagtaccgcatggtaccgtgtgaaaaactccggtggtatgagatggacccgcgtctgattagctagttggtggggtaacggcctaccaaggcgacgatcagtagccgacctgagagggtgaccggccacattgggactgagacacggcccaaactcctacgggaggcagcagtggggaatattgcacaatgggggaaaccctgatgcagcgacgccgcgtgagcgatgaagtatttcggtatgtaaagctctatcagcagggaagaaaatgacggtacctgactaagaagccccggctaactacgtgccagcagccgcggtaatacgtagggggcaagcgttatccggatttactgggtgtaaagggagcgtagacggcatggcaagccagatgtgaaagcccggggctcaaccccgggactgcatttggaactgtcaggctagagtgtcggagaggtaagcggaattcctagtgtagcggtgaaatgcgtagatattaggaggaacaccagtggcgaaggcggcttactggacgatgactgacgttgaggctcgaaagcgtggggagcaaacaggattagataccctggtagtccacgccgtaaacgatgaatactaggtgtcgggtggcaaagccattcggtgccgcagcaaacgcaataagtattccacctggggagtacgttcgcaagaatgaaactcaaaggaattgacggggacccgcacaagcggtggagcatgtggtttaattcgaagcaacgcgaagaaccttacctggtcttgacatccctatgaccgctctttaatcggagctttccttcgggacagaggagacaggtggtgcatggttgtcgtcagctcgtgtcgtgagatgttgggttaagtcccgcaacgagcgcaacccctatctttagtagccagcattttggatgggcactctagagagactgccagggataacctggaggaaggtggggatgacgtcaaatcatcatgccccttatgaccagggctacacacgtgctacaatggcgtaaacaaagggaagcgaacctgcgagggggagcaaatcccaaaaataacgtctcagttcggattgtagtctgcaactcgactacatgaagctggaatcgctagtaatcgcgaatcagaatgtcgcggtgaatacgttcccgggtcttgtacacaccgcccgtcacaccatgggagtcagtaacgcccgaagtcagtgacccaaccgtaaggagggagctgccgaaggtgggaccgataactggggtgaagtcgtaacaaggtagccgtatcggaaggtgcggctggatcacctccttt

SEQ ID NO: 576 - DNA, 1528 bp, artificial sequence
  STR00851_[Ruminococcus]_gnavus
aacgagagtttgatcctggctcaggatgaacgctggcggcgtgcttaacacatgcaagtcgagcgaagcacttttgcggatttcttcggattgaagcaattgtgactgagcggcggacgggtgagtaacgcgtgggtaacctgcctcatacagggggataacagttggaaacggctgctaataccgcataagcgcacagtaccgcatggtaccgtgtgaaaaactccggtggtatgagatggacccgcgtctgattaggtagttggtggggtaacggcctaccaagccgacgatcagtagccgacctgagagggtgaccggccacattgggactgagacacggcccaaactcctacgggaggcagcagtggggaatattgcacaatgggggaaaccctgatgcagcgacgccgcgtgagcgatgaagtatttcggtatgtaaagctctatcagcagggaagaaaatgacggtacctgactaagaagccccggctaactacgtgccagcagccgcggtaatacgtagggggcaagcgttatccggatttactgggtgtaaagggagcgtagacggcatggcaagccagatgtgaaagcccggggctcaaccccgggactgcatttggaactgtcaggctagagtgtcggagaggaaagcggaattcctagtgtagcggtgaaatgcgtagatattaggaggaacaccagtggcgaaggcggctttctggacgatgactgacgttgaggctcgaaagcgtggggagcaaacaggattagataccctggtagtccacgccgtaaacgatgaatactaggtgtcgggtggcaaagccattcggtgccgcagcaaacgcaataagtattccacctggggagtacgttcgcaagaatgaaactcaaaggaattgacggggacccgcacaagcggtggagcatgtggtttaattcgaagcaacgcgaagaaccttacctggtcttgacatccctctgaccgctctttaatcggagctttccttcgggacagaggagacaggtggtgcatggttgtcgtcagctcgtgtcgtgagatgttgggttaagtcccgcaacgagcgcaacccctatctttagtagccagcatttaaggtgggcactctagagagactgccagggataacctggaggaaggtggggatgacgtcaaatcatcatgccccttatgaccagggctacacacgtgctacaatggcgtaaacaaagggaagcgagcccgcgagggggagcaaatcccaaaaataacgtctcagttcggattgtagtctgcaactcgactacatgaagctggaatcgctagtaatcgcgaatcagaatgtcgcggtgaatacgttcccgggtcttgtacacaccgcccgtcacaccatgggagtcagtaacgcccgaagtcagtgacccaaccgtaaggagggagctgccgaaggtgggaccgataactggggtgaagtcgtaacaaggtagccgtatcggaaggtgcggctggatcacctccttt

SEQ ID NO: 577 - DNA, 1528 bp, artificial sequence
  STR00860_[Ruminococcus]_bromii
tttagagagtttgatcctggctcaggacgaacgctggcggcgtgcctaacacatgcaagtcgaacggaactgttttgaaagatttcttcggaatgaatttgatttagtttagtggcggacgggtgagtaacgcgtgagtaacctgccttcaagagggggataacattctgaaaagaatgctaataccgcatgacatatcggaatcacatgattttgatatcaaagattttatcgcttgaagatggactcgcgtccgattagttagttggtgaggtaacggctcaccaagaccgcgatcggtagccggactgagaggttgaacggccacattgggactgagacacggcccagactcctacgggaggcagcagtgggggatattgcgcaatgggggcaaccctgacgcagcaacgccgcgtgaaggatgaaggttttcggattgtaaacttcttttattaaggacgaaacttgacggtacttaatgaataagctccggctaactacgtgccagcagccgcggtaatacgtagggagcaagcgttgtccggatttactgggtgtaaagggtgcgtaggcggctttgcaagtcagatgtgaaatctatgggctcaacccataaactgcatttgaaactgtagagcttgagtgaagtagaggcaggcggaattccccgtgtagcggtgaaatgcgtagagatggggaggaacaccagtggcgaaggcggcctgctgggctttaactgacgctgaggcacgaaagcgtgggtagcaaacaggattagataccctggtagtccacgctgtaaacgatgattactaggtgtggggggtctgaccccttccgtgccggagttaacacaataagtaatccacctggggagtacggccgcaaggttgaaactcaaaggaattgacgggggcccgcacaagcagtggagtatgtggtttaattcgaagcaacgcgaagaaccttaccaggtcttgacatccaactaacgaagtagagatacattaggtgcccttcggggaaagttgagacaggtggtgcatggttgtcgtcagctcgtgtcgtgagatgttgggttaagtcccgcaacgagcgcaacccttgctattagttgctacgcaagagcactctaataggactgccgttgacaaaacggaggaaggtggggacgacgtcaaatcatcatgccccttatgacctgggctacacacgtactacaatggatgttaacagagggaagcaagacagcgatgtggagcaaacccctaaaaacattctcagttcagattgcaggctgcaacccgcctgcatgaagatggaattgctagtaatcgcggatcagcatgccgcggtgaatacgttcccgggccttgtacacaccgcccgtcacaccatgggagccggtaatacccgaagtcagtagtccaacctcgtgaggacgctgccgaaggtaggattggcgactggggtgaagtcgtaacaaggtagccgtatcggaaggtgcggctggatcacctccttt

SEQ ID NO: 578 - DNA, 1226 bp, artificial sequence; identical to SEQ ID NO: 158
  STR00982.1_Lactonifactor_longoviformis

SEQ ID NO: 579 - DNA, 1528 bp, artificial sequence
  STR01226_Blautia_luti_group
atcagagagtttgatcctggctcaggatgaacgctggcggcgtgcttaacacatgcaagtcgaacgggaaaccttttattgaagcttcggcagatttagattgtttctagtggcggacgggtgagtaacgcgtgggtaacctgccttatacagggggataacagtcagaaatgactgctaataccgcataagcgcacaggaccgcatggtccggtgtgaaaaactccggtggtataagatggacccgcgttggattagctagttggtgaggtaacggcccaccaaggcgacgatccatagccggcctgagagggtgaacggccacattgggactgagacacggcccagactcctacgggaggcagcagtggggaatattgcacaatgggggaaaccctgatgcagcgacgccgcgtgaaggaagaagtatctcggtatgtaaacttctatcagcagggaagaaaatgacggtacctgactaagaagccccggctaactacgtgccagcagccgcggtaatacgtagggggcaagcgttatccggatttactgggtgtaaagggagcgtagacggatggacaagtctgatgtgaaaggctggggctcaaccccgggactgcattggaaactgcccgtcttgagtgccggagaggtaagcggaattcctagtgtagcggtgaaatgcgtagatattaggaggaacaccagtggcgaaggcggcttactggacggtaactgacgttgaggctcgaaagcgtggggagcaaacaggattagataccctggtagtccacgcggtaaacgatgaatgctaggtgtcggggagcaaagctcttcggtgccgccgcaaacgcattaagcattccacctggggagtacgttcgcaagaatgaaactcaaaggaattgacggggacccgcacaagcggtggagcatgtggtttaattcgaagcaacgcgaagaaccttaccaagtcttgacatccctctgaccggaacttaaccgttcctttccttcgggacagaggagacaggtggtgcatggttgtcgtcagctcgtgtcgtgagatgttgggttaagtcccgcaacgagcgcaacccctatccccagtagccagcggttcggccgggcactctgaggagactgccagggataacctggaggaaggcggggatgacgtcaaatcatcatgccccttatgatttgggctacacacgtgctacaatggcgtaaacaaagggaagcgaacctgcgagggtgggcaaatcccaaaaataacgtcccagttcggactgtagtctgcaacccgactacacgaagctggaatcgctagtaatcgcggatcagaatgccgcggtgaatacgttcccgggtcttgtacacaccgcccgtcacaccatgggagtcagtaacgcccgaagtcagtgacctaaccgcaaggaaggagctgccgaaggcgggaccgatgactggggtgaagtcgtaacaaggtagccgtatcggaaggtgcggctggatcacctccttt

SEQ ID NO: 580 - DNA, 1324 bp, artificial sequence
  STR01231_[Ruminococcus]_gnavus
catggtacggtgtgaaaaactccggtggtatgagatggacccgcgtctgattaggtagttggtggggtaacggcctaccaagccgacgatcagtagccgacctgagagggtgaccggccacattgggactgagacacggcccaaactcctacgggaggcagcagtggggaatattgcacaatgggggaaaccctgatgcagcgacgccgcgtgagcgatgaagtatttcggtatgtaaagctctatcagcagggaagaaaatgacggtacctgactaagaagccccggctaactacgtgccagcagccgcggtaatacgtagggggcaagcgttatccggatttactgggtgtaaagggagcgtagacggcatggcaagccagatgtgaaagcccggggctcaaccccgggactgcatttggaactgtcaggctagagtgtcggagaggaaagcggaattcctagtgtagcggtgaaatgcgtagatattaggaggaacaccagtggcgaaggcggctttctggacgatgactgacgttgaggctcgaaagcgtggggagcaaacaggattagataccctggtagtccacgccgtaaacgatgaatactaggtgtcgggtggcaaagccattcggtgccgcagcaaacgcaataagtattccacctggggagtacgttcgcaagaatgaaactcaaaggaattgacggggacccgcacaagcggtggagcatgtggtttaattcgaagcaacgcgaagaaccttacctggtcttgacatccctctgaccgctctttaatcggagctttccttcgggacagaggagacaggtggtgcatggttgtcgtcagctcgtgtcgtgagatgttgggttaagtcccgcaacgagcgcaacccctatctttagtagccagcattttggatgggcactctagagagactgccagggataacctggaggaaggtggggatgacgtcaaatcatcatgccccttatgaccagggctacacacgtgctacaatggcgtaaacaaagggaagcgagcccgcgagggggagcaaatcccaaaaataacgtctcagttcggattgtagtctgcaactcgactacatgaagctggaatcgctagtaatcgcgaatcagaatgtcgcggtgaatacgttcccgggtcttgtacacaccgcccgtcacaccatgggagtcagtaacgcccgaagtcagtgacccaaccgcaaggagggagctgccgaaggtgggaccgataactggggtgaagtcgtaacaaggtagccgtatcggaaggtgcggctggatcacctccttt

SEQ ID NO: 581 - DNA, 1267 bp, artificial sequence
  STR01502_Blautia_luti_group
gttggtgaggtaacggcccaccaaggcgacgatccatagccggcctgagagggtgaacggccacattgggactgagacacggcccagactcctacgggaggcagcagtggggaatattgcacaatgggggaaaccctgatgcagcgacgccgcgtgaaggaagaagtatctcggtatgtaaacttctatcagcagggaagaaaatgacggtacctgactaagaagccccggctaactacgtgccagcagccgcggtaatacgtagggggcaagcgttatccggatttactgggtgtaaagggagcgtagacggatggacaagtctgatgtgaaaggctggggctcaaccccgggactgcattggaaactgcccgtcttgagtgccggagaggtaagcggaattcctagtgtagcggtgaaatgcgtagatattaggaggaacaccagtggcgaaggcggcttactggacggtaactgacgttgaggctcgaaagcgtggggagcaaacaggattagataccctggtagtccacgcggtaaacgatgaatgctaggtgtcggggagcaaagctcttcggtgccgccgcaaacgcattaagcattccacctggggagtacgttcgcaagaatgaaactcaaaggaattgacggggacccgcacaagcggtggagcatgtggtttaattcgaagcaacgcgaagaaccttaccaagtcttgacatccctctgaccggaacttaaccgttcctttccttcggggcagaggtgacaggtggtgcatggttgtcgtcagctcgtgtcgtgagatgttgggttaagtcccgcaacgagcgcaacccctatccccagtagccagcggttcggccgggcactctgaggagactgccagggataacctggaggaaggcggggatgacgtcaaatcatcatgccccttatgatttgggctacacacgtgctacaatggcgtaaacaaagggaagcgaacctgcgagggtgggcaaatcccaaaaataacgtcccagttcggactgtagtctgcaacccgactacacgaagctggaatcgctagtaatcgcggatcagaatgccgcggtgaatacgttcccgggtcttgtacacaccgcccgtcacaccatgggagtcagtaacgcccgaagtcagtgacctaaccgcaaggaaggagctgccgaaggcgggaccgatgactggggtgaagtcgtaacaaggtagccgtatcggaaggtgcggctggatcacctccttt

SEQ ID NO: 582 - DNA, 1521 bp, artificial sequence; identical to SEQ ID NO: 164
  STR01506.1_Alistipes_onderdonkii

SEQ ID NO: 583 - DNA, 1520 bp, artificial sequence
  STR01585_Bacteroides_intestinalis
atgaagagtttgatcctggctcaggatgaacgctagctacaggcttaacacatgcaagtcgaggggcatcatgacctagcaataggttgatggcgaccggcgcacgggtgagtaacacgtatccaacctgccgattattccgggatagcctttcgaaagaaagattaatactggatagcataacgagaaggcatcttcttgttattaaagaatttcgataatcgatggggatgcgttccattagtttgttggcggggtaacggcccaccaagacatcgatggataggggttctgagaggaaggtcccccacattggaactgagacacggtccaaactcctacgggaggcagcagtgaggaatattggtcaatggacgagagtctgaaccagccaagtagcgtgaaggatgactgccctatgggttgtaaacttcttttatatgggaataaagtgcagtatgtatactgttttgtatgtaccatacgaataaggatcggctaactccgtgccagcagccgcggtaatacggaggatccgagcgttatccggatttattgggtttaaagggagcgtaggcggattattaagtcagttgtgaaagtttgcggctcaaccgtaaaattgcagttgatactggtagtcttgagtgcagcagaggtaggcggaattcgtggtgtagcggtgaaatgcttagatatcacgaagaactccgattgcgaaggcagcttactggactgtaactgacgctgatgctcgaaagtgtgggtatcaaacaggattagataccctggtagtccacacagtaaacgatgaatactcgctgtttgcgatatacagcaagcggccaagcgaaagcattaagtattccacctggggagtacgccggcaacggtgaaactcaaaggaattgacgggggcccgcacaagcggaggaacatgtggtttaattcgatgatacgcgaggaaccttacccgggcttaaattgcaactgacggatttggaaacagatcttccttcgggcagttgtgaaggtgctgcatggttgtcgtcagctcgtgccgtgaggtgtcggcttaagtgccataacgagcgcaacccttatctttagttactaacaggtcatgctgaggactctagagagactgccgtcgtaagatgtgaggaaggtggggatgacgtcaaatcagcacggcccttacgtccggggctacacacgtgttacaatggggggtacagaaggcagctacacagcgatgtgatgctaatcccaaaagcctctctcagttcggattggagtctgcaacccgactccatgaagctggattcgctagtaatcgcgcatcagccacggcgcggtgaatacgttcccgggccttgtacacaccgcccgtcaagccatgaaagccgggggtacctgaagtacgtaaccgcaaggagcgtcctagggtaaaactggtaattggggctaagtcgtaacaaggtagccgtaccggaaggtgcggctggaacacctccttt

SEQ ID NO: 584 - DNA, 1573 bp, artificial sequence
  STR01592_[Lactobacillus]_fermentum
tatgagagtttgatcctggctcaggatgaacgccggcggtgtgcctaatacatgcaagtcgaacgcgttggcccaattgattgacggtgcttgcacctgattgattttggtcgccaacgagtggcggacgggtgagtaacacgtaggtaacctgcccagaagcgggggacaacatttggaaacagatgctaataccgcataacagcgttgttcgcatgaacaacgcttaaaagatggcttctcgctatcacttctggatggacctgcggtgcattagcttgttggtggggtaacggcctaccaaggcgatgatgcatagccgagttgagagactgatcggccacaatgggactgagacacggcccatactcctacgggaggcagcagtagggaatcttccacaatgggcgcaagcctgatggagcaacaccgcgtgagtgaagaagggtttcggctcgtaaagctctgttgttaaagaagaacacgtatgagagtaactgttcatacgttgacggtatttaaccagaaagtcacggctaactacgtgccagcagccgcggtaatacgtaggtggcaagcgttatccggatttattgggcgtaaagagagtgcaggcggttttctaagtctgatgtgaaagccttcggcttaaccggagaagtgcatcggaaactggataacttgagtgcagaagagggtagtggaactccatgtgtagcggtggaatgcgtagatatatggaagaacaccagtggcgaaggcggctacctggtctgcaactgacgctgagactcgaaagcatgggtagcgaacaggattagataccctggtagtccatgccgtaaacgatgagtgctaggtgttggagggtttccgcccttcagtgccggagctaacgcattaagcactccgcctggggagtacgaccgcaaggttgaaactcaaaggaattgacgggggcccgcacaagcggtggagcatgtggtttaattcgaagctacgcgaagaaccttaccaggtcttgacatcttgcgccaaccctagagatagggcgtttccttcgggaacgcaatgacaggtggtgcatggtcgtcgtcagctcgtgtcgtgagatgttgggttaagtcccgcaacgagcgcaacccttgttactagttgccagcattaagttgggcactctagtgagactgccggtgacaaaccggaggaaggtggggacgacgtcagatcatcatgccccttatgacctgggctacacacgtgctacaatggacggtacaacgagtcgcgaactcgcgagggcaagcaaatctcttaaaaccgttctcagttcggactgcaggctgcaactcgcctgcacgaagtcggaatcgctagtaatcgcggatcagcatgccgcggtgaatacgttcccgggccttgtacacaccgcccgtcacaccatgagagtttgtaacacccaaagtcggtggggtaaccttttaggagccagccgcctaaggtgggacagatgattagggtgaagtcgtaacaaggtagccgtaggagaacctgcggctggatcacctccttt

SEQ ID NO: 585 - DNA, 1526 bp, artificial sequence
  STR01608_Bacteroides_caccae
atgaagagtttgatcctggctcaggatgaacgctagctacaggcttaacacatgcaagtcgaggggcatcagtttggtttgcttgcaaaccaaagctggcgaccggcgcacgggtgagtaacacgtatccaacctgcctcatactcggggatagcctttcgaaagaaagattaatatccgatagcatatatttcccgcatgggttttatattaaagaaattcggtatgagatggggatgcgttccattagtttgttgggggggtaacggcccaccaagactacgatggataggggttctgagaggaaggtcccccacattggaactgagacacggtccaaactcctacgggaggcagcagtgaggaatattggtcaatggacgcgagtctgaaccagccaagtagcgtgaaggatgactgccctatgggttgtaaacttcttttatatgggaataaagttgtccacgtgtggatttttgtatgtaccatatgaataaggatcggctaactccgtgccagcagccgcggtaatacggaggatccgagcgttatccggatttattgggtttaaagggagcgtaggcggattgttaagtcagttgtgaaagtttgcggctcaaccgtaaaattgcagttgatactggcagtcttgagtgcagtagaggtgggcggaattcgtggtgtagcggtgaaatgcttagatatcacgaagaactccgattgcgaaggcagctcactggagtgtaactgacgctgatgctcgaaagtgtgggtatcaaacaggattagataccctggtagtccacacagtaaacgatgaatactcgctgtttgcgatatacagtaagcggccaagcgaaagcattaagtattccacctggggagtacgccggcaacggtgaaactcaaaggaattgacgggggcccgcacaagcggaggaacatgtggtttaattcgatgatacgcgaggaaccttacccgggcttaaattgcaaatgaattatggggaaacccatacgccgcaaggcatttgtgaaggtgctgcatggttgtcgtcagctcgtgccgtgaggtgtcggcttaagtgccataacgagcgcaacccttatcttcagttactaacaggtcatgctgaggactctggagagactgccgtcgtaagatgtgaggaaggtggggatgacgtcaaatcagcacggcccttacgtccggggctacacacgtgttacaatggggggtacagaaggccgctacctggtgacaggatgccaatcccaaaaacctctctcagttcggatcgaagtctgcaacccgacttcgtgaagctggattcgctagtaatcgcgcatcagccatggcgcggtgaatacgttcccgggccttgtacacaccgcccgtcaagccatgaaagccgggggtacctgaagtacgtaaccgcaaggagcgtcctagggtaaaactggtaattggggctaagtcgtaacaaggtagccgtaccggaaggtgcggctggaacacctccttt

SEQ ID NO: 586 - DNA, 1528 bp, artificial sequence
  STR01623_Blautia_luti_group
atcagagagtttgatcctggctcaggatgaacgctggcggcgtgcttaacacatgcaagtcgaacgggaaaccttttattgaagcttcggcagatttagcttgtttctagtggcggacgggtgagtaacgcgtgggtaacctgccttatacagggggataacagtcagaaatggctgctaataccgcataagcgcacagagctgcatggctccgtgtgaaaaactccggtggtataagatggacccgcgttggattagcttgttggcagggtaacggcctaccaaggcgacgatccatagccggcctgagagggtgaacggccacattgggactgagacacggcccagactcctacgggaggcagcagtggggaatattgcacaatgggggaaaccctgatgcagcgacgccgcgtgaaggaagaagtatctcggtatgtaaacttctatcagcagggaagaaaatgacggtacctgactaagaagccccggctaactacgtgccagcagccgcggtaatacgtagggggcaagcgttatccggatttactgggtgtaaagggagcgtagacggatggacaagtctgatgtgaaaggctggggctcaaccccgggactgcattggaaactgcccgtcttgagtgccggagaggtaagcggaattcctagtgtagcggtgaaatgcgtagatattaggaggaacaccagtggcgaaggcggcttactggacggtaactgacgttgaggctcgaaagcgtggggagcaaacaggattagataccctggtagtccacgcggtaaacgatgaatgctaggtgtcgggtgacaaagtcattcggtgccgccgcaaacgcattaagcattccacctggggagtacgttcgcaagaatgaaactcaaaggaattgacggggacccgcacaagcggtggagcatgtggtttaattcgaagcaacgcgaagaaccttaccaagtcttgacatccccctgaccggaacttaaccgttcctttccttcgggacaggggagacaggtggtgcatggttgtcgtcagctcgtgtcgtgagatgttgggttaagtcccgcaacgagcgcaacccctatccccagtagccagcagttcggctgggcactctgaggagactgccagggataacctggaggaaggcggggatgacgtcaaatcatcatgccccttatgatttgggctacacacgtgctacaatggcgtaaacaaagggaagcgagcctgcgagggtaagcaaatcccaaaaataacgtcccagttcggattgtagtctgcaactcgactacatgaagctggaatcgctagtaatcgcggatcagaatgccgcggtgaatacgttcccgggtcttgtacacaccgcccgtcacaccatgggagtcagtaacgcccgaagtcagtgacctaaccgcaagggaggagctgccgaaggcgggaccgatgactggggtgaagtcgtaacaaggtagccgtatcggaaggtgcggctggatcacctccttt

SEQ ID NO: 587 - DNA, 1528 bp, artificial sequence
  STR01651_Blautia_luti_group
atcagagagtttgatcctggctcaggatgaacgctggcggcgtgcttaacacatgcaagtcgaacgggaaaccttttattgaagcttcggcagatttagattgtttctagtggcggacgggtgagtaacgcgtgggtaacctgccttatacagggggataacagtcagaaatggctgctaataccgcataagcgcacagagctgcatggctccgtgtgaaaaactccggtggtataagatggacccgcgttggattagcttgttggcagggtaacggcctaccaaggcgacgatccatagccggcctgagagggtgaacggccacattgggactgagacacggcccagactcctacgggaggcagcagtggggaatattgcacaatgggggaaaccctgatgcagcgacgccgcgtgaaggaagaagtatctcggtatgtaaacttctatcagcagggaagaaaatgacggtacctgactaagaagccccggctaactacgtgccagcagccgcggtaatacgtagggggcaagcgttatccggatttactgggtgtaaagggagcgtagacggatggacaagtctgatgtgaaaggctggggctcaaccccgggactgcattggaaactgcccgtcttgagtgccggagaggtaagcggaattcctagtgtagcggtgaaatgcgtagatattaggaggaacaccagtggcgaaggcggcttactggacggtaactgacgttgaggctcgaaagcgtggggagcaaacaggattagataccctggtagtccacgcggtaaacgatgaatgctaggtgtcgggtgacaaagtcattcggtgccgccgcaaacgcattaagcattccacctggggagtacgttcgcaagaatgaaactcaaaggaattgacggggacccgcacaagcggtggagcatgtggtttaattcgaagcaacgcgaagaaccttaccaagtcttgacatccccctgaccggaacttaaccgttcctttccttcgggacaggggagacaggtggtgcatggttgtcgtcagctcgtgtcgtgagatgttgggttaagtcccgcaacgagcgcaacccctatcctcagtagccagcatttaagctgggcactctgtggagactgccagggataacctggaggaaggcggggatgacgtcaaatcatcatgccccttatgatttgggctacacacgtgctacaatggcgtaaacaaagggaagcgaacctgcgagggtgggcaaatcccaaaaataacgtcccagttcggactgtagtctgcaacccgactacacgaagctggaatcgctagtaatcgcggatcagaatgccgcggtgaatacgttcccgggtcttgtacacaccgcccgtcacaccatgggagtcagtaacgcccgaagtcagtgacctaaccgcaagggaggagctgccgaaggcgggaccgatgactggggtgaagtcgtaacaaggtagccgtatcggaaggtgcggctggatcacctccttt

SEQ ID NO: 588 - DNA, 1573 bp, artificial sequence
  STR01991_[Lactobacillus]_fermentum
tatgagagtttgatcctggctcaggatgaacgccggcggtgtgcctaatacatgcaagtcgaacgcgttggcccaattgattgacggtgcttgcacctgattgattttggtcgccaacgagtggcggacgggtgagtaacacgtaggcaacctgcccagaagcgggggacaacatttggaaacagatgctaataccgcataacagcgttgttcgcatgaacaacgcttaaaagatggcttctcgctatcacttctggatggacctgcggtgcattagcttgttggtggggtaacggcctaccaaggcgatgatgcatagccgagttgagagactgatcggccacaatgggactgagacacggcccatactcctacgggaggcagcagtagggaatcttccacaatgggcgcaagcctgatggagcaacaccgcgtgagtgaagaagggtttcggctcgtaaagctctgttgttaaagaagaacacgtatgagagtaactgttcatacgttgacggtatttaaccagaaagtcacggctaactacgtgccagcagccgcggtaatacgtaggtggcaagcgttatccggatttattgggcgtaaagagagtgcaggcggttttctaagtctgatgtgaaagccttcggcttaaccggagaagtgcatcggaaactggataacttgagtgcagaagagggtagtggaactccatgtgtagcggtggaatgcgtagatatatggaagaacaccagtggcgaaggcggctacctggtctgcaactgacgctgagactcgaaagcatgggtagcgaacaggattagataccctggtagtccatgccgtaaacgatgagtgctaggtgttggagggtttccgcccttcagtgccggagctaacgcattaagcactccgcctggggagtacgaccgcaaggttgaaactcaaaggaattgacgggggcccgcacaagcggtggagcatgtggtttaattcgaagctacgcgaagaaccttaccaggtcttgacatcttgcgccaaccctagagatagggcgtttccttcgggaacgcaatgacaggtggtgcatggtcgtcgtcagctcgtgtcgtgagatgttgggttaagtcccgcaacgagcgcaacccttgttactagttgccagcattaagttgggcactctagtgagactgccggtgacaaaccggaggaaggtggggacgacgtcagatcatcatgccccttatgacctgggctacacacgtgctacaatggacggtacaacgagtcgcgaactcgcgagggcaagcaaatctcttaaaaccgttctcagttcggactgcaggctgcaactcgcctgcacgaagtcggaatcgctagtaatcgcggatcagcatgccgcggtgaatacgttcccgggccttgtacacaccgcccgtcacaccatgagagtttgtaacacccaaagtcggtggggtaaccttttaggagccagccgcctaaggtgggacagatgattagggtgaagtcgtaacaaggtagccgtaggagaacctgcggctggatcacctccttt

SEQ ID NO: 589 - DNA, 1527 bp, artificial sequence
  STR02156_Agathobaculum_butyriciproducens_group
tttagagagtttgatcctggctcaggatgaacgctggcggcgtgcctaacacatgcaagtcgaacggagtcgttttggaaaatccttcgggattggaattctcgacttagtggcggacgggtgagtaacgcgtgagcaatctgcctttaagagggggataacagtcggaaacggctgctaataccgcataaagcatcaaattcgcatgttttcgatgccaaaggagcaatccgcttttagatgagctcgcgtctgattagctagttggcggggtaacggcccaccaaggcgacgatcagtagccggactgagaggttgaacggccacattgggactgagacacggcccagactcctacgggaggcagcagtggggaatattgcgcaatgggggaaaccctgacgcagcaacgccgcgtgattgaagaaggccttcgggttgtaaagatctttaattcgggacgaattttgacggtaccgaaagaataagctccggctaactacgtgccagcagccgcggtaatacgtagggagcaagcgttatccggatttactgggtgtaaagggcgcgcaggcgggccggcaagttggaagtgaaatccgggggcttaacccccgaactgctttcaaaactgctggtcttgagtgatggagaggcaggcggaattccgtgtgtagcggtgaaatgcgtagatatacggaggaacaccagtggcgaaggcggcctgctggacattaactgacgctgaggcgcgaaagcgtggggagcaaacaggattagataccctggtagtccacgccgtaaacgatggatactaggtgtgggaggtattgaccccttccgtgccgcagttaacacaataagtatcccacctggggagtacggccgcaaggttgaaactcaaaggaattgacgggggcccgcacaagcagtggagtatgtggtttaattcgaagcaacgcgaagaaccttaccaggccttgacatcccgatgaccgtcctagagatagggcttctcttcggagcatcggtgacaggtggtgcatggttgtcgtcagctcgtgtcgtgagatgttgggttaagtcccgcaacgagcgcaacccttacggttagttgatacgcaagatcactctagccggactgccgttgacaaaacggaggaaggtggggacgacgtcaaatcatcatgccccttatggcctgggctacacacgtactacaatggcagtcatacagagggaagcaaaaccgcgaggtggagcaaatccctaaaagctgtcccagttcagattgcaggctgcaacccgcctgcatgaagtcggaattgctagtaatcgcggatcagcatgccgcggtgaatacgttcccgggccttgtacacaccgcccgtcacaccatgagagccgtcaatacccgaagtccgtagcctaaccgcaaggagggcgcggccgaaggtaggggtggtaattagggtgaagtcgtaacaaggtagccgtatcggaaggtgcggctggatcacctccttt

SEQ ID NO: 590 - DNA, 1525 bp, artificial sequence
  STR02212_Bacteroides_dorei_group
atgaagagtttgatcctggctcaggatgaacgctagctacaggcttaacacatgcaagtcgaggggcagcatggtcttagcttgctaaggccgatggcgaccggcgcacgggtgagtaacacgtatccaacctgccgtctactcttggacagccttctgaaaggaagattaatacaagatggcatcatgagtccgcatgttcacatgattaaaggtattccggtagacgatggggatgcgttccattagatagtaggcggggtaacggcccacctagtcttcgatggataggggttctgagaggaaggtcccccacattggaactgagacacggtccaaactcctacgggaggcagcagtgaggaatattggtcaatgggcgcaggcctgaaccagccaagtagcgtgaaggatgactgccctatgggttgtaaacttcttttataaaggaataaagtcgggtatgtatacccgtttgcatgtactttatgaataaggatcggctaactccgtgccagcagccgcggtaatacggaggatccgagcgttatccggatttattgggtttaaagggagcgtagatggatgtttaagtcagttgtgaaagtttgcggctcaaccgtaaaattgcagttgatactggatatcttgagtgcagttgaggcaggcggaattcgtggtgtagcggtgaaatgcttagatatcacgaagaactccgattgcgaaggcagcctgctaagctgcaactgacattgaggctcgaaagtgtgggtatcaaacaggattagataccctggtagtccacacggtaaacgatgaatactcgctgtttgcgatatacagcaagcggccaagcgaaagcgttaagtattccacctggggagtacgccggcaacggtgaaactcaaaggaattgacgggggcccgcacaagcggaggaacatgtggtttaattcgatgatacgcgaggaaccttacccgggcttaaattgcagatgaattacggtgaaagccgtaagccgcaaggcatctgtgaaggtgctgcatggttgtcgtcagctcgtgccgtgaggtgtcggcttaagtgccataacgagcgcaacccttgttgtcagttactaacaggtcatgctgaggactctgacaagactgccatcgtaagatgtgaggaaggtggggatgacgtcaaatcagcacggcccttacgtccggggctacacacgtgttacaatggggggtacagagggccgctaccacgcgagtggatgccaatcccaaaaacctctctcagttcggactggagtctgcaacccgactccacgaagctggattcgctagtaatcgcgcatcagccacggcgcggtgaatacgttcccgggccttgtacacaccgcccgtcaagccatgggagccgggggtacctgaagtgcgtaaccgcgaggagcgccctagggtaaaactggtgactggggctaagtcgtaacaaggtagccgtaccggaaggtgcggctggaacacctccttt

SEQ ID NO: 591 - DNA, 1428 bp, artificial sequence
  STR02221_Lachnospiraceae_NG30_sp3
tgtgactgagtggcggacgggtgagtaacgcgtgggtaacctgcctcatacagggggataacagttagaaatgactgctaataccgcataagaccacagcaccgcatggtgcaggggtaaaaactccggtggtatgagatggacccgcgtctgattagctagttggtggggtaacggcctaccaaggcgacgatcagtagccgacctgagagggtgaccggccacattgggactgagacacggcccaaactcctacgggaggcagcagtggggaatattgcacaatgggggaaaccctgatgcagcgacgccgcgtgaaggatgaagtatttcggtatgtaaacttctatcagcagggaagaaaatgacggtacctgactaagaagccccggctaactacgtgccagcagccgcggtaatacgtagggggcaagcgttatccggatttactgggtgtaaagggagcgtagacggtatggcaagtctgatgtgaaaggccagggctcaaccctgggactgcattggaaactgtcgaactagagtgtcggagaggcaagtggaattcctagtgtagcggtgaaatgcgtagatattaggaggaacaccagtggcgaaggcggcttgctggacgatgactgacgttgaggctcgaaagcgtggggagcaaacaggattagataccctggtagtccacgccgtaaacgatgactactaggtgtcgggtagcagagctattcggtgccgcagccaacgcaataagtagtccacctggggagtacgttcgcaagaatgaaactcaaaggaattgacggggacccgcacaagcggtggagcatgtggtttaattcgaagcaacgcgaagaaccttacctgctcttgacatctccctgaccggcaagtaatgttgcctttccttcgggacagggatgacaggtggtgcatggttgtcgtcagctcgtgtcgtgagatgttgggttaagtcccgcaacgagcgcaacccctatctttagtagccagcggtccggccgggcactctagagagactgccagggataacctggaggaaggtggggatgacgtcaaatcatcatgccccttatgagcagggctacacacgtgctacaatggcgtaaacaaagggaagcgagcctgcgagggtaagcaaatctcaaaaataacgtctcagttcggattgtagtctgcaactcgactacatgaagctggaatcgctagtaatcgcgaatcagaatgtcgcggtgaatacgttcccgggtcttgtacacaccgcccgtcacaccatgggagttggtaacgcccgaagtcagtgacccaaccgcaaggagggagctgccgaaggtgggaccgataactggggtgaagtcgtaacaaggtagccgtatcggaaggtgcggctggatcacctccttt

SEQ ID NO: 592 - DNA, 1534 bp, artificial sequence; identical to SEQ ID NO: 176
  STR02283.1_Lactonifactor_longoviformis

SEQ ID NO: 593 - DNA, 1308 bp, artificial sequence
  STR02314_[Ruminococcus]_gnavus
aacgagagtttgatcctggctcaggatgaacgctggcggcgtgcttaacacatgcaagtcgagcgaagcacttttgcggatttcttcggattgaagcaactgtgactgagcggcggacgggtgagtaacgcgtgggtaacctgcctcatacagggggataacagttggaaacggctgctaataccgcataagcgcacagtaccgcatggtacggtgtgaaaaactccggtggtatgagatggacccgcgtctgattaggtagttggtggggtaacggcctaccaagccgacgatcagtagccgacctgagagggtgaccggccacattgggactgagacacggcccaaactcctacgggaggcagcagtggggaatattgcacaatgggggaaaccctgatgcagcgacgccgcgtgagcgatgaagtatttcggtatgtaaagctctatcagcagggaagaaaatgacggtacctgactaagaagccccggctaactacgtgccagcagccgcggtaatacgtagggggcaagcgttatccggatttactgggtgtaaagggagcgtagacggcatggcaagccagatgtgaaagcccggggctcaaccccgggactgcatttggaactgtcaggctagagtgtcggagaggaaagcggaattcctagtgtagcggtgaaatgcgtagatattaggaggaacaccagtggcgaaggcggctttctggacgatgactgacgttgaggctcgaaagcgtggggagcaaacaggattagataccctggtagtccacgccgtaaacgatgaatactaggtgtcgggtggcaaagccattcggtgccgcagcaaacgcaataagtattccacctggggagtacgttcgcaagaatgaaactcaaaggaattgacggggacccgcacaagcggtggagcatgtggtttaattcgaagcaacgcgaagaaccttacctggtcttgacatccctctgaccgctctttaatcggagttttccttcgggacagaggagacaggtggtgcatggttgtcgtcagctcgtgtcgtgagatgttgggttaagtcccgcaacgagcgcaacccctatctttagtagccagcattttggatgggcactctagagagactgccagggataacctggaggaaggtggggatgacgtcaaatcatcatgccccttatgaccagggctacacacgtgctacaatggcgtaaacaaagggaagcgagcccgcgagggggagcaaatcccaaaaataacgtctcagttcggattgtagtctgcaactc

SEQ ID NO: 594 - DNA, 1521 bp, artificial sequence
  STR02425_Massilimaliae_sp1
caaagagtttgatcctggctcaggacgaacgctggcggcgcgcctaacacatgcaagtcgaacggagttatgccgacagaagccttcgggtggaagatggcataacttagtggcggacgggtgagtaacacgtgagcaacctgcctatcagagggggataacgttctgaaaagaacgctaataccgcataacgtgcagaggagacatctctcctgcaccaaaggagcaatccgctgatagatgggctcgcgtccgattaggtagttggtagggtaacggcctaccaagccgacgatcggtagccggactgagaggttgaacggccacattgggactgagacacggcccagactcctacgggaggcagcagtggggaatattgcacaatggggggaaccctgatgcagcgacgccgcgtgagggaagaaggttttcggattgtaaacctctgtccttagtgacgaaaatgacggtagctaaggaggaagccacggctaactacgtgccagcagccgcggtaatacgtaggtggcaagcgttgtccggaattactgggtgtaaagggagcgtaggcgggaagataagttggacgtttaatctatcggctcaaccgatatcagcgttcaaaactgtttttcttgagtgaagtagaggtaagcggaattcctagtgtagcggtgaaatgcgtaaatattaggaggaacaccagtggcgaaggcggcttactgggctttaactgacgctgaggctcgaaagcgtgggtagcaaacaggattagataccctggtagtccacgccgtaaacgatgattactaggtgtggggggactgaccccttccgtgccggagttaacacaataagtaatccacctggggagtacgaccgcaaggttgaaactcaaaggaattgacgggggcccgcacaagcagtggagtatgtggtttaattcgaagcaacgcgaagaaccttaccaggtcttgacatcctatgcaacccctagagatagggggttctcttcggagacgtagagacaggtggtgcatggttgtcgtcagctcgtgtcgtgagatgttgggttaagtcccgcaacgagcgcaacccttatgtttagttgctacgcaagagcactctagacagactgccgttgacaaaacggaggaaggtggggatgacgtcaaatcatcatgccccttatgacctgggctacacacgtactacaatggctatcaacagagggcagcgaccgagcgatcggaagcaaatctcgaaaaatagtctcagttcagattgcaggctgcaactcgcctgcatgaagtcggaattgctagtaatcgcggatcagcatgccgcggtgaatacgttcccgggccttgtacacaccgcccgtcacaccatgagagttggcaacacccgaagtcagtaggctaacgcaagaagccgctgccgaaggtggggttgatgattggggtgaagtcgtaacaaggtagccgtatcggaaggtgcggctggatcacctccttt

SEQ ID NO: 595 - DNA, 1528 bp, artificial sequence
  STR02474_Blautia_luti_group
atcagagagtttgatcctggctcaggatgaacgctggcggcgtgcttaacacatgcaagtcgaacgggaaaccttttattgaagcttcggcagatttagattgtttctagtggcggacgggtgagtaacgcgtgggtaacctgccttatacagggggataacagtcagaaatgactgctaataccgcataagcgcacaggaccgcatggtccggtgtgaaaaactccggtggtataagatggacccgcgttggattagctagttggtgaggtaacggcccaccaaggcgacgatccatagccggcctgagagggtgaacggccacattgggactgagacacggcccagactcctacgggaggcagcagtggggaatattgcacaatgggggaaaccctgatgcagcgacgccgcgtgaaggaagaagtatctcggtatgtaaacttctatcagcagggaagaaaatgacggtacctgactaagaagccccggctaactacgtgccagcagccgcggtaatacgtagggggcaagcgttatccggatttactgggtgtaaagggagcgtagacggatggacaagtctgatgtgaaaggctggggctcaaccccgggactgcattggaaactgcccgtcttgagtgccggagaggtaagcggaattcctagtgtagcggtgaaatgcgtagatattaggaggaacaccagtggcgaaggcggcttactggacggtaactgacgttgaggctcgaaagcgtggggagcaaacaggattagataccctggtagtccacgcggtaaacgatgaatgctaggtgtcgggtgacgaagtcattcggtgccgccgcaaacgcattaagcattccacctggggagtacgttcgcaagaatgaaactcaaaggaattgacggggacccgcacaagcggtggagcatgtggtttaattcgaagcaacgcgaagaaccttaccaagtcttgacatccttctgaccggaacttaaccgttccttcccttcggggcagaagtgacaggtggtgcatggttgtcgtcagctcgtgtcgtgagatgttgggttaagtcccgcaacgagcgcaacccctatccccagtagccagcggttcggccgggcactctgaggagactgccagggataacctggaggaaggcggggatgacgtcaaatcatcatgccccttatgatttgggctacacacgtgctacaatggcgtaaacaaagggaagcgaacctgcgagggtgggcaaatcccaaaaataacgtcccagttcggactgtagtctgcaacccgactacacgaagctggaatcgctagtaatcgcggatcagaatgccgcggtgaatacgttcccgggtcttgtacacaccgcccgtcacaccatgggagtcagtaacgcccgaagtcagtgacctaaccgcaaggaaggagctgccgaaggcgggaccgatgactggggtgaagtcgtaacaaggtagccgtatcggaaggtgcggctggatcacctccttt

SEQ ID NO: 596 - DNA, 1528 bp, artificial sequence
  STR02539_Blautia_luti_group
atcagagagtttgatcctggctcaggatgaacgctggcggcgtgcttaacacatgcaagtcgaacgggaattactttattgaaacttcggtcgatataatttaattctagtggcggacgggtgagtaacgcgtgggtaacctgccttatacagggggataacagtcagaaatgactgctaataccgcataagcgcacagagctgcatggctcggtgtgaaaaactccggtggtataagatggacccgcgttggattagctagttggtgaggtaacggcccaccaaggcgacgatccatagccggcctgagagggtgaacggccacattgggactgagacacggcccagactcctacgggaggcagcagtggggaatattgcacaatgggggaaaccctgatgcagcgacgccgcgtgaaggaagaagtatctcggtatgtaaacttctatcagcagggaagaaaatgacggtacctgactaagaagccccggctaactacgtgccagcagccgcggtaatacgtagggggcaagcgttatccggatttactgggtgtaaagggagcgtagacggatggacaagtctgatgtgaaaggctggggctcaaccccgggactgcattggaaactgcccgtcttgagtgccggagaggtaagcggaattcctagtgtagcggtgaaatgcgtagatattaggaggaacaccagtggcgaaggcggcttactggacggtaactgacgttgaggctcgaaagcgtggggagcaaacaggattagataccctggtagtccacgcggtaaacgatgaatgctaggtgtcggggagcaaagctcttcggtgccgccgcaaacgcattaagcattccacctggggagtacgttcgcaagaatgaaactcaaaggaattgacggggacccgcacaagcggtggagcatgtggtttaattcgaagcaacgcgaagaaccttaccaagtcttgacatccctctgaccgactcttaaccgagtctttccttcgggacagaggagacaggtggtgcatggttgtcgtcagctcgtgtcgtgagatgttgggttaagtcccgcaacgagcgcaacccctatcctcagtagccagcatataagatgggcactctggggagactgccagggataacctggaggaaggcggggatgacgtcaaatcatcatgccccttatgatttgggctacacacgtgctacaatggcgtaaacaaagggaagcgaacctgcgagggtgggcaaatcccaaaaataacgtcccagttcggactgtagtctgcaacccgactacacgaagctggaatcgctagtaatcgcggatcagaatgccgcggtgaatacgttcccgggtcttgtacacaccgcccgtcacaccatgggagtcagtaacgcccgaagtcagtgacctaaccgcaaggaaggagctgccgaaggcgggaccgatgactggggtgaagtcgtaacaaggtagccgtatcggaaggtgcggctggatcacctccttt

SEQ ID NO: 597 - DNA, 1313 bp, artificial sequence
  STR02546_Agathobaculum_butyriciproducens_group
gccaaaggagcaatccgcttttagatgagctcgcgtctgattagctggttggcggggtaacggcccaccaaggcgacgatcagtagccggactgagaggttgaacggccacattgggactgagacacggcccagactcctacgggaggcagcagtggggaatattgcgcaatgggggaaaccctgacgcagcaacgccgcgtgattgaagaaggccttcgggttgtaaagatctttaatcagggacgaaacaaatgacggtacctgaagaataagctccggctaactacgtgccagcagccgcggtaatacgtagggagcaagcgttatccggatttactgggtgtaaagggcgcgcaggcgggccggcaagttggaagtgaaatctatgggcttaacccataaactgctttcaaaactgctggtcttgagtgatggagaggcaggcggaattccgtgtgtagcggtgaaatgcgtagatatacggaggaacaccagtggcgaaggcggcctgctggacattaactgacgctgaggcgcgaaagcgtggggagcaaacaggattagataccctggtagtccacgccgtaaacgatggatactaggtgtgggaggtattgaccccttccgtgccgcagttaacacaataagtatcccacctggggagtacggccgcaaggttgaaactcaaaggaattgacgggggcccgcacaagcagtggagtatgtggtttaattcgaagcaacgcgaagaaccttaccaggtcttgacatcccgatgaccggttcagagatgagccttttcttcggaacatcggtgacaggtggtgcatggttgtcgtcagctcgtgtcgtgagatgttgggttaagtcccgcaacgagcgcaacccttacggttagttgatacgcaagatcactctagccggactgccgttgacaaaacggaggaaggtggggacgacgtcaaatcatcatgccccttatgacctgggctacacacgtactacaatggcagtcatacagagggaagcaaaaccgcgaggtggagcaaatccctaaaagctgtcccagttcagattgcaggctgcaacccgcctgcatgaagtcggaattgctagtaatcgcggatcagcatgccgcggtgaatacgttcccgggccttgtacacaccgcccgtcacaccatgagagccgtcaatacccgaagtccgtagcctaaccgcaaggagggcgcggccgaaggtaggggtggtaattagggtgaagtcgtaacaaggtagccgtatcggaaggtgcggctggatcacctccttt

SEQ ID NO: 598 - DNA, 1513 bp, artificial sequence
  STR02603_Clostridium_saudiense
agtgagagtttgatcctggctcaggacgaacgctggcggcgtgcctaacacatgcaagtcgagcgagtgaatctccttcgggagtgaagctagcggcggacgggtgagtaacacgtgggcaacctgcctcatagaggggaatagccttccgaaaggaagattaataccgcataagattgtagcttcgcatgaagtagcaattaaaggagcaatccgctatgagatgggcccgcggcgcattagctagttggtgaggtaacggctcaccaaggcgacgatgcgtagccgacctgagagggtgatcggccacattgggactgagacacggcccagactcctacgggaggcagcagtggggaatattgcacaatgggggaaaccctgatgcagcaacgccgcgtgagtgatgacggccttcgggttgtaaagctctgtcttcagggacgataatgacggtacctgaggaggaagccacggctaactacgtgccagcagccgcggtaatacgtaggtggcgagcgttgtccggatttactgggcgtaaagggagcgtaggcggacttttaagtgagatgtgaaatacccgggctcaacttgggtgctgcatttcaaactggaagtctagagtgcaggagaggagaatggaattcctagtgtagcggtgaaatgcgtagagattaggaagaacaccagtggcgaaggcgattctctggactgtaactgacgctgaggctcgaaagcgtggggagcaaacaggattagataccctggtagtccacgccgtaaacgatgaatactaggtgtaggggttgtcatgacctctgtgccgccgctaacgcattaagtattccgcctggggagtacggtcgcaagattaaaactcaaaggaattgacgggggcccgcacaagcagcggagcatgtggtttaattcgaagcaacgcgaagaaccttacctagacttgacatctcctgcattacccttaatcggggaagttccttcgggaacaggaagacaggtggtgcatggttgtcgtcagctcgtgtcgtgagatgttgggttaagtcccgcaacgagcgcaacccttattgttagttgctaccatttagttgagcactctagcgagactgcccgggttaaccgggaggaaggtggggatgacgtcaaatcatcatgccccttatgtctagggctacacacgtgctacaatggcaagtacaaagagaagcaagaccgcgaggtggagcaaaactcaaaaacttgtctcagttcggattgtaggctgaaactcgcctacatgaagctggagttgctagtaatcgcgaatcagcatgtcgcggtgaatacgttcccgggccttgtacacaccgcccgtcacaccatgagagttggcaatacccaaagtgcgtgatctgactcgcaagagaggaagcgccctaaggtagggtcagcgattggggtgaagtcgtaacaaggtagccgtaggagaacctgcggctggatcacctccttt

SEQ ID NO: 599 - DNA, 1422 bp, artificial sequence
  STR02642_Blautia_luti_group
ctagtggcggacgggtgagtaacgcgtgggtaacctgccttatacagggggataacagtcagaaatgactgctaataccgcataagcgcacagagctgcatggctcggtgtgaaaaactccggtggtataagatggacccgcgttggattagctagttggtgaggtaacggcccaccaaggcgacgatccatagccggcctgagagggtgaacggccacattgggactgagacacggcccagactcctacgggaggcagcagtggggaatattgcacaatgggggaaaccctgatgcagcgacgccgcgtgaaggaagaagtatctcggtatgtaaacttctatcagcagggaagaaaatgacggtacctgactaagaagccccggctaactacgtgccagcagccgcggtaatacgtagggggcaagcgttatccggatttactgggtgtaaagggagcgtagacggatggacaagtctgatgtgaaaggctggggctcaaccccgggactgcattggaaactgcccgtcttgagtgccggagaggtaagcggaattcctagtgtagcggtgaaatgcgtagatattaggaggaacaccagtggcgaaggcggcttactggacggtaactgacgttgaggctcgaaagcgtggggagcaaacaggattagataccctggtagtccacgcggtaaacgatgaatgctaggtgtcggggagcaaagctcttcggtgccgccgcaaacgcattaagcattccacctggggagtacgttcgcaagaatgaaactcaaaggaattgacggggacccgcacaagcggtggagcatgtggtttaattcgaagcaacgcgaagaaccttaccaagtcttgacatccttctgaccggaacttaaccgttccttcccttcggggcagaagtgacaggtggtgcatggttgtcgtcagctcgtgtcgtgagatgttgggttaagtcccgcaacgagcgcaacccctatccccagtagccagcggttcggccgggcactctgaggagactgccagggataacctggaggaaggcggggatgacgtcaaatcatcatgccccttatgatttgggctacacacgtgctacaatggcgtaaacaaagggaagcgaacctgcgagggtgggcaaatcccaaaaataacgtcccagttcggactgtagtctgcaacccgactacacgaagctggaatcgctagtaatcgcggatcagaatgccgcggtgaatacgttcccgggtcttgtacacaccgcccgtcacaccatgggagtcagtaacgcccgaagtcagtgacctaaccgcaaggaaggagctgccgaaggcgggaccgatgactggggtgaagtcgtaacaaggtagccgtatcggaaggtgcggctggatcacctccttt

SEQ ID NO: 600 - DNA, 1528 bp, artificial sequence
  STR02678_[Ruminococcus]_bromii
tttagagagtttgatcctggctcaggacgaacgctggcggcgtgcctaacacatgcaagtcgaacggaactgttttgaaagatttcttcggaatgaatttgatttagtttagtggcggacgggtgagtaacgcgtgagtaacctgccttcaagagggggataacattctgaaaagaatgctaataccgcatgacatatcggaaccacatggttctgatatcaaagattttatcgcttgaagatggactcgcgtccgattagttagttggtgaggtaacggctcaccaagaccgcgatcggtagccggactgagaggttgaacggccacattgggactgagacacggcccagactcctacgggaggcagcagtgggggatattgcgcaatgggggcaaccctgacgcagcaacgccgcgtgaaggatgaaggttttcggattgtaaacttcttttattaaggacgaaaaatgacggtacttaatgaataagctccggctaactacgtgccagcagccgcggtaatacgtagggagcaagcgttgtccggatttactgggtgtaaagggtgcgtaggcggctttgcaagtcagatgtgaaatctatgggctcaacccataaactgcatttgaaactgtagagcttgagtgaagtagaggcaggcggaattccccgtgtagcggtgaaatgcgtagagatggggaggaacaccagtggcgaaggcggcctgctgggctttaactgacgctgaggcacgaaagcgtgggtagcaaacaggattagataccctggtagtccacgctgtaaacgatgattactaggtgtggggggtctgaccccttccgtgccggagttaacacaataagtaatccacctggggagtacggccgcaaggttgaaactcaaaggaattgacgggggcccgcacaagcagtggagtatgtggtttaattcgaagcaacgcgaagaaccttaccaggtcttgacatccaactaacgaagtagagatacattaggtgcccttcggggaaagttgagacaggtggtgcatggttgtcgtcagctcgtgtcgtgagatgttgggttaagtcccgcaacgagcgcaacccttgctattagttgctacgcaagagcactctaataggactgccgttgacaaaacggaggaaggtggggacgacgtcaaatcatcatgccccttatgacctgggctacacacgtactacaatggatgttaacagagggaagcaagacagtgatgtggagcaaacccctaaaaacattctcagttcagattgcaggctgcaacccgcctgcatgaagatggaattgctagtaatcgcggatcagcatgccgcggtgaatacgttcccgggccttgtacacaccgcccgtcacaccatgggagccggtaatacccgaagtcagtagtccaacctcgtgaggacgctgccgaaggtaggattggcgactggggtgaagtcgtaacaaggtagccgtatcggaaggtgcggctggatcacctccttt

SEQ ID NO: 601 - DNA, 1527 bp, artificial sequence; identical to SEQ ID NO: 2
  >ERR1022377_03675 Blautia_wexlerae

SEQ ID NO: 602 - DNA, 1527 bp, artificial sequence; identical to SEQ ID NO: 3
  >ERR1022379_03717 Blautia_wexlerae

SEQ ID NO: 603 - DNA, 1526 bp, artificial sequence; identical to SEQ ID NO: 6
  >ERR1203942_01900 Blautia_wexlerae

SEQ ID NO: 604 - DNA, 1514 bp, artificial sequence
  >ERR1204058_03790 Acetatifactor_sp1
tgagagtttgatcctggctcaggatgaacgctggcggcgtgcctaacacatgcaagtcgaacggacttacattgaagcctagcgatatgtaagttagtggcggacgggtgagtaacgcgtgggtaacctgccttgtactgggggacaacagttggaaacgactgctaataccgcataagcgcacagcttcgcatgaagcagtgtgaaaaactccggtggtacaagatggacccgcgtctgattagctggttggtgaggtaacggcccaccaaggcgacgatcagtagccggcctgagagggtgaacggccacattgggactgagacacggcccaaactcctacgggaggcagcagtggggaatattgcacaatgggggaaaccctgatgcagcaacgccgcgtgagtgaagaagtatttcggtatgtaaagctctatcagcaggaaagaaaatgacggtacctgactaagaagccccggctaactacgtgccagcagccgcggtaatacgtagggggcaagcgttatccggatttactgggtgtaaagggagcgtagacggttttgcaagtctgaagtgaaagcccggggcttaaccccgggactgctttggaaactgtagaactagagtgcaggagaggtaagtggaattcctagtgtagcggtgaaatgcgtagatattaggaggaacaccagtggcgaaggcggcttactggactgtaactgacgttgaggctcgaaagcgtggggagcaaacaggattagataccctggtagtccacgccgtaaacgatgattactaggtgttggtgggtacgacccatcggtgccgcagcaaacgcaataagtaatccacctggggagtacgttcgcaagaatgaaactcaaaggaattgacggggacccgcacaagcggtggagcatgtggtttaattcgaagcaacgcgaagaaccttacctggtcttgacatccctatgaataacgggcaatgccgttagtacttcggtacataggagacaggtggtgcatggttgtcgtcagctcgtgtcgtgagatgttgggttaagtcccgcaacgagcgcaacccttatctttagtagccagcagtaagatgggcactctagagagactgccggggataacccggaggaaggtggggatgacgtcaaatcatcatgccccttatgaccagggctacacacgtgctacaatggcgtaaacaaagagaagcgaagtcgtgaggcagagcgaatctcaaaaataacgtctcagttcggattgtagtctgcaactcgactacatgaagctggaatcgctagtaatcgcagatcagaatgctgcggtgaatacgttcccgggtcttgtacacaccgcccgtcacaccatgggagtcggaaatgcccgaagtcggtgacctaaccgcaaggaaggagccgccgaaggcaggtctgataactggggtgaagtcgtaacaaggtagccgtatcggaaggtgcggctggatcacctccttt

SEQ ID NO: 605 - DNA, 1529 bp, artificial sequence
  >ERR2221143_03083 Blautia_caecimuris
acagagagtttgatcctggctcaggatgaacgctggcggcgtgcttaacacatgcaagtcgaacggggattattttgacagagacttcggttgaagtcgttataatcctagtggcggacgggtgagtaacgcgtgggtaacctgcctcacactgggggataacagtcagaaatgactgctaataccgcataagcgcacgggattgcatgatccagtgtgaaaaactccggtggtgtgagatggacccgcgttggattagccagttggcagggtaacggcctaccaaagcgacgatccatagccggcctgagagggtggacggccacattgggactgagacacggcccagactcctacgggaggcagcagtggggaatattgcacaatgggggaaaccctgatgcagcgacgccgcgtgaaggaagaagtatctcggtatgtaaacttctatcagcagggaagaaaatgacggtacctgactaagaagccccggctaactacgtgccagcagccgcggtaatacgtagggggcaagcgttatccggatttactgggtgtaaagggagcgtagacggagcagcaagtctgatgtgaaaggcgggggctcaacccccggactgcattggaaactgttgatcttgagtaccggagaggtaagcggaattcctagtgtagcggtgaaatgcgtagatattaggaggaacaccagtggcgaaggcggcttactggacggtaactgacgttgaggctcgaaagcgtggggagcaaacaggattagataccctggtagtccacgccgtaaacgatgaatactaggtgtcgggtggcagagccattcggtgccgcagcaaacgcagtaagtattccacctggggagtacgttcgcaagaatgaaactcaaaggaattgacggggacccgcacaagcggtggagcatgtggtttaattcgaagcaacgcgaagaaccttaccaagtcttgacatcccgatgaccggcacgtaacggtgccttctcttcggagcatcggagacaggtggtgcatggttgtcgtcagctcgtgtcgtgagatgttgggttaagtcccgcaacgagcgcaacccctatccttagtagccagcggtttggccgggcactctgaggagactgccagggataacctggaggaaggcggggatgacgtcaaatcatcatgccccttatgatttgggctacacacgtgctacaatggcgtaaacaaagggaagcgagagtgtgagcttaagcaaatcccaaaaataacgtcccagttcggactgcagtctgcaactcgactgcacgaagctggaatcgctagtaatcgcggatcagaatgccgcggtgaatacgttcccgggtcttgtacacaccgcccgtcacaccatgggagtcagtaacgcccgaagtcagtgaccgaaccgaaaggacggagctgccgaaggcgggacggatgactggggtgaagtcgtaacaaggtagccgtatcggaaggtgcggctggatcacctccttt

SEQ ID NO: 606 - DNA, 1527 bp, artificial sequence; identical to SEQ ID NO: 10
  >ERR2230049_03624 Blautia_wexlerae

SEQ ID NO: 607 - DNA, 1515 bp, artificial sequence
  >ERR2230056_03769 Acetatifactor_sp1
atgagagtttgatcctggctcaggatgaacgctggcggcgtgcctaacacatgcaagtcgaacggaatttacatgaagcctagcgattgtaaatttagtggcggacgggtgagtaacgcgtgggtaacctgccttgtactgggggacaacagttggaaacgactgctaataccgcataagcgcacagcttcgcatgaagcagtgtgaaaaactccggtggtacaagatggacccgcgtctgattagctggttggtgaggtaacggcccaccaaggcgacgatcagtagccggcctgagagggtgaacggccacattgggactgagacacggcccaaactcctacgggaggcagcagtggggaatattgcacaatgggggaaaccctgatgcagcaacgccgcgtgagtgaagaagtatttcggtatgtaaagctctatcagcaggaaagaaaatgacggtacctgactaagaagccccggctaactacgtgccagcagccgcggtaatacgtagggggcaagcgttatccggatttactgggtgtaaagggagcgtagacggttttgcaagtctgaagtgaaagcccggggcttaaccccgggactgctttggaaactgtaggactagagtgcaggagaggtaagtggaattcctagtgtagcggtgaaatgcgtagatattaggaggaacaccagtggcgaaggcggcttactggactgtaactgacgttgaggctcgaaagcgtggggagcaaacaggattagataccctggtagtccacgccgtaaacgatgattactaggtgttggtgggtacgacccatcggtgccgcagcaaacgcaataagtaatccacctggggagtacgttcgcaagaatgaaactcaaaggaattgacggggacccgcacaagcggtggagcatgtggtttaattcgaagcaacgcgaagaaccttacctggtcttgacatccctatgaataacgggcaatgccgttagtacttcggtacataggagacaggtggtgcatggttgtcgtcagctcgtgtcgtgagatgttgggttaagtcccgcaacgagcgcaacccttatctttagtagccagcagtaagatgggcactctagagagactgccggggataacccggaggaaggtggggatgacgtcaaatcatcatgccccttatgaccagggctacacacgtgctacaatggcgtaaacaaagagaagcgaagtcgtgaggcagagcgaatctcaaaaataacgtctcagttcggattgtagtctgcaactcgactacatgaagctggaatcgctagtaatcgcagatcagaatgctgcggtgaatacgttcccgggtcttgtacacaccgcccgtcacaccatgggagtcggaaatgcccgaagtcggtgacctaaccgaaaggaaggagccgccgaaggcaggtctgataactggggtgaagtcgtaacaaggtagccgtatcggaaggtgcggctggatcacctccttt

SEQ ID NO: 608 - DNA, 1507 bp, artificial sequence
  >GCF_000017725.2_00722 Campylobacter_concisus
atggagagtttgatcctggctcagagtgaacgctggcggcgtgcctaatacatgcaagtcgaacggacaagtaagagcttgctcttatgagttagtggcgcacgggtgagtaatgtatagctaatctgccctacactagaggacaacagttggaaacgactgctaatactctatactcctgtcttacataagttagatagggaaagtttttcggtgtaggatgaggctatattgtatcagctagttggtgaggtaatggctcaccaaggctatgacgcataactggtctgagaggatgatcagtcacactggaactgagacacggtccagactcctacgggaggcagcagtagggaatattgctcaatgggggaaaccctgaagcagcaacgccgcgtggaggatgacacttttcggagcgtaaactccttttgttagggaagaacaatgacggtacctaacgaataagcaccggctaactccgtgccagcagccgcggtaatacggagggtgcaagcgttactcggaatcactgggcgtaaaggacgcgtaggcggattatcaagtctcttgtgaaatcctatggcttaaccatagaactgcttgggaaactgataatctagagtgagggagaggcagatggaattggtggtgtaggggtaaaatccgtagagatcaccaggaatacccattgcgaaggcgatctgctggaactcaactgacgctaatgcgtgaaagcgtggggagcaaacaggattagataccctggtagtccacgccctaaacgatgtatactagttgttgctaagctagtcttggcagtaatgcacctaacggattaagtataccgcctggggagtacggtcgcaagattaaaactcaaaggaatagacggggacccgcacaagcggtggagcatgtggtttaattcgaagatacgcgaagaaccttacccggacttgatatctaacaaatcatctagagatagaagagtgtctgcttgcagaaatgttaagacaggtgctgcacggctgtcgtcagctcgtgtcgtgagatgttgggttaagtcccgcaacgagcgcaacccacgtcattagttgctaacagttcggctgagcactctaatgagactgccttcgtaaggaggaggaaggtgtggacgacgtcaagtcatcatggcccttatgtccggggcgacacacgtgctacaatggcatatacaatgagaagcaatatcgcgagatggagcaaatctataaaatatgtcccagttcggattggagtctgcaactcgactccatgaagccggaatcgctagtaatcgtagatcagccatgctacggtgaatacgttcccgggtcttgtactcaccgcccgtcacaccatgggagttgatttcactcgaagccggaatactaaattagttaccgtccacagtggaatcagcgactggggtgaagtcgtaacaaggtaaccgtaggagaacctgcggttggatcacctcctt

SEQ ID NO: 609 - DNA, 1509 bp, artificial sequence; identical to SEQ ID NO: 212
  >GCF_000024225.1_01326 [Atopobium]_parvulum

SEQ ID NO: 610 - DNA, 1221 bp, artificial sequence
  >GCF_000157935.1_01227 Prevotella_copri
atggagagtttgatcctggctcaggatgaacgctagctacaggcttaacacatgcaagtcgaggggaaacgatattggaagcttgcttccgataggcgtcgaccggcgcacgggtgagtaacgcgtatccaacctgcccatcacttggggataaccttgcgaaagtaagactaatacccaatgatatctctagaagacatctgaaagagattaaagatttatcggtgatggatggggatgcgtctgattagcttgttggcggggtaacggcccaccaaggcgacgatcagtaggggttctgagaggaaggtcccccacattggaactgagacacggtccaaactcctacgggaggcagcagtgaggaatattggtcaatggacgagagtctgaaccagccaagtagcgtgcaggaagacggccctatgggttgtaaactgcttttataagggaataaagtgagcctcgtgaggctttttgcatgtaccttatgaataaggaccggctaattccgtgccagcagccgcggtaatacggaaggtccgggcgttatccggatttattgggtttaaagggagcgtaggccggagattaagcgtgttgtgaaatgtagacgctcaacgtctgcactgcagcgcgaactggtttccttgagtacgcacaaagtgggcggaattcgtggtgtagcggtgaaatgcttagatatcacgaagaactccgattgcgaaggcagctcgctggagcgcaactgacgctgaagctcgaaagtgcgggtatcgaacaggattagataccctggtagtccgcacggtaaacgatggatgcccgctgttggtctgaacaggtcagcggccaagcgaaagcattaagcatcccacctggggagtacgccggcaacggtgaaactcaaaggaattgacgggggcccgcacaagcggaggaacatgtggtttaattcgatgatacgcgaggaaccttacccgggcttgaattgcagaggaagaatttggagacaatgacgcccttcgggccgtctgtgaaggtgctgcatggttgtcgtcagctcgtgccgtgaggtgtcggcttaagtgccataacgagcgcaacccctctccttagttgccatcaggttatgctgggcactctggggacactgccaccgtaaggtgtgaggaaggtggggatgacgtcaaatcagcacggcccttacgtccggggcta

SEQ ID NO: 611 - DNA, 1529 bp, artificial sequence
  >GCF_000157935.1_01492 Prevotella_copri
atggagagtttgatcctggctcaggatgaacgctagctacaggcttaacacatgcaagtcgaggggaaacgacatcgaaagcttgcttttgatgggcgtcgaccggcgcacgggtgagtaacgcgtatccaacctgcccaccacttggggataaccttgcgaaagtaagactaatacccaatgatatctctagaagacatctgaaagagattaaagatttatcggtgatggatggggatgcgtctgattagcttgttggcggggtaacggcccaccaaggcgacgatcagtaggggttctgagaggaaggtcccccacattggaactgagacacggtccaaactcctacgggaggcagcagtgaggaatattggtcaatgggcgagagcctgaaccagccaagtagcgtgcaggatgacggccctatgggttgtaaactgcttttataagggaataaagttagtctcgtgagactttttgcatgtaccttatgaataaggaccggctaattccgtgccagcagccgcggtaatacggaaggtccgggcgttatccggatttattgggtttaaagggagcgtaggccggagattaagcgtgttgtgaaatgtaggcgctcaacgtctgcactgcagcgcgaactggtttccttgagtacgcacaaagtgggtggaattcgtggtgtagcggtgaaatgcttagatatcacgaagaactccgattgcgaaggcagctcactggagcgcaactgacgctgaagctcgaaagtgcgggtatcgaacaggattagataccctggtagtccgcacggtaaacgatggatgcccgctgttggtctgaacaggtcagcggccaagcgaaagcattaagcatcccacctggggagtacgccggcaacggtgaaactcaaaggaattgacgggggcccgcacaagcggaggaacatgtggtttaattcgatgatacgcgaggaaccttacccgggcttgaattgcagaggaaggatttggagacaatgacgcccttcggggcctctgtgaaggtgctgcatggttgtcgtcagctcgtgccgtgaggtgtcggcttaagtgccataacgagcgcaacccctctccttagttgccatcaggttatgctgggcactctggggacactgccaccgtaaggtgtgaggaaggtggggatgacgtcaaatcagcacggcccttacgtccggggctacacacgtgttacaatggcaggtacagagagacggttgtacgtaagtacgatcaaatccttaaagcctgtctcagttcggattggggtctgcaacccgaccccacgaagctggattcgctagtaatcgcgcatcagccatggcgcggtgaatacgttcccgggccttgtacacaccgcccgtcaagccatgaaagccgggggcgcctaaagtccgtgaccgtaaggagcggcctagggcgaaactggtaattggggctaagtcgtaacaaggtagccgtaccggaaggtgcggctggaacacctccttt

SEQ ID NO: 612 - DNA, 1529 bp, artificial sequence
  >GCF_000157935.1_01527 Prevotella_copri
atggagagtttgatcctggctcaggatgaacgctagctacaggcttaacacatgcaagtcgaggggaaacgacatcaaaagcttgcttttgatgggcgtcgaccggcgcacgggtgagtaacgcgtatccaacctgcccaccacttggggataaccttgcgaaagtaagactaatacccaatgatatctctagaagacatctgaaagagattaaagatttatcggtgatggatggggatgcgtctgattaccttgttggcggggtaacggcccaccaaggcgacgatcagtaggggttctgagaggaaggtcccccacattggaactgagacacggtccaaactcctacgggaggcagcagtgaggaatattggtcaatggacgagagtctgaaccagccaagtagcgtgcaggatgacggccctatgggttgtaaactgcttttataagggaataaagtgagcctcgtgaggctttttgcatgtaccttatgaataaggaccggctaattccgtgccagcagccgcggtaatacggaaggtccgggcgttatccggatttattgggtttaaagggagcgtaggccggagattaagcgtgttgtgaaatgtagacgctcaacgtctgcactgcagcgcgaactggtttccttgagtacgcacaaagtgggcggaattcgtggtgtagcggtgaaatgcttagatatcacgaagaactccgattgcgaaggcagctcactggagcgcaactgacgctgaagctcgaaagtgcgggtatcgaacaggattagataccctggtagtccgcacggtaaacgatggatgcccgctgttggtctgaacaggtcagcggccaagcgaaagcattaagcatcccacctggggagtacgccggcaacggtgaaactcaaaggaattgacgggggcccgcacaagcggaggaacatgtggtttaattcgatgatacgcgaggaaccttacccgggcttgaattgcagaggaaggatttggagacaatgacgcccttcggggcctctgtgaaggtgctgcatggttgtcgtcagctcgtgccgtgaggtgtcggcttaagtgccataacgagcgcaacccctctccttagttgccatcaggtcaagctgggcactctggggacactgccaccgtaaggtgtgaggaaggtggggatgacgtcaaatcagcacggcccttacgtccggggctacacacgtgttacaatggcaggtacagagagacggttgtacgtaagtacgatcaaatccttaaagcctgtctcagttcggactggggtctgcaacccgaccccacgaagctggattcgctagtaatcgcgcatcagccatggcgcggtgaatacgttcccgggccttgtacacaccgcccgtcaagccatgaaagccgggggcgcctaaagtccgtgaccgtaaggagcggcctagggcgaaactggtaattggggctaagtcgtaacaaggtagccgtaccggaaggtgcggctggaacacctccttt

SEQ ID NO: 613 - DNA, 1264 bp, artificial sequence
  >GCF_000157995.1_00018 Holdemania_filiformis
acctaggcgatgatacgtagccgacctgagagggtgaccggccacattgggactgagacacggcccaaactcctacgggaggcagcagtagggaattttcggcaatgggcgaaagcctgaccgagcaacgccgcgtgagtgaagaaggccttcgggttgtaaagctctgttgtgaaggaagaacggctcatacagggaatggtatgggagtgacggtactttaccagaaagccacggctaactacgtgccagcagccgcggtaatacgtaggtggcgagcgttatccggaattattgggcgtaaagggtgcgcaggcggtttgttaagtttaaggtgaaagcgtggggcttaaccccatatagccttagaaactgacagactagagtacaggagagggcaatggaattccatgtgtagcggtaaaatgcgtagatatatggaggaacaccagtggcgaaggcggttgcctggcctgtaactgacgctcatgcacgaaagcgtggggagcaaataggattagataccctagtagtccacgccgtaaacgatgagaactaagtgttggggaaactcagtgctgcagttaacgcaataagttctccgcctggggagtatgcacgcaagtgtgaaactcaaaggaattgacgggggcccgcacaagcggtggagtatgtggtttaattcgacgcaacgcgaagaaccttaccaggtcttgacatcccctgcaaagacatagagatatgttggaggttatcagggagacaggtggtgcatggttgtcgtcagctcgtgtcgtgagatgttgggttaagtcccgcaacgagcgcaacccttgtctttagttgctaacattaagttgaggactctagagagactgccggtgacaaaccggaggaaggtggggatgacgtcaaatcatcatgccccttatgacctgggctacacacgtactacaatggcggatacaacgagaagcaagacagtgatgtggagcaaaactcagaaagtccgtctcagttcggattgaagtctgcaacccgacttcatgaagccggaatcgctagtaatcgcggatcagcatgccgcggtgaatacgttctcgggccttgtacacaccgcccgtcaaaccatgagagttggcaatacccgaagccggtggcctaacctcgcaagaggagggagccgtcgaaggtagggctgatgattggggttaagtcgtaacaaggtatccctacgggaacgtggggatggatcacctccttt

SEQ ID NO: 614 - DNA, 1528 bp, artificial sequence; identical to SEQ ID NO: 19
  >GCF_000159975.2_00057 Blautia_wexlerae

SEQ ID NO: 615 - DNA, 1526 bp, artificial sequence; identical to SEQ ID NO: 20
  >GCF_000159975.2_00407 Blautia_wexlerae

SEQ ID NO: 616 - DNA, 1325 bp, artificial sequence; identical to SEQ ID NO: 21
  >GCF_000159975.2_02849 Blautia_wexlerae

SEQ ID NO: 617 - DNA, 1526 bp, artificial sequence; identical to SEQ ID NO: 22
  >GCF_000159975.2_03032 Blautia_wexlerae

SEQ ID NO: 618 - DNA, 1527 bp, artificial sequence; identical to SEQ ID NO: 23
  >GCF_000159975.2_03150 Blautia_wexlerae

SEQ ID NO: 619 - DNA, 1527 bp, artificial sequence; identical to SEQ ID NO: 24
  >GCF_000159975.2_03212 Blautia_wexlerae

SEQ ID NO: 620 - DNA, 1524 bp, artificial sequence; identical to SEQ ID NO: 219
  >GCF_000175615.1_00251 Rothia_mucilaginosa

SEQ ID NO: 621 - DNA, 1526 bp, artificial sequence; identical to SEQ ID NO: 246
  >GCF_000231235.1_01837 Rothia_mucilaginosa

SEQ ID NO: 622 - DNA, 1443 bp, artificial sequence
  >GCF_000235505.1_05155 Hungatella_sp2
  misc_feature (1442)..(1443): n is a, c, g, or t
atgagagtttgatcctggctcaggatgaacgctggcggcgtgcttaacacatgcaagtcgagcgaagcatttttaatgaagttttcggatggatttagatttgacttagcggcggacgggtgagtaacgcgtgggtaacctgccttatactgggggataacagttagaaatgactgctaataccgcataagcgcacagtgccgcatggcacggtgtgaaaaactccggtggtgtaagatggacccgcgtctgattaggtagttggtagggtaacggcctaccaagccgacgatcagtagccgacctgagagggtgaccggccacattgggactgagacacggcccaaactcctacgggaggcagcagtggggaatattgcacaatgggcgaaagcctgatgcagcgacgccgcgtgagtgaagaagtatttcggtatgtaaagctctatcagcagggaagaaaatgacggtacctgactaagaagccccggctaactacgtgccagcagccgcggtaatacgtagggggcaagcgttatccggatttactgggtgtaaagggagcgtagacggtttagcaagtctgaagtgaaagcccggggctcaaccccggtactgctttggaaactgttagacttgagtgcaggagaggtaagtggaattcctagtgtagcggtgaaatgcgtagatattaggaggaacaccagtggcgaaggcggcttactggactgtaactgacgttgaggctcgaaagcgtggggagcaaacaggattagataccctggtagtccacgccgtaaacgatgaatactaggtgtcggggagcaaagctcttcggtgccgccgcaaacgcattaagtattccacctggggagtacgttcgcaagaatgaaactcaaaggaattgacggggacccgcacaagcggtggagcatgtggtttaattcgaagcaacgcgaagaaccttaccaagtcttgacatccccctgaccggcacgtaacggtgcctttccttcgggacaggggagacaggtggtgcatggttgtcgtcagctcgtgtcgtgagatgttgggttaagtcccgcaacgagcgcaacccttatccttagtagccagcagtcagatgggaactctagggagactgccagggataacctggaggaaggtggggatgacgtcaaatcatcatgccccttatgatttgggctacacacgtgctacaatggcgtaaacaaagggaagcgaaaccgcgaggtcaagcaaatcccaaaaataacgtctcagttcggattgtagtctgcaactcgactacatgaagctggaatcgctagtaatcgcgaatcagaatgtcgcggtgaatacgttcccgggtcttgtacacaccgcccgtcacaccatgggagtcgataacgcccgaagtcagtgacccaaccgcaaggagnn

SEQ ID NO: 623 - DNA, 1034 bp, artificial sequence
  >GCF_000235505.1_05160 Hungatella_sp2
aactacgtgccagcagccgcggtaatacgtagggggcaagcgttatccggatttactgggtgtaaagggagcgtagacggtttagcaagtctgaagtgaaagcccggggctcaaccccggtactgctttggaaactgttagacttgagtgcaggagaggtaagtggaattcctagtgtagcggtgaaatgcgtagatattaggaggaacaccagtggcgaaggcggcttactggactgtaactgacgttgaggctcgaaagcgtggggagcaaacaggattagataccctggtagtccacgccgtaaacgatgaatactaggtgtcggggagcaaagctcttcggtgccgccgcaaacgcattaagtattccacctggggagtacgttcgcaagaatgaaactcaaaggaattgacggggacccgcacaagcggtggagcatgtggtttaattcgaagcaacgcgaagaaccttaccaagtcttgacatccccctgaccggtccgtaacgggacctttccttcgggacaggggtgacaggtggtgcatggttgtcgtcagctcgtgtcgtgagatgttgggttaagtcccgcaacgagcgcaacccttatccttagtagccagcattaagatgggaactctagggagactgccagggataacctggaggaaggtggggatgacgtcaaatcatcatgccccttatgatttgggctacacacgtgctacaatggcgtaaacaaagggaggcaaaaccgcgaggtcaagcaaatcccaaaaataacgtctcagttcggattgtagtctgcaactcgactacatgaagctggaatcgctagtaatcgcgaatcagaatgtcgcggtgaatacgttcccgggtcttgtacacaccgcccgtcacaccatgggagtcgataacgcccgaagtcagtgacccaaccttataggagggagctgccgaaggcgggattgataactggggtgaagtcgtaacaaggtagccgtatcggaaggtgcggctggatcacctccttt

SEQ ID NO: 624 - DNA, 1507 bp, artificial sequence
  >GCF_000238755.1_00001 Campylobacter_concisus
atggagagtttgatcctggctcagagtgaacgctggcggcgtgcctaatacatgcaagtcgaacggacgagtaagagcttgctcttatgagttagtggcgcacgggtgagtaatgtatagctaatctgccctacactagaggacaacagttggaaacgactgctaatactctatacacctctctagcataagttagatagggaaagtttttcggtgtaggatgaggctatattgtatcagctagttggtgaggtaatggctcaccaaggctatgacgcataactggtctgagaggatgatcagtcacactggaactgagacacggtccagactcctacgggaggcagcagtagggaatattgctcaatgggggaaaccctgaagcagcaacgccgcgtggaggatgacacttttcggagcgtaaactccttttgttagggaagaacaatgacggtacctaacgaataagcaccggctaactccgtgccagcagccgcggtaatacggagggtgcaagcgttactcggaatcactgggcgtaaaggacgcgtaggcggattatcaagtctcttgtgaaatcctatggcttaaccatagaactgcttgggaaactgataatctagagtgagggagaggcagatggaattggtggtgtaggggtaaaatccgtagagatcaccaggaatacccattgcgaaggcgatctgctggaactcaactgacgctaatgcgtgaaagcgtggggagcaaacaggattagataccctggtagtccacgccctaaacgatgtatactagttgttgctaagctagtcttggcagtaatgcacctaacggattaagtataccgcctggggagtacggtcgcaagattaaaactcaaaggaatagacggggacccgcacaagcggtggagcatgtggtttaattcgaagatacgcgaagaaccttacccggacttgatatctaacaaatcatctagagatagaagagtgtctgcttgcagaaatgttaagacaggtgctgcacggctgtcgtcagctcgtgtcgtgagatgttgggttaagtcccgcaacgagcgcaacccacgtcattagttgctaacagttcggctgagcactctaatgagactgccttcgtaaggaggaggaaggtgtggacgacgtcaagtcatcatggcccttatgtccggggcgacacacgtgctacaatggcatatacaatgagaagcaatatcgcgagatggagcaaatctataaaatatgtcccagttcggattggagtctgcaactcgactccatgaagccggaatcgctagtaatcgtagatcagccatgctacggtgaatacgttcccgggtcttgtactcaccgcccgtcacaccatgggagttgatttcactcgaagccggaatactaaattagttaccgtccacagtggaatcagcgactggggtgaagtcgtaacaaggtaaccgtaggagaacctgcggttggatcacctcctt

SEQ ID NO: 625 - DNA, 1535 bp, artificial sequence
  >GCF_000327285.1_03489 Holdemania_massiliensis
atggagagtttgatcctggctcaggatgaacgctggcggcgtgcctaatacatgcaagtcgaacgctttgtaaaggagcttgcttctttacgaggagtggcgaacgggtgagtaatacataagcaatctgcccatcggcctgggataacagttggaaacggctgctaataccggataggttagtttctggcatcagggactaattaaagttgggatacaacacggatggatgagcttatggcgtattagctagtaggtgaggtaacggcccacctaggcgatgatacgtagccgacctgagagggtgaccggccacattgggactgagacacggcccaaactcctacgggaggcagcagtagggaattttcggcaatgggcgaaagcctgaccgagcaacgccgcgtgagtgaagaaggccttcgggttgtaaagctctgttgtgaaggaagaacggctcatagagggaatgctatgggagtgacggtactttaccagaaagccacggctaactacgtgccagcagccgcggtaatacgtaggtggcgagcgttatccggaattattgggcgtaaagggtgcgcaggcggtttgaaaagtttaaggtgaaagcgtggggcttaaccccatacagccttagaaactgtcagactagagtacaggagagggcaatggaattccatgtgtagcggtaaaatgcgtagatatatggaggaacaccagtggcgaaggcggttgcctggcctgtaactgacgctcatgcacgaaagcgtggggagcaaataggattagataccctagtagtccacgccgtaaacgatgagaactaagtgttggggaaactcagtgctgcagttaacgcaataagttctccgcctggggagtatgcacgcaagtgtgaaactcaaaggaattgacgggggcccgcacaagcggtggagtatgtggtttaattcgacgcaacgcgaagaaccttaccaggtcttgacataccaggcaaagctatagagatatagtggaggttatcctggatacaggtggtgcatggttgtcgtcagctcgtgtcgtgagatgttgggttaagtcccgcaacgagcgcaacccttgtctttagttactaacattaagttgaggactctagagagactgccggtgacaaaccggaggaaggtggggatgacgtcaaatcatcatgccccttatgacctgggctacacacgtactacaatggcggatacaacgagaagcaagacagcaatgtggagcaaacctcagaaagtccgtctcagttcggattgaagtctgcaacccgacttcatgaagccggaatcgctagtaatcgcggatcagcatgccgcggtgaatacgttctcgggccttgtacacaccgcccgtcaaaccatgagagttggcaatacccgaagccggtggcctaaccctgcaaagggagggagccgtcgaaggtagggctgatgattggggttaagtcgtaacaaggtatccctacgggaacgtggggatggatcacctccttt

SEQ ID NO: 626 - DNA, 1507 bp, artificial sequence
  >GCF_000466685.1_02203 Campylobacter_concisus
atggagagtttgatcctggctcagagtgaacgctggcggcgtgcctaatacatgcaagtcgaacggacaagtaagagcttgctcttatgagttagtggcgcacgggtgagtaatgtatagctaatctgccctacactagaggacaacagttggaaacgactgctaatactctatactcctgttttacataagttagatagggaaagtttttcggtgtaggatgaggctatattgtatcagctagttggtgaggtaatggctcaccaaggctatgacgcataactggtctgagaggatgatcagtcacactggaactgagacacggtccagactcctacgggaggcagcagtagggaatattgctcaatgggggaaaccctgaagcagcaacgccgcgtggaggatgacacttttcggagcgtaaactccttttgttagggaagaacaatgacggtacctaacgaataagcaccggctaactccgtgccagcagccgcggtaatacggagggtgcaagcgttactcggaatcactgggcgtaaaggacgcgtaggcggattatcaagtctcttgtgaaatcctatggcttaaccatagaactgcttgggaaactgataatctagagtgagggagaggcagatggaattggtggtgtaggggtaaaatccgtagagatcaccaggaatacccattgcgaaggcgatctgctggaactcaactgacgctaatgcgtgaaagcgtggggagcaaacaggattagataccctggtagtccacgccctaaacgatgtatactagttgttgctaagctagtcttggcagtaatgcacctaacggattaagtataccgcctggggagtacggtcgcaagattaaaactcaaaggaatagacggggacccgcacaagcggtggagcatgtggtttaattcgaagatacgcgaagaaccttacccggacttgatatctaacaaatcatccagagatggaagagtgtctgcttgcagaaatgttaagacaggtgctgcacggctgtcgtcagctcgtgtcgtgagatgttgggttaagtcccgcaacgagcgcaacccacgtcattagttgctaacagttcggctgagcactctaatgagactgccttcgtaaggaggaggaaggtgtggacgacgtcaagtcatcatggcccttatgtccggggcgacacacgtgctacaatggcatatacaatgagaagcaatatcgcgagatggagcaaatctataaaatatgtcccagttcggattggagtctgcaactcgactccatgaagccggaatcgctagtaatcgtagatcagccatgctacggtgaatacgttcccgggtcttgtactcaccgcccgtcacaccatgggagttgatttcactcgaagccggaatactaaattagttaccgtccacagtggaatcagcgactggggtgaagtcgtaacaaggtaaccgtaggagaacctgcggttggatcacctcctt

SEQ ID NO: 627 - DNA, 1509 bp, artificial sequence; identical to SEQ ID NO: 282
  >GCF_000564995.1_00295 [Atopobium]_parvulum

SEQ ID NO: 628 - DNA, 1509 bp, artificial sequence; identical to SEQ ID NO: 284
  >GCF_000565075.1_00959 [Atopobium]_parvulum

SEQ ID NO: 629 - DNA, 1509 bp, artificial sequence; identical to SEQ ID NO: 287
  >GCF_000758945.1_00333 [Atopobium]_parvulum

SEQ ID NO: 630 - DNA, 1525 bp, artificial sequence; identical to SEQ ID NO: 295
  >GCF_001060545.1_01055 Rothia_mucilaginosa

SEQ ID NO: 631 - DNA, 1525 bp, artificial sequence; identical to SEQ ID NO: 296
  >GCF_001061665.1_01297 Rothia_mucilaginosa

SEQ ID NO: 632 - DNA, 1526 bp, artificial sequence; identical to SEQ ID NO: 297
  >GCF_001062855.1_00451 Rothia_mucilaginosa

SEQ ID NO: 633 - DNA, 1525 bp, artificial sequence; identical to SEQ ID NO: 298
  >GCF_001063995.1_00787 Rothia_mucilaginosa

SEQ ID NO: 634 - DNA, 1525 bp, artificial sequence; identical to SEQ ID NO: 300
  >GCF_001064265.1_01746 Rothia_mucilaginosa

SEQ ID NO: 635 - DNA, 1526 bp, artificial sequence; identical to SEQ ID NO: 301
  >GCF_001065115.1_00230 Rothia_mucilaginosa

SEQ ID NO: 636 - DNA, 1525 bp, artificial sequence; identical to SEQ ID NO: 302
  >GCF_001065135.1_00227 Rothia_mucilaginosa

SEQ ID NO: 637 - DNA, 1525 bp, artificial sequence; identical to SEQ ID NO: 303
  >GCF_001067345.1_01512 Rothia_mucilaginosa

SEQ ID NO: 638 - DNA, 1525 bp, artificial sequence; identical to SEQ ID NO: 304
  >GCF_001067855.1_01039 Rothia_mucilaginosa

SEQ ID NO: 639 - DNA, 1508 bp, artificial sequence
  >GCF_001298465.1_01729 Campylobacter_concisus
atggagagtttgatcctggctcagagtgaacgctggcggcgtgcctaatacatgcaagtcgaacggacaagtaagagcttgctcttatgagttagtggcgcacgggtgagtaatgtatagctaatctgccctacactagaggacaacagttggaaacggctgctaatactctatactcctgtcttacataagttagatagggaaagttttatcggtgtaggatgaggctatattgtatcagctagttggtgaggtaatggctcaccaaggctatgacgcataactggtctgagaggatgatcagtcacactggaactgagacacggtccagactcctacgggaggcagcagtagggaatattgctcaatgggggaaaccctgaagcagcaacgccgcgtggaggatgacacttttcggagcgtaaactccttttgttagggaagaataatgacggtacctaacgaataagcaccggctaactccgtgccagcagccgcggtaatacggagggtgcaagcgttactcggaatcactgggcgtaaaggacgcgtaggcggattatcaagtctcttgtgaaatcctatggcttaaccatagaactgcttgggaaactggtaatctagagtgagggagaggcagatggaattggtggtgtaggggtaaaatccgtagagatcaccaggaatacccattgcgaaggcgatctgctggaactcaactgacgctaatgcgtgaaagcgtggggagcaaacaggattagataccctggtagtccacgccctaaacgatgtatactagttgttgctaagctagtcttggcagtaatgcacctaacggattaagtataccgcctggggagtacggtcgcaagattaaaactcaaaggaatagacggggacccgcacaagcggtggagcatgtggtttaattcgaagatacgcgaagaaccttacccggacttgatatctaacaaatcatctagagatagaagagtgtctgcttgcagaaatgttaagacaggtgctgcacggctgtcgtcagctcgtgtcgtgagatgttgggttaagtcccgcaacgagcgcaacccacgtcattagttgctaacagttcggctgagcactctaatgagactgccttcgtaaggaggaggaaggtgtggacgacgtcaagtcatcatggcccttatgtccggggcgacacacgtgctacaatggcatatacaatgagaagcaatatcgcgagatggagcaaatctataaaatatgtcccagttcggattggagtctgcaactcgactccatgaagccggaatcgctagtaatcgtagatcagccatgctacggtgaatacgttcccgggtcttgtactcaccgcccgtcacaccatgggagttgatttcactcgaagccggaatactaaattagttaccgtccacagtggaatcagcgactggggtgaagtcgtaacaaggtaaccgtaggagaacctgcggttggatcacctcctt

SEQ ID NO: 640 - DNA, 1575 bp, artificial sequence
  >GCF_001405175.1_03110 Anaerobutyricum_hallii
  misc_feature (848)..(895): n is a, c, g, or t
atttgagagtttgatcctggctcaggatgaacgctggcggcgtgcctaacacatgcaagtcgaacgaagcaccttaccggattcttcggatgaaagtttggtgactgagtggcggacgggtgagtaacgcgtgggtaacctgccctgtacagggggataacagctggaaacggctgctaataccgcataagcgcacgaggagacatctcctagtgtgaaaaactccggtggtacaggatgggcccgcgtctgattagctggttggcagggtaacggcctaccaaggcaacgatcagtagccggtctgagaggatgaacggccacattggaactgagacacggtccaaactcctacgggaggcagcagtggggaatattgcacaatgggggaaaccctgatgcagcaacgccgcgtgagtgaagaagtatttcggtatgtaaagctctatcagcagggaagataatgacggtacctgactaagaagctccggctaaatacgtgccagcagccgcggtaatacgtatggagcaagcgttatccggatttactgggtgtaaagggtgcgtaggtggcagtgcaagtcagatgtgaaaggccggggctcaaccccggagctgcatttgaaactgctcggctagagtacaggagaggcaggcggaattcctagtgtagcggtgaaatgcgtagatattaggaggaacaccagtggcgaaggcggcctgctggactgttactgacactgaggcacgaaagcgtggggagcaaacaggattagataccctggtagtccacgccgtaaacgatgaatactaggtgtcggggccgtataggcttcggtgccgccgcnnnnnnnnnnnnnnnnnnnnnnnnnnnnnnnnnnnnnnnnnnnnnnnnaacgcagtaagtattccacctggggagtacgttcgcaagaatgaaactcaaaggaattgacggggacccgcacaagcggtggagcatgtggtttaattcgaagcaacgcgaagaaccttaccaggtcttgacatccttctgaccgcaccttaatcggtgctttccttcgggacagaagagacaggtggtgcatggttgtcgtcagctcgtgtcgtgagatgttgggttaagtcccgcaacgagcgcaacccctatcttcagtagccagcaggtaaggctgggcactctggagagactgccagggataacctggaggaaggtggggacgacgtcaaatcatcatgccccttatgatctgggcgacacacgtgctacaatggcggtcacagagtgaggcgaacccgcgagggggagcaaaccacaaaaaggccgtcccagttcggactgtagtctgcaacccgactacacgaagctggaatcgctagtaatcgcgaatcagaatgtcgcggtgaatacgttcccgggtcttgtacacaccgcccgtcacaccatgggagtcggaaatgcccgaagccagtgacccaaccttttggagggagctgtcgaaggtggagccggtaactggggtgaagtcgtaacaaggtagccgtatcggaaggtgcggctggatcacctccttt

SEQ ID NO: 641 - DNA, 1528 bp, artificial sequence
  >GCF_001406155.1_00954 Anaerobutyricum_hallii
atttgagagtttgatcctggctcaggatgaacgctggcggcgtgcctaacacatgcaagtcgaacgaagcaccttacttgattcttcggatgaaggtctggtgactgagtggcggacgggtgagtaacgcgtgggtaacctgccctgtacagggggataacagctggaaacggctgctaataccgcataagcgcacgaggagacatctccttgtgtgaaaaactccggtggtacaggatgggcccgcgtctgattagctggttggcagggtaacggcctaccaaggcaacgatcagtagccggtctgagaggatgaacggccacattggaactgagacacggtccaaactcctacgggaggcagcagtggggaatattgcacaatgggggaaaccctgatgcagcaacgccgcgtgagtgaagaagtatttcggtatgtaaagctctatcagcagggaagataatgacggtacctgactaagaagctccggctaaatacgtgccagcagccgcggtaatacgtatggagcaagcgttatccggatttactgggtgtaaagggtgcgtaggtggcagtgcaagtcagatgtgaaaggccggggctcaaccccggagctgcatttgaaactgctcggctagagtacaggagaggcaggcggaattcctagtgtagcggtgaaatgcgtagatattaggaggaacaccagtggcgaaggcggcctgctggactgttactgacactgaggcacgaaagcgtggggagcaaacaggattagataccctggtagtccacgccgtaaacgatgaatactaggtgtcggggccgtataggcttcggtgccgccgctaacgcagtaagtattccacctggggagtacgttcgcaagaatgaaactcaaaggaattgacggggacccgcacaagcggtggagcatgtggtttaattcgaagcaacgcgaagaaccttaccaggtcttgacatccttctgaccgcaccttaatcggtgctttccttcgggacagaagagacaggtggtgcatggttgtcgtcagctcgtgtcgtgagatgttgggttaagtcccgcaacgagcgcaacccctatcttcagtagccagcaggtaaggctgggcactctggagagactgccagggataacctggaggaaggtggggacgacgtcaaatcatcatgccccttatgatctgggcgacacacgtgctacaatggcggtcacagagtgaggcgaacccgcgagggggagcaaaccacaaaaaggccgtcccagttcggactgtagtctgcaacccgactacacgaagctggaatcgctagtaatcgcgaatcagaatgtcgcggtgaatacgttcccgggtcttgtacacaccgcccgtcacaccatgggagtcggaaatgcccgaagccagtgacccaaccttttggagggagctgtcgaaggtggagccggtaactggggtgaagtcgtaacaaggtagccgtatcggaaggtgcggctggatcacctccttt

SEQ ID NO: 642 - DNA, 1526 bp, artificial sequence; identical to SEQ ID NO: 330
  >GCF_001548235.1_00242 Rothia_mucilaginosa

SEQ ID NO: 643 - DNA, 1509 bp, artificial sequence
  >GCF_001580195.1_00485 Akkermansia_muciniphila
atggagagtttgattctggctcagaacgaacgctggcggcgtggataagacatgcaagtcgaacgggagaattgctagcttgctaataattctctagtggcgcacgggtgagtaacacgtgagtaacctgcctcttagtgggggatagccctgggaaaccgggattaataccgcatacgattgaaagatcaaagcagcaatgcgctaggagatgggctcgcggcctattagttagttggtgaggtaacggctcaccaaggcgatgacgggtagccggtctgagaggatgtccggccacactggaactgagacacggtccagacacctacgggtggcagcagtcgagaatcattcacaatgggggcaaccctgatggtgcgacgccgcgtgggggaatgaaggtcttcggattgtaaacccctgtcatgtgggagcaaattaaaaagatagtaccacaagaggaagagacggctaactctgtgccagcagccgcggtaatacagaggtctcaagcgttgttcggaatcactgggcgtaaagcgtgcgtaggctgtttcgtaagtcgtgtgtgaaaggcaggggctcaacccctggattgcacatgatactgcgagactagagtaatggagggggaaccggaattctcggtgtagcagtgaaatgcgtagatatcgagaggaacactcgtggcgaaggcgggttcctggacattaactgacgctgaggcacgaaggccaggggagcgaaagggattagatacccctgtagtcctggcagtaaacggtgcacgcttggtgtgcggggattcgaccccctgcgtgccggagctaacgcgttaagcgtgccgcctggggagtacggtcgcaagattaaaactcaaagaaattgacggggacccgcacaagcggtggagtatgtggcttaattcgatgcaacgcgaagaaccttacctgggcttgacatgtaatgaacagcatgtgaaagcatgcgactcttcggaggcgttacacaggtgctgcatggccgtcgtcagctcgtgtcgtgagatgtttggttaagtccagcaacgagcgcaacccctgttgccagttaccagcgagtaaagtcggggactctggcgagactgcccagatcaactgggaggaaggtggggacgacgtcaggtcagtatggcccttatgcccagggctgcacacgtactacaatgcccagtacagagggggccgaagccgcgaggcggaggaaatcctgaaaactgggcccagttcggactgtaggctgcaacccgcctacacgaagccggaatcgctagtaatggcgcatcagctacggcgccgtgaatacgttcccgggtcttgtacacaccgcccgtcacatcatggaagccggtcgcacccgaagtatctgaagccaaccgcaaggaggcagggtcctaaggtgagactggtaactgggatgaagtcgtaacaaggtagccgtaggggaacctgcggctggatcacctccttt

SEQ ID NO: 644 - DNA, 1525 bp, artificial sequence; identical to SEQ ID NO: 349
  >GCF_001808955.1_00220 Rothia_mucilaginosa

SEQ ID NO: 645 - DNA, 1524 bp, artificial sequence; identical to SEQ ID NO: 352
  >GCF_001810775.1_00513 Rothia_mucilaginosa

SEQ ID NO: 646 - DNA, 1524 bp, artificial sequence; identical to SEQ ID NO: 357
  >GCF_001812085.1_00002 Rothia_mucilaginosa

SEQ ID NO: 647 - DNA, 1526 bp, artificial sequence; identical to SEQ ID NO: 358
  >GCF_001812205.1_00134 Rothia_mucilaginosa

SEQ ID NO: 648 - DNA, 1526 bp, artificial sequence; identical to SEQ ID NO: 359
  >GCF_001812775.1_00002 Rothia_mucilaginosa

SEQ ID NO: 649 - DNA, 1526 bp, artificial sequence; identical to SEQ ID NO: 363
  >GCF_001813725.1_00234 Rothia_mucilaginosa

SEQ ID NO: 650 - DNA, 1526 bp, artificial sequence; identical to SEQ ID NO: 365
  >GCF_001814485.1_00090 Rothia_mucilaginosa

SEQ ID NO: 651 - DNA, 1526 bp, artificial sequence; identical to SEQ ID NO: 366
  >GCF_001814645.1_00001 Rothia_mucilaginosa

SEQ ID NO: 652 - DNA, 1433 bp, artificial sequence; identical to SEQ ID NO: 368
  >GCF_001814995.1_00863 Rothia_mucilaginosa

SEQ ID NO: 653 - DNA, 1526 bp, artificial sequence; identical to SEQ ID NO: 370
  >GCF_001815755.1_00654 Rothia_mucilaginosa

SEQ ID NO: 654 - DNA, 1524 bp, artificial sequence; identical to SEQ ID NO: 372
  >GCF_001837265.1_00002 Rothia_mucilaginosa

SEQ ID NO: 655 - DNA, 1526 bp, artificial sequence; identical to SEQ ID NO: 373
  >GCF_001837295.1_00026 Rothia_mucilaginosa

SEQ ID NO: 656 - DNA, 1507 bp, artificial sequence
  >GCF_002092845.1_00976 Campylobacter_concisus
atggagagtttgatcctggctcagagtgaacgctggcggcgtgcctaatacatgcaagtcgaacggacaagtaagagcttgctcttatgagttagtggcgcacgggtgagtaatgtatagctaatctaccctacactagaggacaacagttggaaacggctgctaatactctatactcctgtcttacataagttagatagggaaagtttttcggtgtaggatgaggctatattgtatcagctagttggtgaggtaatggctcaccaaggctatgacgcataactggtctgagaggatgatcagtcacactggaactgagacacggtccagactcctacgggaggcagcagtagggaatattgctcaatgggggaaaccctgaagcagcaacgccgcgtggaggatgacacttttcggagcgtaaactccttttgttagggaagaacaatgacggtacctaacgaataagcaccggctaactccgtgccagcagccgcggtaatacggagggtgcaagcgttactcggaatcactgggcgtaaaggacgcgtaggcggattatcaagtctcttgtgaaatcctatggcttaaccatagaactgcttgggaaactggtaatctagagtgagggagaggcagatggaattggtggtgtaggggtaaaatccgtagagatcaccaggaatacccattgcgaaggcgatctgctggaactcaactgacgctaatgcgtgaaagcgtggggagcaaacaggattagataccctggtagtccacgccctaaacgatgtatactagttgttgctaagctagtcttggcagtaatgcacctaacggattaagtataccgcctggggagtacggtcgcaagattaaaactcaaaggaatagacggggacccgcacaagcggtggagcatgtggtttaattcgaagatacgcgaagaaccttacccggacttgatatctaacaaatcatctagagatagaagagtgtctgcttgcagaaatgttaagacaggtgctgcacggctgtcgtcagctcgtgtcgtgagatgttgggttaagtcccgcaacgagcgcaacccacgtcattagttgctaacagttcggctgagcactctaatgagactgccttcgtaaggaggaggaaggtgtggacgacgtcaagtcatcatggcccttatgtccggggcgacacacgtgctacaatggcatatacaatgagaagcaatatcgcgagatggagcaaatctataaaatatgtcccagttcggattggagtctgcaactcgactccatgaagccggaatcgctagtaatcgtagatcagccatgctacggtgaatacgttcccgggtcttgtactcaccgcccgtcacaccatgggagttgatttcactcgaagccggaatactaaattagttaccgtccacagtggaatcagcgactggggtgaagtcgtaacaaggtaaccgtaggagaacctgcggttggatcacctcctt

SEQ ID NO: 657 - DNA, 1507 bp, artificial sequence
  >GCF_002165785.1_02034 Campylobacter_concisus
atggagagtttgatcctggctcagagtgaacgctggcggcgtgcctaatacatgcaagtcgaacggacaagtaagagcttgctcttatgagttagtggcgcacgggtgagtaatgtatagctaatctgccctacactagaggacaacagttggaaacggctgctaatactctatactcctgtcttacataagttagatagggaaagtttttcggtgtaggatgaggctatattgtatcagctagttggtgaggtaatggctcaccaaggctatgacgcataactggtctgagaggatgatcagtcacactggaactgagacacggtccagactcctacgggaggcagcagtagggaatattgctcaatgggggaaaccctgaagcagcaacgccgcgtggaggatgacacttttcggagcgtaaactccttttgttagggaagaataatgacggtacctaacgaataagcaccggctaactccgtgccagcagccgcggtaatacggagggtgcaagcgttactcggaatcactgggcgtaaaggacgcgtaggcggattatcaagtctcttgtgaaatcctatggcttaaccatagaactgcttgggaaactgataatctagagtgagggagaggcagatggaattggtggtgtaggggtaaaatccgtagagatcaccaggaatacccattgcgaaggcgatctgctggaactcaactgacgctaatgcgtgaaagcgtggggagcaaacaggattagataccctggtagtccacgccctaaacgatgtatactagttgttgctaagctagtcttggcagtaatgcacctaacggattaagtataccgcctggggagtacggtcgcaagattaaaactcaaaggaatagacggggacccgcacaagcggtggagcatgtggtttaattcgaagatacgcgaagaaccttacccggacttgatatctaacaaatcatctagagatagaagagtgtctgcttgcagaaatgttaagacaggtgctgcacggctgtcgtcagctcgtgtcgtgagatgttgggttaagtcccgcaacgagcgcaacccacgtcattagttgctaacagttcggctgagcactctaatgagactgccttcgtaaggaggaggaaggtgtggacgacgtcaagtcatcatggcccttatgtccggggcgacacacgtgctacaatggcatatacaatgagaagcaatatcgcgagatggagcaaatctataaaatatgtcccagttcggattggagtctgcaactcgactccatgaagccggaatcgctagtaatcgtagatcagccatgctacggtgaatacgttcccgggtcttgtactcaccgcccgtcacaccatgggagttgatttcactcgaagccggaatactaaattagttaccgtccacagtggaatcagcgactggggtgaagtcgtaacaaggtaaccgtaggagaacctgcggttggatcacctcctt

SEQ ID NO: 658 - DNA, 1507 bp, artificial sequence
  >GCF_002165825.1_02031 Campylobacter_concisus
atggagagtttgatcctggctcagagtgaacgctggcggcgtgcctaatacatgcaagtcgaacggacaagtaagagcttgctcttatgagttagtggcgcacgggtgagtaatgtatagctaatctgccctacactagaggacaacagttggaaacgactgctaatactctatactcctctctagcataagttagatagggaaagtttttcggtgtaggatgaggctatattgtatcagctagttggtgaggtaatggctcaccaaggctatgacgcataactggtctgagaggatgatcagtcacactggaactgagacacggtccagactcctacgggaggcagcagtagggaatattgctcaatgggggaaaccctgaagcagcaacgccgcgtggaggatgacacttttcggagcgtaaactccttttgttagggaagaacaatgacggtacctaacgaataagcaccggctaactccgtgccagcagccgcggtaatacggagggtgcaagcgttactcggaatcactgggcgtaaaggacgcgtaggcggattatcaagtctcttgtgaaatcctatggcttaaccatagaactgcttgggaaactgataatctagagtgagggagaggcagatggaattggtggtgtaggggtaaaatccgtagagatcaccaggaatacccattgcgaaggcgatctgctggaactcaactgacgctaatgcgtgaaagcgtggggagcaaacaggattagataccctggtagtccacgccctaaacgatgtatactagttgttgctaagctagtcttggcagtaatgcacctaacggattaagtataccgcctggggagtacggtcgcaagattaaaactcaaaggaatagacggggacccgcacaagcggtggagcatgtggtttaattcgaagatacgcgaagaaccttacccggacttgatatctaacaaatcatctagagatagaagagtgtctgcttgcagaaatgttaagacaggtgctgcacggctgtcgtcagctcgtgtcgtgagatgttgggttaagtcccgcaacgagcgcaacccacgtcattagttgctaacagttcggctgagcactctaatgagactgccttcgtaaggaggaggaaggtgtggacgacgtcaagtcatcatggcccttatgtccggggcgacacacgtgctacaatggcatatacaatgagaagcaatatcgcgagatggagcaaatctataaaatatgtcccagttcggattggagtctgcaactcgactccatgaagccggaatcgctagtaatcgtagatcagccatgctacggtgaatacgttcccgggtcttgtactcaccgcccgtcacaccatgggagttgatttcactcgaagccggaatactaagttagttaccgtccacagtggaatcagcgactggggtgaagtcgtaacaaggtaaccgtaggagaacctgcggttggatcacctcctt

SEQ ID NO: 659 - DNA, 1507 bp, artificial sequence
  >GCF_002165855.1_01869 Campylobacter_concisus
atggagagtttgatcctggctcagagtgaacgctggcggcgtgcctaatacatgcaagtcgaacggacaagtaagagcttgctcttatgagttagtggcgcacgggtgagtaatgtatagctaatctgccctacactagaggacaacagttggaaacggctgctaatactctatactcctgtcttacataagttagatagggaaagtttttcggtgtaggatgaggctatattgtatcagctagttggtgaggtaatggctcaccaaggctatgacgcataactggtctgagaggatgatcagtcacactggaactgagacacggtccagactcctacgggaggcagcagtagggaatattgctcaatgggggaaaccctgaagcagcaacgccgcgtggaggatgacacttttcggagcgtaaactccttttgttagggaagaacaatgacggtacctaacgaataagcaccggctaactccgtgccagcagccgcggtaatacggagggtgcaagcgttactcggaatcactgggcgtaaaggacgcgtaggcggattatcaagtctcttgtgaaatcctatggcttaaccatagaactgcttgggaaactggtaatctagagtgagggagaggcagatggaattggtggtgtaggggtaaaatccgtagagatcaccaggaatacccattgcgaaggcgatctgctggaactcaactgacgctaatgcgtgaaagcgtggggagcaaacaggattagataccctggtagtccacgccctaaacgatgtatactagttgttgctaagctagtcttggcagtaatgcacctaacggattaagtataccgcctggggagtacggtcgcaagattaaaactcaaaggaatagacggggacccgcacaagcggtggagcatgtggtttaattcgaagatacgcgaagaaccttacccggacttgatatctaacaaatcatctagagatagaagagtgtctgcttgcagaaatgttaagacaggtgctgcacggctgtcgtcagctcgtgtcgtgagatgttgggttaagtcccgcaacgagcgcaacccacgtcattagttgctaacagttcggctgagcactctaatgagactgccttcgtaaggaggaggaaggtgtggacgacgtcaagtcatcatggcccttatgtccggggcgacacacgtgctacaatggcatatacaataagaagcaatatcgcgagatggagcaaatctataaaatatgtcccagttcggattggagtctgcaactcgactccatgaagccggaatcgctagtaatcgtagatcagccatgctacggtgaatacgttcccgggtcttgtactcaccgcccgtcacaccatgggagttgatttcactcgaagccggaatactaaattagttaccgtccacagtggaatcagcgactggggtgaagtcgtaacaaggtaaccgtaggagaacctgcggttggatcacctcctt

SEQ ID NO: 660 - DNA, 1524 bp, artificial sequence; identical to SEQ ID NO: 380
  >GCF_002386365.1_01013 Rothia_mucilaginosa

SEQ ID NO: 661 - DNA, 1524 bp, artificial sequence; identical to SEQ ID NO: 385
  >GCF_002861015.1_01791 Rothia_mucilaginosa

SEQ ID NO: 662 - DNA, 1509 bp, artificial sequence
  >GCF_002884975.1_01547 Akkermansia_muciniphila
atggagagtttgattctggctcagaacgaacgctggcggcgtggataagacatgcaagtcgaacgagagaactgctagcttgctaatagttctctagtggcgcacgggtgagtaacacgtgagtaacctgcccccaagagtgggatagccccgggaaactgggattaataccgcataatatcgcaagattaaagcagcaatgcgcttggggatgggctcgcgtcctattagttagttggtgaggtaacggctcaccaaggcgatgacgggtagccggtctgagaggatgtccggccacactggaactgagacacggtccagacacctacgggtggcagcagtcgagaatcattcacaatgggggaaaccctgatggtgcgacgccgcgtgggggaatgaaggtcttcggattgtaaacccctgtcatgtgggagcaaattaaaaagatagtaccacaagaggaagagacggctaactctgtgccagcagccgcggtaatacagaggtctcaagcgttgttcggaatcactgggcgtaaagcgtgcgtaggcggtttcgtaagtcgtgtgtgaaaggcgggggctcaaccctcggactgcacatgatactgcgagactagagtaatggagggggaaccggaattctcggtgtagcagtgaaatgcgtagatatcgagaggaacactcgtggcgaaggcgggttcctggacattaactgacgctgaggcacgaaggccaggggagcgaaagggattagatacccctgtagtcctggcagtaaacggtgcacgcttggtgtgcggggaatcgaccccctgcgtgccggagctaacgcgttaagcgtgccgcctggggagtacggtcgcaagattaaaactcaaagaaattgacggggacccgcacaagcggtggagtatgtggcttaattcgatgcaacgcgaagaaccttacctgggcttgacatgtaatgaacaacatgtgaaagcatgcgactcttcggaggcgttacacaggtgctgcatggccgtcgtcagctcgtgtcgtgagatgtttggttaagtccagcaacgagcgcaacccctgttgccagttaccagcacataatggtggggactctggcgagactgcccagatcaactgggaggaaggtggggacgacgtcaggtcagtatggcccttatgcccagggctgcacacgtactacaatgcccagtacagagggggccgaagccgcgaggcggaggaaatcctaaaaactgggcccagttcggactgtaggctgcaacccgcctacacgaagccggaatcgctagtaatggcgcatcagctacggcgccgtgaatacgttcccgggtcttgtacacaccgcccgtcacatcatggaagccggtcgcacccgaagtatctgaagccaaccgcaaggaggcagggtcctaaggtgagactggtaactgggatgaagtcgtaacaaggtagccgtaggggaacctgcggctggatcacctccttt

SEQ ID NO: 663 - DNA, 1509 bp, artificial sequence
  >GCF_002884995.1_01991 Akkermansia_muciniphila
atggagagtttgattctggctcagaacgaacgctggcggcgtggataagacatgcaagtcgaacgggagaattgctagcttgctaataattctctagtggcgcacgggtgagtaacacgtgagtaacctgcccccaagagtgggatagccccgggaaactgggattaataccgcataaaatcgcaagattaaagcagcaatgcgcttggggatgggctcgcgtcctattagttagttggtgaggtaacggctcaccaaggcgatgacgggtagccggtctgagaggatgtccggccacactggaactgagacacggtccagacacctacgggtggcagcagtcgagaatcattcacaatgggggaaaccctgatggtgcgacgccgcgtgggggaatgaaggtcttcggattgtaaacccctgtcatgtgggagcaaattaaaaagatagtaccacaagaggaagagacggctaactctgtgccagcagccgcggtaatacagaggtctcaagcgttgttcggaatcactgggcgtaaagcgtgcgtaggcggtttcgtaagtcgtgtgtgaaaggcgggggctcaacccccggactgcacatgatactgcgagactagagtaatggagggggaaccggaattctcggtgtagcagtgaaatgcgtagatatcgagaggaacactcgtggcgaaggcgggttcctggacattaactgacgctgaggcacgaaggccaggggagcgaaagggattagatacccctgtagtcctggcagtaaacggtgcacgcttggtgtgcggggaatcgaccccctgcgtgccggagctaacgcgttaagcgtgccgcctggggagtacggtcgcaagattaaaactcaaagaaattgacggggacccgcacaagcggtggagtatgtggcttaattcgatgcaacgcgaagaaccttacctgggcttgacatgtaatgaacaacatgtgaaagcatgcgactcttcggaggcgttacacaggtgctgcatggccgtcgtcagctcgtgtcgtgagatgtttggttaagtccagcaacgagcgcaacccctgttgccagttaccagcacgtaaaggtggggactctggcgagactgcccagatcaactgggaggaaggtggggacgacgtcaggtcagtatggcccttatgcccagggctgcacacgtactacaatgcccagtacagagggggccgaagccgcgaggcggaggaaatcctgaaaactgggcccagttcggactgtaggctgcaacccgcctacacgaagccggaatcgctagtaatggcgcatcagctacggcgccgtgaatacgttcccgggtcttgtacacaccgcccgtcacatcatggaagccggtcgcacccgaagtatctgaagccaaccgcaaggaggcagggtcctaaggtgagactggtaactgggatgaagtcgtaacaaggtagccgtaggggaacctgcggctggatcacctccttt

SEQ ID NO: 664 - DNA, 1509 bp, artificial sequence
  >GCF_002885015.1_01402 Akkermansia_muciniphila
atggagagtttgattctggctcagaacgaacgctggcggcgtggataagacatgcaagtcgaacgagagaattgctagcttgctaataattctctagtggcgcacgggtgagtaacacgtgagtaacctgcccccaagagtgggatagccccgggaaactgggattaataccgcataaaatcgcaagattaaagcagcaatgcgcttggggatgggctcgcgtcctattagttagttggtgaggtaacggctcaccaaggcgatgacgggtagccggtctgagaggatgtccggccacactggaactgagacacggtccagacacctacgggtggcagcagtcgagaatcattcacaatgggggaaaccctgatggtgcgacgccgcgtgggggaatgaaggtcttcggattgtaaacccctgtcatgtgggagcaaattaaaaagatagtaccacaagaggaagagacggctaactctgtgccagcagccgcggtaatacagaggtctcaagcgttgttcggaatcactgggcgtaaagcgtgcgtaggcggtttcgtaagtcgtgtgtgaaaggcgggggctcaacccccggactgcacatgatactgcgagactagagtaatggagggggaaccggaattctcggtgtagcagtgaaatgcgtagatatcgagaggaacactcgtggcgaaggcgggttcctggacattaactgacgctgaggcacgaaggccaggggagcgaaagggattagatacccctgtagtcctggcagtaaacggtgcacgcttggtgtgcggggaatcgaccccctgcgtgccggagctaacgcgttaagcgtgccgcctggggagtacggtcgcaagattaaaactcaaagaaattgacggggacccgcacaagcggtggagtatgtggcttaattcgatgcaacgcgaagaaccttacctgggcttgacatgtaatgaacaacatgtgaaagcatgcgactcttcggaggcgttacacaggtgctgcatggccgtcgtcagctcgtgtcgtgagatgtttggttaagtccagcaacgagcgcaacccctgttgccagttaccagcacgtaaaggtggggactctggcgagactgcccagatcaactgggaggaaggtggggacgacgtcaggtcagtatggcccttatgcccagggctgcacacgtactacaatgcccagtacagagggggccgaagccgcgaggcggaggaaatcctaaaaactgggcccagttcggactgtaggctgcaacccgcctacacgaagccggaatcgctagtaatggcgcatcagctacggcgccgtgaatacgttcccgggtcttgtacacaccgcccgtcacatcatggaagccggtcgcacccgaagtatctgaagccaaccgcaaggaggcagggtcctaaggtgagactggtaactgggatgaagtcgtaacaaggtagccgtaggggaacctgcggctggatcacctccttt

SEQ ID NO: 665 - DNA, 1509 bp, artificial sequence
  >GCF_002885155.1_00754 Akkermansia_muciniphila
atggagagtttgattctggctcagaacgaacgctggcggcgtggataagacatgcaagtcgaacgagagaattgctagcttgctaataattctctagtggcgcacgggtgagtaacacgtgagtaacctgcccccgagagcgggatagccctgggaaactgggattaataccgcatagtatcgaaagattaaagcagcaatgcgcttggggatgggctcgcggcctattagttagttggtgaggtaacggctcaccaaggcgatgacgggtagccggtctgagaggatgtccggccacactggaactgagacacggtccagacacctacgggtggcagcagtcgagaatcattcacaatgggggaaaccctgatggtgcgacgccgcgtgggggaatgaaggtcttcggattgtaaacccctgtcatgtgggagcaaattaaaaagatagtaccacaagaggaagagacggctaactctgtgccagcagccgcggtaatacagaggtctcaagcgttgttcggaatcactgggcgtaaagcgtgcgtaggctgtttcgtaagtcgtgtgtgaaaggcgcgggctcaacccgcggacggcacatgatactgcgagactagagtaatggagggggaaccggaattctcggtgtagcagtgaaatgcgtagatatcgagaggaacactcgtggcgaaggcgggttcctggacattaactgacgctgaggcacgaaggccaggggagcgaaagggattagatacccctgtagtcctggcagtaaacggtgcacgcttggtgtgcggggaatcgaccccctgcgtgccggagctaacgcgttaagcgtgccgcctggggagtacggtcgcaagattaaaactcaaagaaattgacggggacccgcacaagcggtggagtatgtggcttaattcgatgcaacgcgaagaaccttacctgggcttgacatgtaatgaacaacatgtgaaagcatgcgactcttcggaggcgttacacaggtgctgcatggccgtcgtcagctcgtgtcgtgagatgtttggttaagtccagcaacgagcgcaacccctgttgccagttaccagcacgtgaaggtggggactctggcgagactgcccagatcaactgggaggaaggtggggacgacgtcaggtcagtatggcccttatgcccagggctgcacacgtactacaatgcccagtacagagggggccgaagccgcgaggcggaggaaatcctaaaaactgggcccagttcggactgtaggctgcaacccgcctacacgaagccggaatcgctagtaatggcgcatcagctacggcgccgtgaatacgttcccgggtcttgtacacaccgcccgtcacatcatggaagccggtcgcacccgaagtatctgaagccaaccgcaaggaggcagggtcctaaggtgagactggtaactgggatgaagtcgtaacaaggtagccgtaggggaacctgcggctggatcacctccttt

SEQ ID NO: 666 - DNA, 1509 bp, artificial sequence
  >GCF_002885195.1_00326 Akkermansia_muciniphila
atggagagtttgattctggctcagaacgaacgctggcggcgtggataagacatgcaagtcgaacgagagaattgctagcttgctaataattctctagtggcgcacgggtgagtaacacgtgagtaacctgcccccgagagcgggatagccctgggaaactgggattaataccgcatagaatcgcaagattaaagcagcaatgcgcttggggatgggctcgcggcctattagttagttggtgaggtaacggctcaccaaggcgatgacgggtagccggtctgagaggatgtccggccacactggaactgagacacggtccagacacctacgggtggcagcagtcgagaatcattcacaatgggggaaaccctgatggtgcgacgccgcgtgggggaatgaaggtcttcggattgtaaacccctgtcatgtgggagcaaattaaaaagatagtaccacaagaggaagagacggctaactctgtgccagcagccgcggtaatacagaggtctcaagcgttgttcggaatcactgggcgtaaagcgtgcgtaggctgtttcgtaagtcgtgtgtgaaaggcgcgggctcaacccgcggacggcacatgatactgcgagactagagtaatggagggggaaccggaattctcggtgtagcagtgaaatgcgtagatatcgagaggaacactcgtggcgaaggcgggttcctggacattaactgacgctgaggcacgaaggccaggggagcgaaagggattagatacccctgtagtcctggcagtaaacggtgcacgcttggtgtgcggggaatcgaccccctgcgtgccggagctaacgcgttaagcgtgccgcctggggagtacggtcgcaagattaaaactcaaagaaattgacggggacccgcacaagcggtggagtatgtggcttaattcgatgcaacgcgaagaaccttacctgggcttgacatgtaatgaacaacatgtgaaagcatgcgactcttcggaggcgttacacaggtgctgcatggccgtcgtcagctcgtgtcgtgagatgtttggttaagtccagcaacgagcgcaacccctgttgccagttaccagcacgtgaaggtggggactctggcgagactgcccagatcaactgggaggaaggtggggacgacgtcaggtcagtatggcccttatgcccagggctgcacacgtactacaatgcccagtacagagggggccgaagccgcgaggcggaggaaatcctgaaaactgggcccagttcggactgtaggctgcaacccgcctacacgaagccggaatcgctagtaatggcgcatcagctacggcgccgtgaatacgttcccgggtcttgtacacaccgcccgtcacatcatggaagccggtcgcacccgaagtatctgaagccaaccgcaaggaggcagggtcctaaggtgagactggtaactgggatgaagtcgtaacaaggtagccgtaggggaacctgcggctggatcacctccttt

SEQ ID NO: 667 - DNA, 1509 bp, artificial sequence
  >GCF_002885575.1_01247 Akkermansia_muciniphila
atggagagtttgattctggctcagaacgaacgctggcggcgtggataagacatgcaagtcgaacgagagaattgctagcttgctaataattctctagtggcgcacgggtgagtaacacgtgagtaacctgcccccgagagcgggatagccctgggaaactgggattaataccgcatagtatcgaaagattaaagcagcaatgcgcttggggatgggctcgcggcctattagttagttggtgaggtaacggctcaccaaggcgatgacgggtagccggtctgagaggatgtccggccacactggaactgagacacggtccagacacctacgggtggcagcagtcgagaatcattcacaatgggggaaaccctgatggtgtgacgccgcgtgggggaatgaaggtcttcggattgtaaacccctgtcatgtgggagcaaattaaaaagatagtaccacaagaggaagagacggctaactctgtgccagcagccgcggtaatacagaggtctcaagcgttgttcggaatcactgggcgtaaagcgtgcgtaggctgtttcgtaagtcgtgtgtgaaaggcgcgggctcaacccgcggacggcacatgatactgcgagactagagtaatggagggggaaccggaattctcggtgtagcagtgaaatgcgtagatatcgagaggaacactcgtggcgaaggcgggttcctggacattaactgacgctgaggcacgaaggccaggggagcgaaagggattagatacccctgtagtcctggcagtaaacggtgcacgcttggtgtgcggggaatcgaccccctgcgtgccggagctaacgcgttaagcgtgccgcctggggagtacggtcgcaagattaaaactcaaagaaattgacggggacccgcacaagcggtggagtatgtggcttaattcgatgcaacgcgaagaaccttacctgggcttgacatgtaatgaacaacatgtgaaagcatgcgactcttcggaggcgttacacaggtgctgcatggccgtcgtcagctcgtgtcgtgagatgtttggttaagtccagcaacgagcgcaacccctgttgccagttaccagcacgtgaaggtggggactctggcgagactgcccagatcaactgggaggaaggtggggacgacgtcaggtcagtatggcccttatgcccagggctgcacacgtactacaatgcccagtacagagggggccgaagccgcgaggcggaggaaatcctgaaaactgggcccagttcggactgtaggctgcaacccgcctacacgaagccggaatcgctagtaatggcgcatcagctacggcgccgtgaatacgttcccgggtcttgtacacaccgcccgtcacatcatggaagccggtcgcacccgaagtatctgaagccaaccgcaaggaggcagggtcctaaggtgagactggtaactgggatgaagtcgtaacaaggtagccgtaggggaacctgcggctggatcacctccttt

SEQ ID NO: 668 - DNA, 1507 bp, artificial sequence
  >GCF_002912715.1_01570 Campylobacter_concisus
atggagagtttgatcctggctcagagtgaacgctggcggcgtgcctaatacatgcaagtcgaacggacaagtaagagcttgctcttatgagttagtggcgcacgggtgagtaatgtatagctaatctgccctacactagaggacaacagttggaaacggctgctaatactctatactcctgtcttacataagttggatagggaaagtttttcggtgtaggatgaggctatattgtatcagctagttggtgaggtaatggctcaccaaggctatgacgcataactggtctgagaggatgatcagtcacactggaactgagacacggtccagactcctacgggaggcagcagtagggaatattgctcaatgggggaaaccctgaagcagcaacgccgcgtggaggatgacacttttcggagcgtaaactccttttgttagggaagaataatgacggtacctaacgaataagcaccggctaactccgtgccagcagccgcggtaatacggagggtgcaagcgttactcggaatcactgggcgtaaaggacgcgtaggcggattatcaagtctcttgtgaaatcctatggcttaaccatagaactgcttgggaaactggtaatctagagtgagggagaggcagatggaattggtggtgtaggggtaaaatccgtagagatcaccaggaatacccattgcgaaggcgatctgctggaactcaactgacgctaatgcgtgaaagcgtggggagcaaacaggattagataccctggtagtccacgccctaaacgatgtatactagttgttgctaagctagtcttggcagtaatgcacctaacggattaagtataccgcctggggagtacggtcgcaagattaaaactcaaaggaatagacggggacccgcacaagcggtggagcatgtggtttaattcgaagatacgcgaagaaccttacccggacttgatatctaacaaatcatctagagatagaagagtgtctgcttgcagaaatgttaagacaggtgctgcacggctgtcgtcagctcgtgtcgtgagatgttgggttaagtcccgcaacgagcgcaacccacgtcattagttgctaacagttcggctgagcactctaatgagactgccttcgtaaggaggaggaaggtgtggacgacgtcaagtcatcatggcccttatgtccggggcgacacacgtgctacaatggcatatacaatgagaagcaatatcgcgagatggagcaaatctataaaatatgtcccagttcggattggagtctgcaactcgacttcatgaagccggaatcgctagtaatcgtagatcagccatgctacggtgaatacgttcccgggtcttgtactcaccgcccgtcacaccatgggagttgatttcactcgaagccggaatactaaattagttaccgtccacagtggaatcagcgactggggtgaagtcgtaacaaggtaaccgtaggagaacctgcggttggatcacctcctt

SEQ ID NO: 669 - DNA, 1507 bp, artificial sequence
  >GCF_002913225.1_01149 Campylobacter_concisus
atggagagtttgatcctggctcagagtgaacgctggcggcgtgcctaatacatgcaagtcgaacggacgagtaagagtttgctcttatgagttagtggcgcacgggtgagtaatgtatagctaatctgccctacactagaggacaacagttggaaacgactgctaatactctatactcctgtctgacataagttagatagggaaagtttttcggtgtaggatgaggctatattgtatcagctagttggtgaggtaatggctcaccaaggctatgacgcataactggtctgagaggatgatcagtcacactggaactgagacacggtccagactcctacgggaggcagcagtagggaatattgctcaatgggggaaaccctgaagcagcaacgccgcgtggaggatgacacttttcggagcgtaaactccttttgttagggaagaacaatgacggtacctaacgaataagcaccggctaactccgtgccagcagccgcggtaatacggagggtgcaagcgttactcggaatcactgggcgtaaaggacgcgtaggcggattatcaagtctcttgtgaaatcctatggcttaaccatagaactgcttgggaaactgataatctagagtgagggagaggcagatggaattggtggtgtaggggtaaaatccgtagagatcaccaggaatacccattgcgaaggcgatctgctggaactcaactgacgctaatgcgtgaaagcgtggggagcaaacaggattagataccctggtagtccacgccctaaacgatgtatactagttgttgctaagctagtcttggcagtaatgcacctaacggattaagtataccgcctggggagtacggtcgcaagattaaaactcaaaggaatagacggggacccgcacaagcggtggagcatgtggtttaattcgaagatacgcgaagaaccttacccggacttgatatctaacaaatcatctagagatagaagagtgtctgcttgcagaaatgttaagacaggtgctgcacggctgtcgtcagctcgtgtcgtgagatgttgggttaagtcccgcaacgagcgcaacccacgtcattagttgctaacagttcggctgagcactctaatgagactgccttcgtaaggaggaggaaggtgtggacgacgtcaagtcatcatggcccttatgtccggggcgacacacgtgctacaatggcatatacaatgagaagcaatatcgcgagatggagcaaatctataaaatatgtcccagttcggattggagtctgcaactcgactccatgaagccggaatcgctagtaatcgtagatcagccatgctacggtgaatacgttcccgggtcttgtactcaccgcccgtcacaccatgggagttgatttcactcgaagccggaatactaaattagttaccgtccacagtggaatcagcgactggggtgaagtcgtaacaaggtaaccgtaggagaacctgcggttggatcacctcctt

SEQ ID NO: 670 - DNA, 1507 bp, artificial sequence
  >GCF_002913625.1_00011 Campylobacter_concisus
atggagagtttgatcctggctcagagtgaacgctggcggcgtgcctaatacatgcaagtcgaacggacaagtaagagcttgctcttatgagttagtggcgcacgggtgagtaatgtatagctaatctgccctacactagaggacaacagttggaaacgactgctaatactctatactcctgtctgacataagttagatagggaaagtttttcggtgtaggatgaggctatattgtatcagctagttggtgaggtaatggctcaccaaggctatgacgcataactggtctgagaggatgatcagtcacactggaactgagacacggtccagactcctacgggaggcagcagtagggaatattgctcaatgggggaaaccctgaagcagcaacgccgcgtggaggatgacacttttcggagcgtaaactccttttgttagggaagaacaatgacggtacctaacgaataagcaccggctaactccgtgccagcagccgcggtaatacggagggtgcaagcgttactcggaatcactgggcgtaaaggacgcgtaggcggattatcaagtctcttgtgaaatcctatggcttaaccatagaactgcttgggaaactgataatctagagtgagggagaggcagatggaattggtggtgtaggggtaaaatccgtagagatcaccaggaatacccattgcgaaggcgatctgctggaactcaactgacgctaatgcgtgaaagcgtggggagcaaacaggattagataccctggtagtccacgccctaaacgatgtatactagttgttgctaagctagtcttggcagtaatgcacctaacggattaagtataccgcctggggagtacggtcgcaagattaaaactcaaaggaatagacggggacccgcacaagcggtggagcatgtggtttaattcgaagatacgcgaagaaccttacccggacttgatatctaacaaatcatctagagatagaagagtgtctgcttgcagaaatgttaagacaggtgctgcacggctgtcgtcagctcgtgtcgtgagatgttgggttaagtcccgcaacgagcgcaacccacgtcattagttgctaacagttcggctgagcactctaatgagactgccttcgtaaggaggaggaaggtgtggacgacgtcaagtcatcatggcccttatgtccggggcgacacacgtgctacaatggcatatacaatgagaagcaatatcgcgagatggagcaaatctataaaatatgtcccagttcggattggagtctgcaactcgactccatgaagccggaatcgctagtaatcgtagatcagccatgctacggtgaatacgttcccgggtcttgtactcaccgcccgtcacaccatgggagttgatttcactcgaagccggaatactaaattagttaccgtccacagtggaatcagcgactggggtgaagtcgtaacaaggtaaccgtaggagaacctgcggttggatcacctcctt

SEQ ID NO: 671 - DNA, 1507 bp, artificial sequence
  >GCF_002913945.1_00997 Campylobacter_concisus
atggagagtttgatcctggctcagagtgaacgctggcggcgtgcctaatacatgcaagtcgaacggacaagtaagagcttgctcttatgagttagtggcgcacgggtgagtaatgtatagctaatctgccctacactagaggacaacagttggaaacgactgctaatactctatactcctgtcttacataagttagatagggaaagtttttcggtgtaggatgaggctatattgtatcagctagttggtgaggtaatggctcaccaaggctatgacgcataactggtctgagaggatgatcagtcacactggaactgagacacggtccagactcctacgggaggcagcagtagggaatattgctcaatgggggaaaccctgaagcagcaacgccgcgtggaggatgacacttttcggagcgtaaactccttttgttagggaagaataatgacggtacctaacgaataagcaccggctaactccgtgccagcagccgcggtaatacggagggtgcaagcgttactcggaatcactgggcgtaaaggacgcgtaggcggattatcaagtctcttgtgaaatcctatggcttaaccatagaactgcttgggaaactggtaatctagagtgagggagaggcagatggaattggtggtgtaggggtaaaatccgtagagatcaccaggaatacccattgcgaaggcgatctgctggaactcaactgacgctaatgcgtgaaagcgtggggagcaaacaggattagataccctggtagtccacgccctaaacgatgtatactagttgttgctaagctagtcttggcagtaatgcacctaacggattaagtataccgcctggggagtacggtcgcaagattaaaactcaaaggaatagacggggacccgcacaagcggtggagcatgtggtttaattcgaagatacgcgaagaaccttacccggacttgatatctaacaaatcatctagagatagaagagtgtctgcttgcagaaatgttaagacaggtgctgcacggctgtcgtcagctcgtgtcgtgagatgttgggttaagtcccgcaacgagcgcaacccacgtcattagttgctaacagttcggctgagcactctaatgagactgccttcgtaaggaggaggaaggtgtggacgacgtcaagtcatcatggcccttatgtccggggcgacacacgtgctacaatggcatatacaatgagaagcaatatcgcgagatggagcaaatctataaaatatgtcccagttcggattggagtctgcaactcgactccatgaagccggaatcgctagtaatcgtagatcagccatgctacggtgaatacgttcccgggtcttgtactcaccgcccgtcacaccatgggagttgatttcactcgaagccggaatactaaattagttaccgtccacagtggaatcagcgactggggtgaagtcgtaacaaggtaaccgtaggagaacctgcggttggatcacctcctt

SEQ ID NO: 672 - DNA, 1507 bp, artificial sequence
  >GCF_002914005.1_00138 Campylobacter_concisus
atggagagtttgatcctggctcagagtgaacgctggcggcgtgcctaatacatgcaagtcgaacggacaagtaagagcttgctcttatgagttagtggcgcacgggtgagtaatgtatagctaatctgccctacactagaggacaacagttggaaacggctgctaatactctatactcctgtcttacataagttagatagggaaagtttttcggtgtaggatgaggctatattgtatcagctagttggtgaggtaatggctcaccaaggctatgacgcataactggtctgagaggatgatcagtcacactggaactgagacacggtccagactcctacgggaggcagcagtagggaatattgctcaatgggggaaaccctgaagcagcaacgccgcgtggaggatgacacttttcggagcgtaaactccttttgttagggaagaataatgacggtacctaacgaataagcaccggctaactccgtgccagcagccgcggtaatacggagggtgcaagcgttactcggaatcactgggcgtaaaggacgcgtaggcggattatcaagtctcttgtgaaatcctatggcttaaccatagaactgcttgagaaactggtaatctagagtgagggagaggcagatggaattggtggtgtaggggtaaaatccgtagagatcaccaggaatacccattgcgaaggcgatctgctggaactcaactgacgctaatgcgtgaaagcgtggggagcaaacaggattagataccctggtagtccacgccctaaacgatgtatactagttgttgctaagctagtcttggcagtaatgcacctaacggattaagtataccgcctggggagtacggtcgcaagattaaaactcaaaggaatagacggggacccgcacaagcggtggagcatgtggtttaattcgaagatacgcgaagaaccttacccggacttgatatctaacaaatcatctagagatagaagagtgtctgcttgcagaaatgttaagacaggtgctgcacggctgtcgtcagctcgtgtcgtgagatgttgggttaagtcccgcaacgagcgcaacccacgtcattagttgctaacagttcggctgagcactctaatgagactgccttcgtaaggaggaggaaggtgtggacgacgtcaagtcatcatggcccttatgtccggggcgacacacgtgctacaatggcatatacaatgagaagcaatatcgcgagatggagcaaatctataaaatatgtcccagttcggattggagtctgcaactcgactccatgaagccggaatcgctagtaatcgtagatcagccatgctacggtgaatacgttcccgggtcttgtactcaccgcccgtcacaccatgggagttgatttcactcgaagccggaatactaaattagttaccgtccacagtggaatcagcgactggggtgaagtcgtaacaaggtaaccgtaggagaacctgcggttggatcacctcctt

SEQ ID NO: 673 - DNA, 1507 bp, artificial sequence
  >GCF_002914045.1_01485 Campylobacter_concisus
atggagagtttgatcctggctcagagtgaacgctggcggcgtgcctaatacatgcaagtcgaacggacaagtaagagcttgctcttatgagttagtggcgcacgggtgagtaatgtatagctaatctgccctacactagaggacaacagttggaaacggctgctaatactctatactcctctctagcataagttagatagggaaagtttttcggtgtaggatgaggctatattgtatcagctagttggtgaggtaatggctcaccaaggctatgacgcataactggtctgagaggatgatcagtcacactggaactgagacacggtccagactcctacgggaggcagcagtagggaatattgctcaatgggggaaaccctgaagcagcaacgccgcgtggaggatgacacttttcggagcgtaaactccttttgttagggaagaacaatgacggtacctaacgaataagcaccggctaactccgtgccagcagccgcggtaatacggagggtgcaagcgttactcggaatcactgggcgtaaaggacgcgtaggcggattatcaagtctcttgtgaaatcctatggcttaaccatagaactgcttgggaaactgataatctagagtgagggagaggcagatggaattggtggtgtaggggtaaaatccgtagagatcaccaggaatacccattgcgaaggcgatctgctggaactcaactgacgctaatgcgtgaaagcgtggggagcaaacaggattagataccctggtagtccacgccctaaacgatgtatactagttgttgctaagctagtcttggcagtaatgcacctaacggattaagtataccgcctggggagtacggtcgcaagattaaaactcaaaggaatagacggggacccgcacaagcggtggagcatgtggtttaattcgaagatacgcgaagaaccttacccggacttgatatctaacaaatcatctagagatagaagagtgtctgcttgcagaaatgttaagacaggtgctgcacggctgtcgtcagctcgtgtcgtgagatgttgggttaagtcccgcaacgagcgcaacccacgtcattagttgctaacagttcggctgagcactctaatgagactgccttcgtaaggaggaggaaggtgtggacgacgtcaagtcatcatggcccttatgtccggggcgacacacgtgctacaatggcatatacaatgagaagcaatatcgcgagatggagcaaatctataaaatatgtcccagttcggattggagtctgcaactcgactccatgaagccggaatcgctagtaatcgtagatcagccatgctacggtgaatacgttcccgggtcttgtactcaccgcccgtcacaccatgggagttgatttcactcgaagccggaatactaaattagttaccgtccacagtggaatcagcgactggggtgaagtcgtaacaaggtaaccgtaggagaacctgcggttggatcacctcctt

SEQ ID NO: 674 - DNA, 1507 bp, artificial sequence
  >GCF_003048495.1_00963 Campylobacter_concisus
atggagagtttgatcctggctcagagtgaacgctggcggcgtgcctaatacatgcaagtcgaacggacaagtaagagcttgctcttatgagttagtggcgcacgggtgagtaatgtatagctaatctgccctacactagaggacaacagttggaaacggctgctaatactctatactcctgtcttacataagttggatagggaaagtttttcggtgtaggatgaggctatattgtatcagctagttggtgaggtaatggctcaccaaggctatgacgcataactggtctgagaggatgatcagtcacactggaactgagacacggtccagactcctacgggaggcagcagtagggaatattgctcaatgggggaaaccctgaagcagcaacgccgcgtggaggatgacacttttcggagcgtaaactccttttgttagggaagaacaatgacggtacctaacgaataagcaccggctaactccgtgccagcagccgcggtaatacggagggtgcaagcgttactcggaatcactgggcgtaaaggacgcgtaggcggattatcaagtctcttgtgaaatcctatggcttaaccatagaactgcttgggaaactggtaatctagagtgagggagaggcagatggaattggtggtgtaggggtaaaatccgtagagatcaccaggaatacccattgcgaaggcgatctgctggaactcaactgacgctaatgcgtgaaagcgtggggagcaaacaggattagataccctggtagtccacgccctaaacgatgtatactagttgttgctaagctagtcttggcagtaatgcacctaacggattaagtataccgcctggggagtacggtcgcaagattaaaactcaaaggaatagacggggacccgcacaagcggtggagcatgtggtttaattcgaagatacgcgaagaaccttacccggacttgatatctaacaaatcatctagagatagaagagtgtctgcttgcagaaatgttaagacaggtgctgcacggctgtcgtcagctcgtgtcgtgagatgttgggttaagtcccgcaacgagcgcaacccacgtcattagttgctaacagttcggctgagcactctaatgagactgccttcgtaaggaggaggaaggtgtggacgacgtcaagtcatcatggcccttatgtccggggcgacacacgtgctacaatggcatatacaatgagaagcaatatcgcgagatggagcaaatctataaaatatgtctcagttcggattggagtctgcaactcgactccatgaagccggaatcgctagtaatcgtagatcagccatgctacggtgaatacgttcccgggtcttgtactcaccgcccgtcacaccatgggagttgatttcactcgaagccggaatactaaattagttaccgtccacagtggaatcagcgactggggtgaagtcgtaacaaggtaaccgtaggagaacctgcggttggatcacctcctt

SEQ ID NO: 675 - DNA, 1514 bp, artificial sequence
  >GCF_003435925.1_03201 Acetatifactor_sp1
atgagagtttgatcctggctcaggatgaacgctggcggcgtgcctaacacatgcaagtcgaacggacttacattgaagcctagcgatatgtaagttagtggcggacgggtgagtaacgcgtgggtaacctgccttgtactgggggacaacagttggaaacgactgctaataccgcataagcgcacagcttcgcatgaagcagtgtgaaaaactccggtggtacaagatggacccgcgtctgattagctggttggtgaggtaacggcccaccaaggcgacgatcagtagccggcctgagagggtgaacggccacattgggactgagacacggcccaaactcctacgggaggcagcagtggggaatattgcacaatgggggaaaccctgatgcagcaacgccgcgtgagtgaagaagtatttcggtatgtaaagctctatcagcaggaaagaaaatgacggtacctgactaagaagccccggctaactacgtgccagcagccgcggtaatacgtagggggcaagcgttatccggatttactgggtgtaaagggagcgtagacggttttgcaagtctgaagtgaaagcccggggcttaaccccgggactgctttggaaactgtagaactagagtgcaggagaggtaagtggaattcctagtgtagcggtgaaatgcgtagatattaggaggaacaccagtggcgaaggcggcttactggactgtaactgacgttgaggctcgaaagcgtggggagcaaacaggattagataccctggtagtccacgccgtaaacgatgattactaggtgttggtgggtacgacccatcggtgccgcagcaaacgcaataagtaatccacctggggagtacgttcgcaagaatgaaactcaaaggaattgacggggacccgcacaagcggtggagcatgtggtttaattcgaagcaacgcgaagaaccttacctggtcttgacatccctatgaataacgggcaatgccgttagtacttcggtacataggagacaggtggtgcatggttgtcgtcagctcgtgtcgtgagatgttgggttaagtcccgcaacgagcgcaacccttatctttagtagccagcagtaagatgggcactctagagagactgccggggataacccggaggaaggtggggatgacgtcaaatcatcatgccccttatgaccagggctacacacgtgctacaatggcgtaaacaaagagaagcgaagtcgtgaggcagagcgaatctcaaaaataacgtctcagttcggattgtagtctgcaactcgactacatgaagctggaatcgctagtaatcgcagacagaatgctgcggtgaatacgttcccgggtcttgtacacaccgcccgtcacaccatgggagtcggaaatgcccgaagtcggtgacctaaccgcaaggaaggagccgccgaaggcaggtctgataactggggtgaagtcgtaacaaggtagccgtatcggaaggtgcggctggatcacctccttt

SEQ ID NO: 676 - DNA, 1528 bp, artificial sequence; identical to SEQ ID NO: 73
  >GCF_003436215.1_00798 Blautia_wexlerae

SEQ ID NO: 677 - DNA, 1529 bp, artificial sequence
  >GCF_003436715.1_02932 Prevotella_copri
atggagagtttgatcctggctcaggatgaacgctagctacaggcttaacacatgcaagtcgaggggaaacgatagaggaagcttgcttccgataggcgtcgaccggcgcacgggtgagtaacgcgtatccaacctgcccatcacttggggataaccttgcgaaagtaagactaatacccaatgacgtccatagaagacatctgaaatggattaaagatttatcggtgatggatggggatgcgtctgattagcttgttggcggggtaacggcccaccaaggcgacgatcagtaggggttctgagaggaaggtcccccacattggaactgagacacggtccaaactcctacgggaggcagcagtgaggaatattggtcaatgggcgagagcctgaaccagccaagtagcgtgcaggatgacggccctatgggttgtaaactgcttttataagggaataaagtgagtctcgtgagactttttgcatgtaccttatgaataaggaccggctaattccgtgccagcagccgcggtaatacggaaggtccgggcgttatccggatttattgggtttaaagggagcgtaggccggagattaagcgtgttgtgaaatgtagatgctcaacatctgcactgcagcgcgaactggtttccttgagtacgcacaaagtgggcggaattcgtggtgtagcggtgaaatgcttagatatcacgaagaactccgattgcgaaggcagctcactggagcgcaactgacgctgaagctcgaaagtgcgggtatcgaacaggattagataccctggtagtccgcacggtaaacgatggatgcccgctgttggtctgaataggtcagcggccaagcgaaagcattaagcatcccacctggggagtacgccggcaacggtgaaactcaaaggaattgacgggggcccgcacaagcggaggaacatgtggtttaattcgatgatacgcgaggaaccttacccgggcttgaattgcagaggaaggatttggagacaatgacgcccttcggggtctctgtgaaggtgctgcatggttgtcgtcagctcgtgccgtgaggtgtcggcttaagtgccataacgagcgcaacccctctccttagttgccatcaggtcacgctgggcactctggggacactgccaccgtaaggtgtgaggaaggtggggatgacgtcaaatcagcacggcccttacgtccggggctacacacgtgttacaatggcaggtacagagagatggtgttctgcaaagcgcatctaatccttaaagcctgtctcagttcggactggggtctgcaacccgaccccacgaagctggattcgctagtaatcgcgcatcagccatggcgcggtgaatacgttcccgggccttgtacacaccgcccgtcaagccatgaaagccgggggcgcctaaagtccgtgaccgtaaggagcggcctagggcgaaactggtaattggggctaagtcgtaacaaggtagccgtaccggaaggtgcggctggaacacctccttt

SEQ ID NO: 678 - DNA, 1529 bp, artificial sequence
  >GCF_003437315.1_00866 Prevotella_copri
atggagagtttgatcctggctcaggatgaacgctagctacaggcttaacacatgcaagtcgaggggaaacgacatcgaaagcttgcttttgatgggcgtcgaccggcgcacgggtgagtaacgcgtatccaacctgcccaccacttggggataaccttgcgaaagtaagactaatacccaatgatatctctagaagacatctgaaagagattaaagatttatcggtgatggatggggatgcgtctgattagcttgttggcggggtaacggcccaccaaggcgacgatcagtaggggttctgagaggaaggtcccccacattggaactgagacacggtccaaactcctacgggaggcagcagtgaggaatattggtcaatggacgagagtctgaaccagccaagtagcgtgcaggatgacggccctatgggttgtaaactgcttttataagggaataaagtgagtctcgtgagactttttgcatgtaccttatgaataaggaccggctaattccgtgccagcagccgcggtaatacggaaggtccgggcgttatccggatttattgggtttaaagggagcgtaggccggagattaagcgtgttgtgaaatgtagacgctcaacgtctgcactgcagcgcgaactggtttccttgagtacgcacaaagtgggcggaattcgtggtgtagcggtgaaatgcttagatatcacgaagaactccgattgcgaaggcagctcactggagcgcaactgacgctgaagctcgaaagtgcgggtatcgaacaggattagataccctggtagtccgcacggtaaacgatggatgcccgctgttggtctgaataggtcagcggccaagcgaaagcattaagcatcccacctggggagtacgccggcaacggtgaaactcaaaggaattgacgggggcccgcacaagcggaggaacatgtggtttaattcgatgatacgcgaggaaccttacccgggcttgaattgcagaggaaggatttggagacaatgacgcccttcggggcctctgtgaaggtgctgcatggttgtcgtcagctcgtgccgtgaggtgtcggcttaagtgccataacgagcgcaacccctctccttagttgccatcaggtcaagctgggcactctggggacactgccaccgtaaggtgtgaggaaggtggggatgacgtcaaatcagcacggcccttacgtccggggctacacacgtgttacaatggcaggtacagagagatggtgttctgcaaagcgcatcaaatccttaaagcctgtctcagttcggactggggtctgcaacccgaccccacgaagctggattcgctagtaatcgcgcatcagccatggcgcggtgaatacgttcccgggccttgtacacaccgcccgtcaagccatgaaagccgggggcgcctaaagtccgtgaccgtaaggagcggcctagggcgaaactggtaattggggctaagtcgtaacaaggtagccgtaccggaaggtgcggctggaacacctccttt

SEQ ID NO: 679 - DNA, 1529 bp, artificial sequence
  >GCF_003438885.1_01787 Prevotella_copri
atggagagtttgatcctggctcaggatgaacgctagctacaggcttaacacatgcaagtcgaggggaaacgacatcgaaagcttgcttttgatgggcgtcgaccggcgcacgggtgagtaacgcgtatccaacctgcccaccacttggggataaccttgcgaaagtaagactaatacccaatgatatctctagaagacatctgaaagagattaaagatttatcggtgatggatggggatgcgtctgattagcttgttggcggggtaacggcccaccaaggcgacgatcagtaggggttctgagaggaaggtcccccacattggaactgagacacggtccaaactcctacgggaggcagcagtgaggaatattggtcaatgggcgagagcctgaaccagccaagtagcgtgcaggatgacggccctatgggttgtaaactgcttttataagggaataaagtgagtctcgtgagactttttgcatgtaccttatgaataaggaccggctaattccgtgccagcagccgcggtaatacggaaggtccgggcgttatccggatttattgggtttaaagggagcgtaggccggagattaagcgtgttgtgaaatgtagacgctcaacgtctgcactgcagcgcgaactggtttccttgagtacgcacaaagtgggcggaattcgtggtgtagcggtgaaatgcttagatatcacgaagaactccgattgcgaaggcagctcactggagcgcaactgacgctgaagctcgaaagtgcgggtatcgaacaggattagataccctggtagtccgcacggtaaacgatggatgcccgctgttggtctgaataggtcagcggccaagcgaaagcattaagcatcccacctggggagtacgccggcaacggtgaaactcaaaggaattgacgggggcccgcacaagcggaggaacatgtggtttaattcgatgatacgcgaggaaccttacccgggcttgaattgcagaggaaggatttggagacaatgacgcccttcggggcctctgtgaaggtgctgcatggttgtcgtcagctcgtgccgtgaggtgtcggcttaagtgccataacgagcgcaacccctctccttagttgccatcaggtcaagctgggcactctggggacactgccaccgtaaggtgtgaggaaggtggggatgacgtcaaatcagcacggcccttacgtccggggctacacacgtgttacaatggcaggtacagagagagggtccaatgcaaattggatcaaatccttaaagcctgtctcagttcggactggggtctgcaacccgaccccacgaagctggattcgctagtaatcgcgcatcagccatggcgcggtgaatacgttcccgggccttgtacacaccgcccgtcaagccatgaaagccgggggcgcctaaagtccgtgaccgtaaggagcggcctagggcgaaactggtaattggggctaagtcgtaacaaggtagccgtaccggaaggtgcggctggaacacctccttt

SEQ ID NO: 680 - DNA, 1529 bp, artificial sequence
  >GCF_003457655.1_02618 Prevotella_copri
atggagagtttgatcctggctcaggatgaacgctagctacaggcttaacacatgcaagtcgaggggaaacgacaacgaaagcttgcttttgatgggcgtcgaccggcgcacgggtgagtaacgcgtatccaacctgcccaccacttggggataaccttgcgaaagtaagactaatacccaatgatatctctagaagacatctgaaagagattaaagatttatcggtgatggatggggatgcgtctgattagcttgttggcggggtaacggcccaccaaggcgacgatcagtaggggttctgagaggaaggtcccccacattggaactgagacacggtccaaactcctacgggaggcagcagtgaggaatattggtcaatgggcgagagcctgaaccagccaagtagcgtgcaggatgacggccctatgggttgtaaactgcttttataagggaataaagtgagtctcgtgagactttttgcatgtaccttatgaataaggaccggctaattccgtgccagcagccgcggtaatacggaaggtccgggcgttatccggatttattgggtttaaagggagcgtaggccggagattaagcgtgttgtgaaatgtagacgctcaacgtctgcactgcagcgcgaactggtttccttgagtacgcacaaagtgggcggaattcgtggtgtagcggtgaaatgcttagatatcacgaagaactccgattgcgaaggcagctcactggagcgcaactgacgctgaagctcgaaagtgcgggtatcgaacaggattagataccctggtagtccgcacggtaaacgatggatgcccgctgttggtctgaataggtcagcggccaagcgaaagcattaagcatcccacctggggagtacgccggcaacggtgaaactcaaaggaattgacgggggcccgcacaagcggaggaacatgtggtttaattcgatgatacgcgaggaaccttacccgggcttgaattgcagaggaaggatttggagacaatgacgcccttcggggcctctgtgaaggtgctgcatggttgtcgtcagctcgtgccgtgaggtgtcggcttaagtgccataacgagcgcaacccctctccttagttgccatcaggtcaagctgggcactctggggacactgccaccgtaaggtgtgaggaaggtggggatgacgtcaaatcagcacggcccttacgtccggggctacacacgtgttacaatggcaggtacagagagacggtcccttgcaaattggatcaaatccttaaagcctgtctcagttcggactggggtctgcaacccgaccccacgaagctggattcgctagtaatcgcgcatcagccatggcgcggtgaatacgttcccgggccttgtacacaccgcccgtcaagccatgaaagccgggggcgcctaaagtccgtgaccgtaaggagcggcctagggcgaaactggtaattggggctaagtcgtaacaaggtagccgtaccggaaggtgcggctggaacacctccttt

SEQ ID NO: 681 - DNA, 1535 bp, artificial sequence
  >GCF_003459085.1_02409 Holdemania_filiformis
atggagagtttgatcctggctcaggatgaacgctggcggcgtgcctaatacatgcaagtcgaacgctttgtaaaggagcttgcttctttacagggagtggcgaacgggtgagtaatacataagcaatctgcccatcggcctgggataacagttggaaacgactgctaataccggataggtgattgagaggcatctctcgatcattaaagttgggatacaacacggatggatgagcttatggcgtattagctagtaggtgaggtaacggcccacctaggcgatgatacgtagccgacctgagagggtgaccggccacattgggactgagacacggcccaaactcctacgggaggcagcagtagggaattttcggcaatgggcgaaagcctgaccgagcaacgccgcgtgagtgaagaaggccttcgggttgtaaagctctgttgtgaaggaagaacggctcatacagggaatggtatgggagtgacggtactttaccagaaagccacggctaactacgtgccagcagccgcggtaatacgtaggtggcgagcgttatccggaattattgggcgtaaagggtgcgcaggcggtttgttaagtttaaggtgaaagcgtggggcttaaccccatatagccttagaaactgacagactagagtacaggagagggcaatggaattccatgtgtagcggtaaaatgcgtagatatatggaggaacaccagtggcgaaggcggttgcctggcctgtaactgacgctcatgcacgaaagcgtggggagcaaataggattagataccctagtagtccacgccgtaaacgatgagaactaagtgttggggaaactcagtgctgcagttaacgcaataagttctccgcctggggagtatgcacgcaagtgtgaaactcaaaggaattgacgggggcccgcacaagcggtggagtatgtggtttaattcgacgcaacgcgaagaaccttaccaggtcttgacatcccctgcaaagctatggagacatagtggaggttatcagggagacaggtggtgcatggttgtcgtcagctcgtgtcgtgagatgttgggttaagtcccgcaacgagcgcaacccttgtctttagttactaacattaagttgaggactctagagagactgccggtgacaaaccggaggaaggtggggatgacgtcaaatcatcatgccccttatgacctgggctacacacgtactacaatggcggatacaacgagaagcaagacagtgatgtggagcaaaactcagaaagtccgtctcagttcggattgaagtctgcaacccgacttcatgaagccggaatcgctagtaatcgcggatcagcatgccgcggtgaatacgttctcgggccttgtacacaccgcccgtcaaaccatgagagttggcaatacccgaagccggtggcctaacctcgcaagaggagggagccgtcgaaggtagggctgatgattggggttaagtcgtaacaaggtatccctacgggaacgtggggatggatcacctccttt

SEQ ID NO: 682 - DNA, 1529 bp, artificial sequence
  >GCF_003459205.1_00217 Prevotella_copri
atggagagtttgatcctggctcaggatgaacgctagctacaggcttaacacatgcaagtcgaggggaaacgatattggaagcttgcttccgataggcgtcgaccggcgcacgggtgagtaacgcgtatccaacctgcccaccacttggggataaccttgcgaaagtaagactaatacccaatgacgtctctagaagacatctgaaagggattaaagatttatcggtgatggatggggatgcgtctgattagcttgttggcggggtaacggcccaccaaggcgacgatcagtaggggttctgagaggaaggtcccccacattggaactgagacacggtccaaactcctacgggaggcagcagtgaggaatattggtcaatgggcgagagcctgaaccagccaagtagcgtgcaggaagacggccctatgggttgtaaactgcttttataagggaataaagtgagtctcgtgagactttttgcatgtaccttatgaataaggaccggctaattccgtgccagcagccgcggtaatacggaaggtccgggcgttatccggatttattgggtttaaagggagcgtaggccggagattaagcgtgttgtgaaatgtagacgctcaacgtctgcactgcagcgcgaactggtttccttgagtacgcacaaagtgggcggaattcgtggtgtagcggtgaaatgcttagatatcacgaagaactccgattgcgaaggcagctcactggagcgcaactgacgctgaagctcgaaagtgcgggtatcgaacaggattagataccctggtagtccgcacggtaaacgatggatgcccgctgttggtctgaacaggtcagcggccaagcgaaagcattaagcatcccacctggggagtacgccggcaacggtgaaactcaaaggaattgacgggggcccgcacaagcggaggaacatgtggtttaattcgatgatacgcgaggaaccttacccgggcttgaattgcagaggaaggatttggagacaatgacgcccctcggggcctctgtgaaggtgctgcatggttgtcgtcagctcgtgccgtgaggtgtcggcttaagtgccataacgagcgcaacccctctccttagttgccatcaggttaagctgggcactctggggacactgccaccgtaaggtgtgaggaaggtggggatgacgtcaaatcagcacggcccttacgtccggggctacacacgtgttacaatggcaggtacagagagacggtcccttgcagaacggatcaaatccttaaagcctgtctcagttcggactggggtctgcaacccgaccccacgaagctggattcgctagtaatcgcgcatcagccatggcgcggtgaatacgttcccgggccttgtacacaccgcccgtcaagccatgaaagccgggggcgcctaaagtccgtgaccgtaaggagcggcctagggcgaaactggtaattggggctaagtcgtaacaaggtagccgtaccggaaggtgcggctggaacacctccttt

SEQ ID NO: 683 - DNA, 1529 bp, artificial sequence
  >GCF_003461825.1_00821 Prevotella_copri
atggagagtttgatcctggctcaggatgaacgctagctacaggcttaacacatgcaagtcgaggggaaacgacatcgaaagcttgcttttgatgggcgtcgaccggcgcacgggtgagtaacgcgtatccaacctgcccaccacttggggataaccttgcgaaagtaagactaatacccaatgacatcccacgaaggcatccgaatgggattaaagatttatcggtgatggatggggatgcgtctgattagcttgttggcggggtaacggcccaccaaggcgacgatcagtaggggttctgagaggaaggtcccccacattggaactgagacacggtccaaactcctacgggaggcagcagtgaggaatattggtcaatgggcgagagcctgaaccagccaagtagcgtgcaggatgacggccctatgggttgtaaactgcttttataagggaataaagtgagtctcgtgagactttttgcatgtaccttatgaataaggaccggctaattccgtgccagcagccgcggtaatacggaaggtccgggcgttatccggatttattgggtttaaagggagcgtaggccggagattaagcgtgttgtgaaatgtagtggctcaacctctgcactgcagcgcgaactggtcttcttgagtacgcacaacgtgggcggaattcgtggtgtagcggtgaaatgcttagatatcacgaagaactccgattgcgaaggcagctcacgggagcgcaactgacgctgaagctcgaaagtgcgggtatcgaacaggattagataccctggtagtccgcacggtaaacgatggatgcccgctgttggcctgaataggtcagcggccaagcgaaagcattaagcatcccacctggggagtacgccggcaacggtgaaactcaaaggaattgacgggggcccgcacaagcggaggaacatgtggtttaattcgatgatacgcgaggaaccttacccgggcttgaattgcagaggaaggatttggagacaatgacgcccttcggggcctctgtgaaggtgctgcatggttgtcgtcagctcgtgccgtgaggtgtcggcttaagtgccataacgagcgcaacccctctccttagttgccatcaggtcaagctgggcactctggggacactgccaccgtaaggtgtgaggaaggtggggatgacgtcaaatcagcacggcccttacgtccggggctacacacgtgttacaatggcaggtacagagagacggtcctttgcaaaaaggatcaaatccttaaagcctgtctcagttcggactggggtctgcaacccgaccccacgaagctggattcgctagtaatcgcgcatcagccatggcgcggtgaatacgttcccgggccttgtacacaccgcccgtcaagccatgaaagccgggggcgcctgaagtccgtgaccgtaaggagcggcctagggcgaaactggtaattggggctaagtcgtaacaaggtagccgtaccggaaggtgcggctggaacacctccttt

SEQ ID NO: 684 - DNA, 1529 bp, artificial sequence
  >GCF_003463005.1_00928 Prevotella_copri
atggagagtttgatcctggctcaggatgaacgctagctacaggcttaacacatgcaagtcgaggggaaacgacatcgaaagcttgcttttgatgggcgtcgaccggcgcacgggtgagtaacgcgtatccaacctgcccaccacttggggataaccttgcgaaagtaagactaatacccaatgatatctctagaagacatctgaaggagattaaagatttatcggtgatggatggggatgcgtctgattagcttgttggcggggtaacggcccaccaaggcgacgatcagtaggggttctgagaggaaggtcccccacattggaactgagacacggtccaaactcctacgggaggcagcagtgaggaatattggtcaatggacgagagtctgaaccagccaagtagcgtgcaggatgacggccctatgggttgtaaactgcttttataagggaataaagtgagagtcgtgactctttttgcatgtaccttatgaataaggaccggctaattccgtgccagcagccgcggtaatacggaaggtccgggcgttatccggatttattgggtttaaagggagcgtaggccggagattaagcgtgttgtgaaatgtagacgctcaacgtctgcactgcagcgcgaactggtttccttgagtacgcacaaagtgggcggaattcgtggtgtagcggtgaaatgcttagatatcacgaagaactccgattgcgaaggcagctcactggagcgcaactgacgctgaagctcgaaagtgcgggtatcgaacaggattagataccctggtagtccgcacggtaaacgatggatgcccgctgttggtctgaataggtcagcggccaagcgaaagcattaagcatcccacctggggagtacgccggcaacggtgaaactcaaaggaattgacgggggcccgcacaagcggaggaacatgtggtttaattcgatgatacgcgaggaaccttacccgggcttgaattgcagaggaaggatttggagacaatgacgcccttcggggtctctgtgaaggtgctgcatggttgtcgtcagctcgtgccgtgaggtgtcggcttaagtgccataacgagcgcaacccctctccttagttgccatcaggtcaagctgggcactctggggacactgccaccgtaaggtgtgaggaaggtggggatgacgtcaaatcagcacggcccttacgtccggggctacacacgtgttacaatggcaggtacagagagatggtgttctgcaaagcgcatctaatccttaaagcctgtctcagttcggactggggtctgcaacccgaccccacgaagctggattcgctagtaatcgcgcatcagccatggcgcggtgaatacgttcccgggccttgtacacaccgcccgtcaagccatgaaagccgggggcgcctaaagtccgtgaccgtaaggagcggcctagggcgaaactggtaattggggctaagtcgtaacaaggtagccgtaccggaaggtgcggctggaacacctccttt

SEQ ID NO: 685 - DNA, 1253 bp, artificial sequence
  >GCF_003464975.1_01328 Prevotella_copri
atggagagtttgatcctggctcaggatgaacgctagctacaggcttaacacatgcaagtcgaggggaaacgacattgaaagcttgcttttgatgggcgtcgaccggcgcacgggtgagtaacgcgtatccaacctgcccaccacttggggataaccttgcgaaagtaagactaatacccaatgacgtctctagaagacatctgaaagagattaaagatttatcggtgatggatggggatgcgtctgattagcttgttggcggggtaacggcccaccaaggcgacgatcagtaggggttctgagaggaaggtcccccacattggaactgagacacggtccaaactcctacgggaggcagcagtgaggaatattggtcaatggacgagagtctgaaccagccaagtagcgtgcaggatgacggccctatgggttgtaaactgcttttataagggaataaagtgagtctcgtgagactttttgcatgtaccttatgaataaggaccggctaattccgtgccagcagccgcggtaatacggaaggtccgggcgttatccggatttattgggtttaaagggagcgtaggccggagattaagcgtgttgtgaaatgtagacgctcaacgtctgcactgcagcgcgaactggtttccttgagtacgcacaaagtgggcggaattcgtggtgtagcggtgaaatgcttagatatcacgaagaactccgattgcgaaggcagctcactggagcgcaactgacgctgaagctcgaaagtgcgggtatcgaacaggattagataccctggtagtccgcacggtaaacgatggatgcccgctgttggtctgaataggtcagcggccaagcgaaagcattaagcatcccacctggggagtacgccggcaacggtgaaactcaaaggaattgacgggggcccgcacaagcggaggaacatgtggtttaattcgatgatacgcgaggaaccttacccgggcttgaattgcagaggaaggatttggagacaatgacgcccttcggggcctctgtgaaggtgctgcatggttgtcgtcagctcgtgccgtgaggtgtcggcttaagtgccataacgagcgcaacccctctccttagttgccatcaggtcaagctgggcactctggggacactgccaccgtaaggtgtgaggaaggtggggatgacgtcaaatcagcacggcccttacgtccggggctacacacgtgttacaatggcaggtacagagagat

SEQ ID NO: 686 - DNA, 1529 bp, artificial sequence
  >GCF_003465445.1_02633 Prevotella_copri
atggagagtttgatcctggctcaggatgaacgctagctacaggcttaacacatgcaagtcgaggggaaacgacatcgaaagcttgcttttgatgggcgtcgaccggcgcacgggtgagtaacgcgtatccaacctgcccatcacttggggataaccttgcgaaagtaagactaatacccaatgacgtctctagaagacatctgaaagagattaaagatttatcggtgatggatggggatgcgtctgattagcttgttggcggggtaacggcccaccaaggcgacgatcagtaggggttctgagaggaaggtcccccacattggaactgagacacggtccaaactcctacgggaggcagcagtgaggaatattggtcaatggacgagagtctgaaccagccaagtagcgtgcaggatgacggccctatgggttgtaaactgcttttataagggaataaagtgagtctcgtgagactttttgcatgtaccttatgaataaggaccggctaattccgtgccagcagccgcggtaatacggaaggtccgggcgttatccggatttattgggtttaaagggagcgtaggccggagattaagcgtgttgtgaaatgtagacgctcaacgtctgcactgcagcgcgaactggtttccttgagtacgcacaaagtgggcggaattcgtggtgtagcggtgaaatgcttagatatcacgaagaactccgattgcgaaggcagctcactggagcgcaactgacgctgaagctcgaaagtgcgggtatcgaacaggattagataccctggtagtccgcacggtaaacgatggatgcccgctgttggtctgaataggtcagcggccaagcgaaagcattaagcatcccacctggggagtacgccggcaacggtgaaactcaaaggaattgacgggggcccgcacaagcggaggaacatgtggtttaattcgatgatacgcgaggaaccttacccgggcttgaattgcagaggaaggatttggagacaatgacgcccttcggggcctctgtgaaggtgctgcatggttgtcgtcagctcgtgccgtgaggtgtcggcttaagtgccataacgagcgcaacccctctccttagttgccatcaggtcaagctgggcactctggggacactgccaccgtaaggtgtgaggaaggtggggatgacgtcaaatcagcacggcccttacgtccggggctacacacgtgttacaatggcaggtacagggagatggtcccttgcaaaatggatcaaatccttaaagcctgtctcagttcggactggggtctgcaacccgaccccacgaagctggattcgctagtaatcgcgcatcagccatggcgcggtgaatacgttcccgggccttgtacacaccgcccgtcaagccatgaaagccgggggcgcctaaagtccgtgaccgtaaggagcggcctagggcgaaactggtaattggggctaagtcgtaacaaggtagccgtaccggaaggtgcggctggaacacctccttt

SEQ ID NO: 687 - DNA, 1557 bp, artificial sequence
  >GCF_003465495.1_00003 Prevotella_copri
  misc_feature (113)..(122): n is a, c, g, or t
atggagagtttgatcctggctcaggatgaacgctagctacaggcttaacacatgcaagtcgaggggaaacgacatcgaaagcttgcttttgatgggcgtcgaccggcgcacgnnnnnnnnnnggcgtcgaccggcgcacgggtgagtaacgcgtatccaacctgcccatcacttggggataaccttgcgaaagtaagactaatacccaatgatatctctagaagacatctgaaggagattaaagatttatcggtgatggatggggatgcgtctgattagcttgttggcggggtaacggcccaccaaggcgacgatcagtaggggttctgagaggaaggtcccccacattggaactgagacacggtccaaactcctacgggaggcagcagtgaggaatattggtcaatggacgagagtctgaaccagccaagtagcgtgcaggatgacggccctatgggttgtaaactgcttttataagggaataaagtgagtctcgtgaggctttttgcatgtaccttatgaataaggaccggctaattccgtgccagcagccgcggtaatacggaaggtccgggcgttatccggatttattgggtttaaagggagcgtaggccggagattaagcgtgttgtgaaatgtagacgctcaacgtctgcactgcagcgcgaactggtttccttgagtacgcacaaagtgggcggaattcgtggtgtagcggtgaaatgcttagatatcacgaagaactccgattgcgaaggcagctcactggagcgcaactgacgctgaagctcgaaagtgcgggtatcgaacaggattagataccctggtagtccgcacggtaaacgatggatgcccgctgttggtctgaataggtcagcggccaagcgaaagcattaagcatcccacctggggagtacgccggcaacggtgaaactcaaaggaattgacgggggcccgcacaagcggaggaacatgtggtttaattcgatgatacgcgaggaaccttacccgggcttgaattgcagaggaaggatttggagacaatgacgcccttcggggcctctgtgaaggtgctgcatggttgtcgtcagctcgtgccgtgaggtgtcggcttaagtgccataacgagcgcaacccctctccttagttgccatcaggttaagctgggcactctggggacactgccaccgtaaggtgtgaggaaggtggggatgacgtcaaatcagcacggcccttacgtccggggctacacacgtgttacaatggcaggtacagagagacggtcccttgcaaaatggatcaaatccttaaagcctgtctcagttcggactggggtctgcaacccgaccccacgaagctggattcgctagtaatcgcgcatcagccatggcgcggtgaatacgttcccgggccttgtacacaccgcccgtcaagccatgaaagccgggggcgcctaaagtccgtgaccgtaaggagcggcctagggcgaaactggtaattggggctaagtcgtaacaaggtagccgtaccggaaggtgcggctggaacacctccttt

SEQ ID NO: 688 - DNA, 1224 bp, artificial sequence
  >GCF_003466185.1_02008 Anaerobutyricum_hallii
taataccgcataagcgcacgaggggacatctccttgtgtgaaaaactccggtggtacaggatgggcccgcgtctgattagctggttggcagggtaacggcctaccaaggcaacgatcagtagccggtctgagaggatgaacggccacattggaactgagacacggtccaaactcctacgggaggcagcagtggggaatattgcacaatgggggaaaccctgatgcagcaacgccgcgtgagtgaagaagtatttcggtatgtaaagctctatcagcagggaagataatgacggtacctgactaagaagctccggctaaatacgtgccagcagccgcggtaatacgtatggagcaagcgttatccggatttactgggtgtaaagggtgcgtaggtggcagtgcaagtcagatgtgaaaggccggggctcaaccccggagctgcatttgaaactgctcggctagagtacaggagaggcaggcggaattcctagtgtagcggtgaaatgcgtagatattaggaggaacaccagtggcgaaggcggcctgctggactgttactgacactgaggcacgaaagcgtggggagcaaacaggattagataccctggtagtccacgccgtaaacgatgaatactaggtgtcggggccgtataggctccggtgccgccgctaacgcagtaagtattccacctggggagtacgttcgcaagaatgaaactcaaaggaattgacggggacccgcacaagcggtggagcatgtggtttaattcgaagcaacgcgaagaaccttaccaggtcttgacatccttctgaccgcaccttaatcggtgctttccttcgggacagaagagacaggtggtgcatggttgtcgtcagctcgtgtcgtgagatgttgggttaagtcccgcaacgagcgcaacccctatcttcagtagccagcaggtaaggctgggcactctggagagactgccagggataacctggaggaaggtggggacgacgtcaaatcatcatgccccttatgatctgggcgacacacgtgctacaatggcggtcacagagtgaggcgaacccgcgagggggagcaaaccacaaaaaggccgtcccagttcggactgtagtctgcaacccgactacacgaagctggaatcgctagtaatcgcgaatcagaatgtcgcggtgaatacgttcccgggtcttgtacacaccgcccgtcacaccatg

SEQ ID NO: 689 - DNA, 1529 bp, artificial sequence
  >GCF_003467935.1_01823 Prevotella_copri
atggagagtttgatcctggctcaggatgaacgctagctacaggcttaacacatgcaagtcgaggggaaacgacatcgaaagcttgcttttgatgggcgtcgaccggcgcacgggtgagtaacgcgtatccaacctgcccatcacttggggataaccttgcgaaagtaagactaatacccaatgacgtctctagaagacatctgaaagagattaaagatttatcggtgatggatggggatgcgtctgattagcttgttggcggggtaacggcccaccaaggcgacgatcagtaggggttctgagaggaaggtcccccacattggaactgagacacggtccaaactcctacgggaggcagcagtgaggaatattggtcaatggacgagagtctgaaccagccaagtagcgtgcaggatgacggccctatgggttgtaaactgcttttataagggaataaagtgagtctcgtgagactttttgcatgtaccttatgaataaggaccggctaattccgtgccagcagccgcggtaatacggaaggtccgggcgttatccggatttattgggtttaaagggagcgtaggccggagattaagcgtgttgtgaaatgtagacgctcaacgtctgcactgcagcgcgaactggtttccttgagtacgcacaaagtgggcggaattcgtggtgtagcggtgaaatgcttagatatcacgaagaactccgattgcgaaggcagctcactggagcgcaactgacgctgaagctcgaaagtgcgggtatcgaacaggattagataccctggtagtccgcacggtaaacgatggatgcccgctgttggtctgaataggtcagcggccaagcgaaagcattaagcatcccacctggggagtacgccggcaacggtgaaactcaaaggaattgacgggggcccgcacaagcggaggaacatgtggtttaattcgatgatacgcgaggaaccttacccgggcttgaattgcagaggaaggatttggagacaatgacgcccttcggggcctctgtgaaggtgctgcatggttgtcgtcagctcgtgccgtgaggtgtcggcttaagtgccataacgagcgcaacccctctccttagttgccatcaggttaagctgggcactctggggacactgccaccgtaaggtgtgaggaaggtggggatgacgtcaaatcagcacggcccttacgtccggggctacacacgtgttacaatggcaggtacagagagatggtcccttgcaaaatggatcaaatccttaaagcctgtctcagttcggactggggtctgcaacccgaccccacgaagctggattcgctagtaatcgcgcatcagccatggcgcggtgaatacgttcccgggccttgtacacaccgcccgtcaagccatgaaagccgggggcgcctaaagtccgtgaccgtaaggagcggcctagggcgaaactggtaattggggctaagtcgtaacaaggtagccgtaccggaaggtgcggctggaacacctccttt

SEQ ID NO: 690 - DNA, 1529 bp, artificial sequence
  >GCF_003468475.1_00277 Anaerobutyricum_hallii
atttgagagtttgatcctggctcaggatgaacgctggcggcgtgcctaacacatgcaagtcgaacgaagcaccttttaagattcttcggatgattgactggtgactgagtggcggacgggtgagtaacgcgtgggtaacctgccctgtacagggggataacagctggaaacggctgctaataccgcataagcgcacgaggagacatctccttgtgtgaaaaactccggtggtacaggatgggcccgcgtctgattagctggttggcagggtaacggcctaccaaggcaacgatcagtagccggtctgagaggatgaacggccacattggaactgagacacggtccaaactcctacgggaggcagcagtggggaatattgcacaatgggggaaaccctgatgcagcaacgccgcgtgagtgaagaagtatttcggtatgtaaagctctatcagcagggaagataatgacggtacctgactaagaagctccggctaaatacgtgccagcagccgcggtaatacgtatggagcaagcgttatccggatttactgggtgtaaagggtgcgtaggtggcagtgcaagtcagatgtgaaaggccggggctcaaccccggagctgcatttgaaactgcatagctagagtacaggagaggcaggcggaattcctagtgtagcggtgaaatgcgtagatattaggaggaacaccagtggcgaaggcggcctgctggactgttactgacactgaggcacgaaagcgtggggagcaaacaggattagataccctggtagtccacgccgtaaacgatgaatactaggtgtcggggccgtataggcttcggtgccgccgctaacgcagtaagtattccacctggggagtacgttcgcaagaatgaaactcaaaggaattgacggggacccgcacaagcggtggagcatgtggtttaattcgaagcaacgcgaagaaccttaccaggtcttgacatccttctgaccactccgtaatgggagtcttccttcgggacagaagagacaggtggtgcatggttgtcgtcagctcgtgtcgtgagatgttgggttaagtcccgcaacgagcgcaacccctatcttcagtagccagcaggtaaggctgggcactctggagagactgccagggataacctggaggaaggtggggacgacgtcaaatcatcatgccccttatgatctgggcgacacacgtgctacaatggcggtcacagagtgaggcgaacccgcgagggggagcaaaccacaaaaaggccgtcccagttcggactgtagtctgcaacccgactacacgaagctggaatcgctagtaatcgcgaatcagaatgtcgcggtgaatacgttcccgggtcttgtacacaccgcccgtcacaccatgggagtcggaaatgcccgaagccagtgacccaacctttatggagggagctgtcgaaggtggagccggtaactggggtgaagtcgtaacaaggtagccgtatcggaaggtgcggctggatcacctccttt

SEQ ID NO: 691 - DNA, 1528 bp, artificial sequence; identical to SEQ ID NO: 80
  >GCF_003468945.1_00476 Blautia_wexlerae

SEQ ID NO: 692 - DNA, 1529 bp, artificial sequence
  >GCF_003471085.1_02308 Prevotella_copri
atggagagtttgatcctggctcaggatgaacgctagctacaggcttaacacatgcaagtcgaggggaaacgatattggaagcttgcttccgataggcgtcgaccggcgcacgggtgagtaacgcgtatccaacctgcccatcacttggggataaccttgcgaaagtaagactaatacccaatgacgtctctagaagacatctgaaagagattaaagatttatcggtgatggatggggatgcgtctgattagcttgttggcggggtaacggcccaccaaggcgacgatcagtaggggttctgagaggaaggtcccccacattggaactgagacacggtccaaactcctacgggaggcagcagtgaggaatattggtcaatggacgagagtctgaaccagccaagtagcgtgcaggaagacggccctatgggttgtaaactgcttttataagggaataaagtgagtctcgtgagactttttgcatgtaccttatgaataaggaccggctaattccgtgccagcagccgcggtaatacggaaggtccgggcgttatccggatttattgggtttaaagggagcgtaggccggagattaagcgtgttgtgaaatgtagacgctcaacgtctgcactgcagcgcgaactggtttccttgagtacgcacaaagtgggcggaattcgtggtgtagcggtgaaatgcttagatatcacgaagaactccgattgcgaaggcagctcactggagcgcaactgacgctgaagctcgaaagtgcgggtatcgaacaggattagataccctggtagtccgcacggtaaacgatggatgcccgctgttggtctgaacaggtcagcggccaagcgaaagcattaagcatcccacctggggagtacgccggcaacggtgaaactcaaaggaattgacgggggcccgcacaagcggaggaacatgtggtttaattcgatgatacgcgaggaaccttacccgggcttgaattgcagaggaaggatttggagacaatgacgcccttcggggcctctgtgaaggtgctgcatggttgtcgtcagctcgtgccgtgaggtgtcggcttaagtgccataacgagcgcaacccctctccttagttgccatcaggttaagctgggcactctggggacactgccaccgtaaggtgtgaggaaggtggggatgacgtcaaatcagcacggcccttacgtccggggctacacacgtgttacaatggcaggtacagagagacggttcaatgcaaattggatcaaatccttaaagcctgtctcagttcggactggggtctgcaacccgaccccacgaagctggattcgctagtaatcgcgcatcagccatggcgcggtgaatacgttcccgggccttgtacacaccgcccgtcaagccatgaaagccgggggcgcctaaagtccgtgaccgtaaggagcggcctagggcgaaactggtaattggggctaagtcgtaacaaggtagccgtaccggaaggtgcggctggaacacctccttt

SEQ ID NO: 693 - DNA, 1527 bp, artificial sequence; identical to SEQ ID NO: 82
  >GCF_003471165.1_01096 Blautia_wexlerae

SEQ ID NO: 694 - DNA, 1529 bp, artificial sequence
  >GCF_003471795.1_00433 Prevotella_copri
atggagagtttgatcctggctcaggatgaccgctagctacaggcttaacacatgcaagtcgagggggaacgacatcgaaagcttgcttttgatgggcgtcgaccggcgcacgggggagtaacgcgtatccaacctgcccatcacttggggataaccttgcgaaagtaagactaatacccaatgacgtctctagaagacatctgaaagagattaaagatttatcggtgatggatggggatgcgtctgattagcttgttggcggggtaacggcccaccaaggcaacgatcagtaggggttctgagaggaaggtcccccacattggaactgagacacggtccaaactcctacgggaggcagcagtgaggaatattggtcaatggacgagagtctgaaccagccaagtagcgtgcaggaagacggccctatgggttgtaaactgcttttataagggaataaagtgagcctcgtgaggctttttgcatgtaccttatgaataaggaccggctaattccgtgccagcagccgcggtaatacggaaggtccgggcgttatccggatttattgggtttaaagggagcgtaggccggagattaagcgtgttgtgaaatgtagatgctcaacgtctgcactgcagcgcgaactggtttccttgagtacgcacaaagtgggcggaattcgtggtgtagcggtgaaatgcttagatatcacgaagaactccgattgcgaaggcagctcactggagcgcaactgacgctgaagctcgaaagtgcgggtatcgaacaggattagataccctggtagtccgcacggtaaacgatggatgcccgctgttggtctgaataggtcagcggccaagcgaaagcattaagcatcccacctggggagtacgccggcaacggtgaaactcaaaggaattgacgggggcccgcacaagcggaggaacatgtggtttaattcgatgatacgcgaggaaccttacccgggcttgaattgcagaggaaggatttggagacaatgacgcccttcggggcctctgtgaaggtgctgcatggttgtcgtcagctcgtgccgtgaggtgtcggcttaagtgccataacgagcgcaacccctctccttagttgccatcaggttaagctgggcactctggggacactgccaccgtaaggtgtgaggaaggtggggatgacgtcaaatcagcacggcccttacgtccggggctacacacgtgttacaatggcaggtacagagagacggtcccttgcaaaacggatcaaatccttaaagcctgtctcagttcggactggggtctgcaacccgaccccacgaagctggattcgctagtaatcgcgcatcagccatggcgcggtgaatacgttcccgggccttgtacacaccgcccgtcaagccatgaaagccgggggcgcctaaagtccgtgaccgtaaggagcggcctagggcgaaactggtaattggggctaagtcgtaacaaggtagccgtaccggaaggtgcggctggaacacctccttt

SEQ ID NO: 695 - DNA, 1318 bp, artificial sequence
  >GCF_003472885.1_00849 Prevotella_copri
taaagatttatcggtgatggatggggatgcgtctgattagcttgttggcggggtaacggcccaccaaggctacgatcagtaggggttctgagaggaaggtcccccacattggaactgagacacggtccaaactcctacgggaggcagcagtgaggaatattggtcaatggacgagagtctgaaccagccaagtagcgtgcaggatgacggccctatgggttgtaaactgcttttataagggaataaagtgagtctcgtgagactttttgcatgtaccttatgaataaggaccggctaattccgtgccagcagccgcggtaatacggaaggtccgggcgttatccggatttattgggtttaaagggagcgtaggccggagattaagcgtgttgtgaaatgtagacgctcaacgtctgcactgcagcgcgaactggtttccttgagtacgcacaaagtgggcggaattcgtggtgtagcggtgaaatgcttagatatcacgaagaactccgattgcgaaggcagctcactggagcgcaactgacgctgaagctcgaaagtgcgggtatcgaacaggattagataccctggtagtccgcacggtaaacgatggatgcccgctgttggtctgaataggtcagcggccaagcgaaagcattaagcatcccacctggggagtacgccggcaacggtgaaactcaaaggaattgacgggggcccgcacaagcggaggaacatgtggtttaattcgatgatacgcgaggaaccttacccgggcttgaattgcagaggaaggatttggagacaatgacgcccttcggggcctctgtgaaggtgctgcatggttgtcgtcagctcgtgccgtgaggtgtcggcttaagtgccataacgagcgcaacccctctccttagttgccatcaggtcaagctgggcactctggggacactgccaccgtaaggtgtgaggaaggtggggatgacgtcaaatcagcacggcccttacgtccggggctacacacgtgttacaatggcaggtacagagagatggtgttctgcaaagcgcatcaaatccttaaagcctgtctcagttcggactggggtctgcaacccgaccccacgaagctggattcgctagtaatcgcgcatcagccatggcgcggtgaatacgttcccgggccttgtacacaccgcccgtcaagccatgaaagccgggggcgcctaaagtccgtgaccgtaaggagcggcctagggcgaaactggtaattggggctaagtcgtaacaaggtagccgtaccggaaggtgcggctggaacacctccttt

SEQ ID NO: 696 - DNA, 1527 bp, artificial sequence; identical to SEQ ID NO: 83
  >GCF_003473325.1_02611 Blautia_wexlerae

SEQ ID NO: 697 - DNA, 1246 bp, artificial sequence; identical to SEQ ID NO: 84
  >GCF_003473495.1_02487 Blautia_wexlerae

SEQ ID NO: 698 - DNA, 1385 bp, artificial sequence
  >GCF_003473645.1_01301 Prevotella_copri
ttggggataaccttgcgaaagtaagactaatacccaatgatatctcaagaagacatctgaatgagattaaagatttatcggtgatggatggggatgcgtctgattagcttgttggcggggtaacggcccaccaaggcgacgatcagtaggggttctgagaggaaggtcccccacattggaactgagacacggtccaaactcctacgggaggcagcagtgaggaatattggtcaatgggcgagagcctgaaccagccaagtagcgtgcaggatgacggccctatgggttgtaaactgcttttataagggaataaagtgagtctcgtgagactttttgcatgtaccttatgaataaggaccggctaattccgtgccagcagccgcggtaatacggaaggtccgggcgttatccggatttattgggtttaaagggagcgtaggccggagattaagcgtgttgtgaaatgtagatgctcaacatctgcactgcagcgcgaactggtttccttgagtacgcacaaagtgggcggaattcgtggtgtagcggtgaaatgcttagatatcacgaagaactccgattgcgaaggcagctcactggagcgcaactgacgctgaagctcgaaagtgcgggtatcgaacaggattagataccctggtagtccgcacggtaaacgatggatgcccgctgttggtctgaataggtcagcggccaagcgaaagcattaagcatcccacctggggagtacgccggcaacggtgaaactcaaaggaattgacgggggcccgcacaagcggaggaacatgtggtttaattcgatgatacgcgaggaaccttacccgggcttgaattgcagaggaaggatttggagacaatgacgcccttcggggtctctgtgaaggtgctgcatggttgtcgtcagctcgtgccgtgaggtgtcggcttaagtgccataacgagcgcaacccctctccttagttgccatcaggttaagctgggcactctggggacactgccaccgtaaggtgtgaggaaggtggggatgacgtcaaatcagcacggcccttacgtccggggctacacacgtgttacaatggcaggtacagagagatggtgttctgcaaagcgcatctaatccttaaagcctgtctcagttcggactggggtctgcaacccgaccccacgaagctggattcgctagtaatcgcgcatcagccatggcgcggtgaatacgttcccgggccttgtacacaccgcccgtcaagccatgaaagccgggggcgcctaaagtccgtgaccgtaaggagcggcctagggcgaaactggtaattggggctaagtcgtaacaaggtagccgtaccggaaggtgcggctggaacacctccttt

SEQ ID NO: 699 - DNA, 985 bp, artificial sequence; identical to SEQ ID NO: 86
  >GCF_003473745.1_02291 Blautia_wexlerae
  misc_feature (984)..(985): n is a, c, g, or t

SEQ ID NO: 700 - DNA, 1267 bp, artificial sequence; identical to SEQ ID NO: 87
  >GCF_003473905.1_03513 Blautia_wexlerae

SEQ ID NO: 701 - DNA, 795 bp, artificial sequence
  >GCF_003473935.1_00968 Prevotella_copri
atggagagtttgatcctggctcaggatgaacgctagctacaggcttaacacatgcaagtcgaggggaaacgacatcgaaagcttgcttttgatgggcgtcgaccggcgcacgggtgagtaacgcgtatccaacctgcccaccacttggggataaccttgcgaaagtaagactaatacccaatgacgtctctagaagacatctgaaagggattaaagatttatcggtgatggatggggatgcgtctgattagcttgttggcggggtaacggcccaccaaggcgacgatcagtaggggttctgagaggaaggtcccccacattggaactgagacacggtccaaactcctacgggaggcagcagtgaggaatattggtcaatggacgagagtctgaaccagccaagtagcgtgcaggaagacggccctatgggttgtaaactgcttttataagggaataaagtgagtctcgtgagactttttgcatgtaccttatgaataaggaccggctaattccgtgccagcagccgcggtaatacggaaggtccgggcgttatccggatttattgggtttaaagggagcgtaggccggagattaagcgtgttgtgaaatgtagacgctcaacgtctgcactgcagcgcgaactggtttccttgagtacgcacaaagtgggcggaattcgtggtgtagcggtgaaatgcttagatatcacgaagaactccgattgcgaaggcagctcactggagcgcaactgacgctgaagctcgaaagtgcgggtatcgaacaggattagatacc

SEQ ID NO: 702 - DNA, 848 bp, artificial sequence; identical to SEQ ID NO: 89
  >GCF_003474665.1_01073 Blautia_wexlerae
  misc_feature (1)..(1): n is a, c, g, or t

SEQ ID NO: 703 - DNA, 1528 bp, artificial sequence
  >GCF_003475545.1_00270 Anaerobutyricum_hallii
atttgagagtttgatcctggctcaggatgaacgctggcggcgtgcctaacacatgcaagtcgaacgaagcaccttttgagattcttcggatgatcgattggtgactgagtggcggacgggtgagtaacgcgtgggtaacctgccctgtacagggggataacagctggaaacggctgctaataccgcataagcgcacgaggagacatctccttgtgtgaaaaactccggtggtacaggatgggcccgcgtctgattagctggttggcagggtaacggcctaccaaggcaacgatcagtagccggtctgagaggatgaacggccacattggaactgagacacggtccaaactcctacgggaggcagcagtggggaatattgcacaatgggggaaaccctgatgcagcaacgccgcgtgagtgaagaagtatttcggtatgtaaagctctatcagcagggaagataatgacggtacctgactaagaagctccggctaaatacgtgccagcagccgcggtaatacgtatggagcaagcgttatccggatttactgggtgtaaagggtgcgtaggtggcagtgcaagtcagatgtgaaaggccggggctcaaccccggagctgcatttgaaactgctcggctagagtacaggagaggcaggcggaattcctagtgtagcggtgaaatgcgtagatattaggaggaacaccagtggcgaaggcggcctgctggactgttactgacactgaggcacgaaagcgtggggagcaaacaggattagataccctggtagtccacgccgtaaacgatgaatactaggtgtcggggccgtataggcttcggtgccgccgctaacgcagtaagtattccacctggggagtacgttcgcaagaatgaaactcaaaggaattgacggggacccgcacaagcggtggagcatgtggtttaattcgaagcaacgcgaagaaccttaccaggtcttgacatccttctgaccgcaccttaatcggtgccttccttcgggacagaagagacaggtggtgcatggttgtcgtcagctcgtgtcgtgagatgttgggttaagtcccgcaacgagcgcaacccctatcttcagtagccagcaggtaaggctgggcactctggagagactgccagggataacctggaggaaggtggggacgacgtcaaatcatcatgccccttatgatctgggcgacacacgtgctacaatggcggtcacagagtgaggcgaacccgcgagggggagcaaaccacaaaaaggccgtcccagttcggactgtagtctgcaacccgactacacgaagctggaatcgctagtaatcgcgaatcagaatgtcgcggtgaatacgttcccgggtcttgtacacaccgcccgtcacaccatgggagtcggaaatgcccgaagccagtgacccaaccttttggagggagctgtcgaaggtggagccggtaactggggtgaagtcgtaacaaggtagccgtatcggaaggtgcggctggatcacctccttt

SEQ ID NO: 704 - DNA, 1141 bp, artificial sequence; identical to SEQ ID NO: 91
  >GCF_003477525.1_00491 Blautia_wexlerae

SEQ ID NO: 705 - DNA, 1247 bp, artificial sequence; identical to SEQ ID NO: 92
  >GCF_003477585.1_03286 Blautia_wexlerae

SEQ ID NO: 706 - DNA, 1432 bp, artificial sequence; identical to SEQ ID NO: 93
  >GCF_003477985.1_02417 Blautia_wexlerae

SEQ ID NO: 707 - DNA, 1499 bp, artificial sequence
  >GCF_003478095.1_02630 Acetatifactor_sp1
ggctcaggatgaacgctggcggcgtgcctaacacatgcaagtcgaacggacttacattgaagcctagcgatatgtaagttagtggcggacgggtgagtaacgcgtgggtaacctgccttgtactgggggacaacagttggaaacgactgctaataccgcataagcgcacagcttcgcatgaagcagtgtgaaaaactccggtggtacaagatggacccgcgtctgattagctggttggtgaggtaacggcccaccaaggcgacgatcagtagccggcctgagagggtgaacggccacattgggactgagacacggcccaaactcctacgggaggcagcagtggggaatattgcacaatgggggaaaccctgatgcagcaacgccgcgtgagtgaagaagtatttcggtatgtaaagctctatcagcaggaaagaaaatgacggtacctgactaagaagccccggctaactacgtgccagcagccgcggtaatacgtagggggcaagcgttatccggatttactgggtgtaaagggagcgtagacggttttgcaagtctgaagtgaaagcccggggcttaaccccgggactgctttggaaactgtagaactagagtgcaggagaggtaagtggaattcctagtgtagcggtgaaatgcgtagatattaggaggaacaccagtggcgaaggcggcttactggactgtaactgacgttgaggctcgaaagcgtggggagcaaacaggattagataccctggtagtccacgccgtaaacgatgattactaggtgttggtgggtacgacccatcggtgccgcagcaaacgcaataagtaatccacctggggagtacgttcgcaagaatgaaactcaaaggaattgacggggacccgcacaagcggtggagcatgtggtttaattcgaagcaacgcgaagaaccttacctggtcttgacatccctatgaataacgggcaatgccgttagtacttcggtacataggagacaggtggtgcatggttgtcgtcagctcgtgtcgtgagatgttgggttaagtcccgcaacgagcgcaacccttatctttagtagccagcagtaagatgggcactctagagagactgccggggataacccggaggaaggtggggatgacgtcaaatcatcatgccccttatgaccagggctacacacgtgctacaatggcgtaaacaaagagaagcgaagtcgtgaggcagagcgaatctcaaaaataacgtctcagttcggattgtagtctgcaactcgactacatgaagctggaatcgctagtaatcgcagatcagaatgctgcggtgaatacgttcccgggtcttgtacacaccgcccgtcacaccatgggagtcggaaatgcccgaagtcggtgacctaaccgcaaggaaggagccgccgaaggcaggtctgataactggggtgaagtcgtaacaaggtagccgtatcggaaggtgcggctggatcacctccttt

SEQ ID NO: 708 - DNA, 1514 bp, artificial sequence
  >GCF_003478205.1_00460 Acetatifactor_sp1
atgagagtttgatcctggctcaggatgaacgctggcggcgtgcctaacacatgcaagtcgaacggacttacattgaagcctagcgatatgtaagttagtggcggacgggtgagtaacgcgtgggtaacctgccttgtactgggggacaacagttggaaacgactgctaataccgcataagcgcacagcttcgcatgaagcagtgtgaaaaactccggtggtacaagatggacccgcgtctgattagctggttggtgaggtaacggcccaccaaggcgacgatcagtagccggcctgagagggtgaacggccacattgggactgagacacggcccaaactcctacgggaggcagcagtggggaatattgcacaatgggggaaaccctgatgcagcaacgccgcgtgagtgaagaagtatttcggtatgtaaagctctatcagcaggaaagaaaatgacggtacctgactaagaagccccggctaactacgtgccagcagccgcggtaatacgtagggggcaagcgttatccggatttactgggtgtaaagggagcgtagacggttttgcaagtctgaagtgaaagcccggggcttaaccccgggactgctttggaaactgtaggactagagtgcaggagaggtaagtggaattcctagtgtagcggtgaaatgcgtagatattaggaggaacaccagtggcgaaggcggcttactggactgtaactgacgttgaggctcgaaagcgtggggagcaaacaggattagataccctggtagtccacgccgtaaacgatgattactaggtgttggtgggtatgacccatcggtgccgcagcaaacgcaataagtaatccacctggggagtacgttcgcaagaatgaaactcaaaggaattgacggggacccgcacaagcggtggagcatgtggtttaattcgaagcaacgcgaagaaccttacctggtcttgacatccctatgaataacgggcaatgccgttagtacttcggtacataggagacaggtggtgcatggttgtcgtcagctcgtgtcgtgagatgttgggttaagtcccgcaacgagcgcaacccttatctttagtagccagcagtaagatgggcactctagagagactgccggggataacccggaggaaggtggggatgacgtcaaatcatcatgccccttatgaccagggctacacacgtgctacaatggcgtaaacaaagagaagcgaagtcgtgaggcagagcgaatctcaaaaataacgtctcagttcggattgtagtctgcaactcgactacatgaagctggaatcgctagtaatcgcagacagaatgctgcggtgaatacgttcccgggtcttgtacacaccgcccgtcacaccatgggagtcggaaatgcccgaagtcggtgacctaaccgcaaggaaggagccgccgaaggcaggtctgataactggggtgaagtcgtaacaaggtagccgtatcggaaggtgcggctggatcacctccttt

SEQ ID NO: 709 - DNA, 1146 bp, artificial sequence; identical to SEQ ID NO: 94
  >GCF_003478265.1_00512 Blautia_wexlerae

SEQ ID NO: 710 - DNA, 1430 bp, artificial sequence; identical to SEQ ID NO: 96
  >GCF_003478325.1_00298 Blautia_wexlerae

SEQ ID NO: 711 - DNA, 996 bp, artificial sequence; identical to SEQ ID NO: 97
  >GCF_003478605.1_01564 Blautia_wexlerae

SEQ ID NO: 712 - DNA, 1001 bp, artificial sequence
  >GCF_003478685.1_01757 Acetatifactor_sp1
atgagagtttgatcctggctcaggatgaacgctggcggcgtgcctaacacatgcaagtcgaacggacttacattgaagcctagcgatatgtaagttagtggcggacgggtgagtaacgcgtgggtaacctgccttgtactgggggacaacagttggaaacgactgctaataccgcataagcgcacagcttcgcatgaagcagtgtgaaaaactccggtggtacaagatggacccgcgtctgattagctggttggtgaggtaacggcccaccaaggcgacgatcagtagccggcctgagagggtgaacggccacattgggactgagacacggcccaaactcctacgggaggcagcagtggggaatattgcacaatgggggaaaccctgatgcagcaacgccgcgtgagtgaagaagtatttcggtatgtaaagctctatcagcaggaaagaaaatgacggtacctgactaagaagccccggctaactacgtgccagcagccgcggtaatacgtagggggcaagcgttatccggatttactgggtgtaaagggagcgtagacggttttgcaagtctgaagtgaaagcccggggcttaaccccgggactgctttggaaactgtaggactagagtgcaggagaggtaagtggaattcctagtgtagcggtgaaatgcgtagatattaggaggaacaccagtggcgaaggcggcttactggactgtaactgacgttgaggctcgaaagcgtggggagcaaacaggattagataccctggtagtccacgccgtaaacgatgattactaggtgttggtgggtatgacccatcggtgccgcagcaaacgcaataagtaatccacctggggagtacgttcgcaagaatgaaactcaaaggaattgacggggacccgcacaagcggtggagcatgtggtttaattcgaagcaacgcgaagaaccttacctggtcttgacatcccgatgacagatctgtaatgagatcctta

SEQ ID NO: 713 - DNA, 1137 bp, artificial sequence; identical to SEQ ID NO: 98
  >GCF_003478765.1_02375 Blautia_wexlerae
  misc_feature (1137)..(1137): n is a, c, g, or t

SEQ ID NO: 714 - DNA, 1247 bp, artificial sequence; identical to SEQ ID NO: 99
  >GCF_003478775.1_01016 Blautia_wexlerae

SEQ ID NO: 715 - DNA, 968 bp, artificial sequence; identical to SEQ ID NO: 100
  >GCF_003478845.1_03190 Blautia_wexlerae
  misc_feature (1)..(1): n is a, c, g, or t

SEQ ID NO: 716 - DNA, 1527 bp, artificial sequence; identical to SEQ ID NO: 101
  >GCF_003479625.1_01820 Blautia_wexlerae

SEQ ID NO: 717 - DNA, 1240 bp, artificial sequence; identical to SEQ ID NO: 104
  >GCF_003479895.1_00564 Blautia_wexlerae

SEQ ID NO: 718 - DNA, 1406 bp, artificial sequence; identical to SEQ ID NO: 105
  >GCF_003480205.1_03802 Blautia_wexlerae

SEQ ID NO: 719 - DNA, 1392 bp, artificial sequence
  >GCF_003480225.1_02359 Acetatifactor_sp1
  misc_feature (1)..(2): n is a, c, g, or t
nnaacctgccttgtactgggggacaacagttggaaacgactgctaataccgcataagcgcacagcttcgcatgaagcggtgtgaaaaactccggtggtacaagatggacccgcgtctgattagctggttggtgaggtaacggcccaccaaggcgacgatcagtagccggcctgagagggtgaacggccacattgggactgagacacggcccaaactcctacgggaggcagcagtggggaatattgcacaatgggggaaaccctgatgcagcaacgccgcgtgagtgaagaagtatttcggtatgtaaagctctatcagcaggaaagaaaatgacggtacctgactaagaagccccggctaactacgtgccagcagccgcggtaatacgtagggggcaagcgttatccggatttactgggtgtaaagggagcgtagacggttttgcaagtctgaagtgaaagcccggggcttaaccccgggactgctttggaaactgtagaactagagtgcaggagaggtaagtggaattcctagtgtagcggtgaaatgcgtagatattaggaggaacaccagtggcgaaggcggcttactggactgtaactgacgttgaggctcgaaagcgtggggagcaaacaggattagataccctggtagtccacgccgtaaacgatgattactaggtgttggtgggtacgacccatcggtgccgcagcaaacgcaataagtaatccacctggggagtacgttcgcaagaatgaaactcaaaggaattgacggggacccgcacaagcggtggagcatgtggtttaattcgaagcaacgcgaagaaccttacctggtcttgacatccctatgaataacgggcaatgccgttagtacttcggtacataggagacaggtggtgcatggttgtcgtcagctcgtgtcgtgagatgttgggttaagtcccgcaacgagcgcaacccttatctttagtagccagcagtaagatgggcactctagagagactgccggggataacccggaggaaggtggggatgacgtcaaatcatcatgccccttatgaccagggctacacacgtgctacaatggcgtaaacaaagagaagcgaagtcgtgaggcagagcgaatctcaaaaataacgtctcagttcggattgtagtctgcaactcgactacatgaagctggaatcgctagtaatcgcagatcagaatgctgcggtgaatacgttcccgggtcttgtacacaccgcccgtcacaccatgggagtcggaaatgcccgaagtcggtgacctaaccgcaaggaaggagccgccgaaggcaggtctgataactggggtgaagtcgtaacaaggtagccgtatcggaaggtgcggctggatcacctccttt

SEQ ID NO: 720 - DNA, 1512 bp, artificial sequence; identical to SEQ ID NO: 106
  >GCF_003480285.1_02026 Blautia_wexlerae
  misc_feature (1)..(1): n is a, c, g, or t

SEQ ID NO: 721 - DNA, 985 bp, artificial sequence; identical to SEQ ID NO: 107
  >GCF_003480305.1_03610 Blautia_wexlerae
  misc_feature (981)..(985): n is a, c, g, or t

SEQ ID NO: 722 - DNA, 1433 bp, artificial sequence; identical to SEQ ID NO: 109
  >GCF_003480495.1_03793 Blautia_wexlerae

SEQ ID NO: 723 - DNA, 1518 bp, artificial sequence; identical to SEQ ID NO: 110
  >GCF_003480505.1_01215 Blautia_wexlerae

SEQ ID NO: 724 - DNA, 1506 bp, artificial sequence; identical to SEQ ID NO: 111
  >GCF_003480765.1_01088 Blautia_wexlerae

SEQ ID NO: 725 - DNA, 935 bp, artificial sequence; identical to SEQ ID NO: 112
  >GCF_003480885.1_00435 Blautia_wexlerae

SEQ ID NO: 726 - DNA, 1544 bp, artificial sequence
  >GCF_003481565.1_03331 Acetatifactor_sp1
  misc_feature (110)..(123): n is a, c, g, or t
atgagagtttgatcctggctcaggatgaacgctggcggcgtgcctaacacatgcaagtcgaacggaatttacatgaagcctagcgattgtaaatttagtggcggacgggnnnnnnnnnnnnnnttagtggcggacgggtgagtaacgcgtgggtaacctgccttgtactgggggacaacagttggaaacgactgctaataccgcataagcgcacagcttcgcatgaagcagtgtgaaaaactccggtggtacaagatggacccgcgtctgattagctggttggtgaggtaacggcccaccaaggcgacgatcagtagccggcctgagagggtgaacggccacattgggactgagacacggcccaaactcctacgggaggcagcagtggggaatattgcacaatgggggaaaccctgatgcagcaacgccgcgtgagtgaagaagtatttcggtatgtaaagctctatcagcaggaaagaaaatgacggtacctgactaagaagccccggctaactacgtgccagcagccgcggtaatacgtagggggcaagcgttatccggatttactgggtgtaaagggagcgtagacggttttgcaagtctgaagtgaaagcccggggcttaaccccgggactgctttggaaactgtaggactagagtgcaggagaggtaagtggaattcctagtgtagcggtgaaatgcgtagatattaggaggaacaccagtggcgaaggcggcttactggactgtaactgacgttgaggctcgaaagcgtggggagcaaacaggattagataccctggtagtccacgccgtaaacgatgattactaggtgttggtgggtaagacccatcggtgccgcagcaaacgcaataagtaatccacctggggagtacgttcgcaagaatgaaactcaaaggaattgacggggacccgcacaagcggtggagcatgtggtttaattcgaagcaacgcgaagaaccttacctggtcttgacatcccgatgacagatctgtaatgagatccttacttcggtacattggagacaggtggtgcatggttgtcgtcagctcgtgtcgtgagatgttgggttaagtcccgcaacgagcgcaacccttatctttagtagccagcagtaagatgggcactctagagagactgccggggataacccggaggaaggtggggatgacgtcaaatcatcatgccccttatgaccagggctacacacgtgctacaatggcgtaaacaaagagaagcgaagtcgtgaggcagagcgaatctcaaaaataacgtctcagttcggattgtagtctgcaactcgactacatgaagctggaatcgctagtaatcgcagatcagaatgctgcggtgaatacgttcccgggtcttgtacacaccgcccgtcacaccatgggagtcggaaatgcccgaagtcggtgacctaaccgcaaggaaggagccgccgaaggcaggtctgataactggggtgaagtcgtaacaaggtagccgtatcggaaggtgcggctggatcacctccttt

SEQ ID NO: 727 - DNA, 1562 bp, artificial sequence; identical to SEQ ID NO: 114
  >GCF_003481625.1_02713 Blautia_wexlerae
  misc_feature (129)..(138): n is a, c, g, or t

SEQ ID NO: 728 - DNA, 1515 bp, artificial sequence
  >GCF_003584705.1_00391 Acetatifactor_sp1
atgagagtttgatcctggctcaggatgaacgctggcggcgtgcctaacacatgcaagtcgaacggacttttcatgaagcctagcgattgaaaagttagtggcggacgggtgagtaacgcgtgggtaacctgccttgtactgggggacaacagttggaaacgactgctaataccgcataagcgcacagcttcgcatgaagcggtgtgaaaaactccggtggtacaagatggacccgcgtctgattagctggttggtgaggtaacggcccaccaaggcgacgatcagtagccggcctgagagggtgaacggccacattgggactgagacacggcccaaactcctacgggaggcagcagtggggaatattgcacaatgggggaaaccctgatgcagcaacgccgcgtgagtgaagaagtatttcggtatgtaaagctctatcagcaggaaagaaaatgacggtacctgactaagaagccccggctaactacgtgccagcagccgcggtaatacgtagggggcaagcgttatccggatttactgggtgtaaagggagcgtagacggttttgcaagtctgaagtgaaaacccggggcttaaccccgggactgctttggaaactgtagaactagagtgcaggagaggtaagtggaattcctagtgtagcggtgaaatgcgtagatattaggaggaacaccagtggcgaaggcggcttactggactgtaactgacgttgaggctcgaaagcgtggggagcaaacaggattagataccctggtagtccacgctgtaaacgatgattactaggtgttggtgggtacgacccatcggtgccgcagcaaacgcaataagtaatccacctggggagtacgttcgcaagaatgaaactcaaaggaattgacggggacccgcacaagcggtggagcatgtggtttaattcgaagcaacgcgaagaaccttacctggtcttgacatccctatgaataacgggcaatgccgttagtacttcggtacataggagacaggtggtgcatggttgtcgtcagctcgtgtcgtgagatgttgggttaagtcccgcaacgagcgcaacccttatctttagtagccagcagtaagatgggcactctagagagactgccggggataacccggaggaaggtggggatgacgtcaaatcatcatgccccttatgaccagggctacacacgtgctacaatggcgtaaacaaagagaagcgaagtcgtgaggcagagcgaatctcaaaaataacgtctcagttcggattgtagtctgcaactcgactacatgaagctggaatcgctagtaatcgcagatcagaatgctgcggtgaatacgttcccgggtcttgtacacaccgcccgtcacaccatgggagtcggaaatgcccgaagtcggtgacctaaccgcaaggaaggagccgccgaaggcaggtctgataactggggtgaagtcgtaacaaggtagccgtatcggaaggtgcggctggatcacctccttt

SEQ ID NO: 729 - DNA, 1515 bp, artificial sequence
  >GCF_003584705.1_02778 Acetatifactor_sp1
atgagagtttgatcctggctcaggatgaacgctggcggcgtgcctaacacatgcaagtcgaacggacttacattgaagcctagcgatatgtaagttagtggcggacgggtgagtaacgcgtgggtaacctgccttgtactgggggacaacagttggaaacgactgctaataccgcataagcgcacagcttcgcatgaagcagtgtgaaaaactccggtggtacaagatggacccgcgtctgattagctggttggtgaggtaacggcccaccaaggcaacgatcagtagccggcctgagagggtgaacggccacattgggactgagacacggcccaaactcctacgggaggcagcagtggggaatattgcacaatgggggaaaccctgatgcagcaacgccgcgtgagtgaagaagtatttcggtatgtaaagctctatcagcaggaaagaaaatgacggtacctgactaagaagccccggctaactacgtgccagcagccgcggtaatacgtagggggcaagcgttatccggatttactgggtgtaaagggagcgtagacggttttgcaagtctgaagtgaaagcccggggcttaacctcgggactgctttggaaactgtaggactagagtgcaggagaggtaagtggaattcctagtgtagcggtgaaatgcgtagatattaggaggaacaccagtggcgaaggcggcttactggactgtaactgacgttgaggctcgaaagcgtggggagcaaacaggattagataccctggtagtccacgccgtaaacgatgattactaggtgttggtgggtacgacccatcggtgccgcagcaaacgcaataagtaatccacctggggagtacgttcgcaagaatgaaactcaaaggaattgacggggacccgcacaagcggtggagcatgtggtttaattcgaagcaacgcgaagaaccttacctggtcttgacatccctatgaataacgggcaatgccgttagtacttcggtacataggagacaggtggtgcatggttgtcgtcagctcgtgtcgtgagatgttgggttaagtcccgcaacgagcgcaacccttatctttagtagccagcagtaagatgggcactctagagagactgccggggataacccggaggaaggtggggatgacgtcaaatcatcatgccccttatgaccagggctacacacgtgctacaatggcgtaaacaaagagaagcgaagtcgtgaggcagagcgaatctcaaaaataacgtctcagttcggattgtagtctgcaactcgactacatgaagctggaatcgctagtaatcgcagatcagaatgctgcggtgaatacgttcccgggtcttgtacacaccgcccgtcacaccatgggagtcggaaatgcccgaagtcggtgacctaaccgcaaggaaggagccgccgaaggcaggtctgataactggggtgaagtcgtaacaaggtagccgtatcggaaggtgcggctggatcacctccttt

SEQ ID NO: 730 - DNA, 1527 bp, artificial sequence; identical to SEQ ID NO: 116
  >GCF_003603885.1_00284 Blautia_wexlerae

SEQ ID NO: 731 - DNA, 1320 bp, artificial sequence
  >GCF_004535825.1_00225 Prevotella_copri
attaaagatttatcggtgatggatggggatgcgtctgattagcttgttggcggggtaacggcccaccaaggcaacgatcagtaggggttctgagaggaaggtcccccacattggaactgagacacggtccaaactcctacgggaggcagcagtgaggaatattggtcaatgggcgagagcctgaaccagccaagtagcgtgcaggatgacggccctatgggttgtaaactgcttttataagggaataaagtgagtctcgtgagactttttgcatgtaccttatgaataaggaccggctaattccgtgccagcagccgcggtaatacggaaggtccgggcgttatccggatttattgggtttaaagggagcgtaggccggagattaagcgtgttgtgaaatgtagaggctcaacctctgcactgcagcgcgaactggtcttcttgagtacgcacaacgtgggcggaattcgtggtgtagcggtgaaatgcttagatatcacgaagaactccgattgcgaaggcagctcacgggagcgcaactgacgctgaagctcgaaagtgcgggtatcgaacaggattagataccctggtagtccgcacggtaaacgatggatgcccgctgttggcctgaataggtcagcggccaagcgaaagcattaagcatcccacctggggagtacgccggcaacggtgaaactcaaaggaattgacgggggcccgcacaagcggaggaacatgtggtttaattcgatgatacgcgaggaaccttacccgggcttgaattgcagaggaaggatttggagacaatgacgcccttcggggtctctgtgaaggtgctgcatggttgtcgtcagctcgtgccgtgaggtgtcggcttaagtgccataacgagcgcaacccctctccttagttgccatcaggtcaggctgggcactctggggacactgccaccgtaaggtgtgaggaaggtggggatgacgtcaaatcagcacggcccttacgtccggggctacacacgtgttacaatggcaggtacagagagacggttgtacgtaagtacgatcaaatccttaaagcctgtctcagttcggactggggtctgcaacccgaccccacgaagctggattcgctagtaatcgcgcatcagccatggcgcggtgaatacgttcccgggccttgtacacaccgcccgtcaagccatgaaagccgggggcgcctgaagtccgtgaccgtaaggagcggcctagggcgaaactggtaattggggctaagtcgtaacaaggtagccgtaccggaaggtgcggctggaacacctccttt

SEQ ID NO: 732 - DNA, 1529 bp, artificial sequence
  >GCF_005121165.1_01839 Dysosmobacter_welbionis
tatagagagtttgatcctggctcaggacgaacgctggcggcgtgcttaacacatgcaagtcgaacggagcacccttgactgaggtttcggccaaatgataggaatgcttagtggcggactggtgagtaacgcgtgaggaacctgccttccagagggggacaacagttggaaacgactgctaataccgcatgacgcatgaccggggcatcccgggcatgtcaaagattttatcgctggaagatggcctcgcgtctgattagctagatggtggggtaacggcccaccatggcgacgatcagtagccggactgagaggttgaccggccacattgggactgagatacggcccagactcctacgggaggcagcagtggggaatattgggcaatggacgcaagtctgacccagcaacgccgcgtgaaggaagaaggctttcgggttgtaaacttcttttgtcagggaagagtagaagacggtacctgacgaataagccacggctaactacgtgccagcagccgcggtaatacgtaggtggcaagcgttgtccggatttactgggtgtaaagggcgtgcagccgggccggcaagtcagatgtgaaatctggaggcttaacctccaaactgcatttgaaactgtaggtcttgagtaccggagaggttatcggaattccttgtgtagcggtgaaatgcgtagatataaggaagaacaccagtggcgaaggcggataactggacggcaactgacggtgaggcgcgaaagcgtggggagcaaacaggattagataccctggtagtccacgctgtaaacgatggatactaggtgtgcggggactgaccccctgcgtgccgcagttaacacaataagtatcccacctggggagtacgatcgcaaggttgaaactcaaaggaattgacgggggcccgcacaagcggtggattatgtggtttaattcgaagcaacgcgaagaaccttaccagggcttgacatcctactaacgaagtagagatacattaggtgcccttcggggaaagtagagacaggtggtgcatggttgtcgtcagctcgtgtcgtgagatgttgggttaagtcccgcaacgagcgcaacccctattgttagttgctacgcaagagcactctagcgagactgccgttgacaaaacggaggaaggtggggacgacgtcaaatcatcatgccccttatgtcctgggctacacacgtaatacaatggcggtcaacagagggaggcaaagccgcgaggcagagcaaacccccaaaagccgtcccagttcggatcgcaggctgcaacccgcctgcgtgaagtcggaatcgctagtaatcgcggatcagcatgccgcggtgaatacgttcccgggccttgtacacaccgcccgtcacaccatgagagtcgggaacacccgaagtccgtagcctaaccgcaaggagggcgcggccgaaggtgggttcgataattggggtgaagtcgtaacaaggtagccgtatcggaaggtgcggctggatcacctccttt

SEQ ID NO: 733 - DNA, 1529 bp, artificial sequence
  >GCF_005844445.1_03143 Blautia_caecimuris
acagagagtttgatcctggctcaggatgaacgctggcggcgtgcttaacacatgcaagtcgaacggggattattttgacagagacttcggttgaagtcgttataatcctagtggcggacgggtgagtaacgcgtgggtaacctgcctcacactgggggataacagtcagaaatgactgctaataccgcataagcgcacgggattgcatgatccagtgtgaaaaactccggtggtgtgagatggacccgcgttggattagccagttggcagggtaacggcctaccaaagcgacgatccatagccggcctgagagggtggacggccacattgggactgagacacggcccagactcctacgggaggcagcagtggggaatattgcacaatgggggaaaccctgatgcagcgacgccgcgtgaaggaagaagtatctcggtatgtaaacttctatcagcagggaagaaaatgacggtacctgactaagaagccccggctaactacgtgccagcagccgcggtaatacgtagggggcaagcgttatccggatttactgggtgtaaagggagcgtagacggagcagcaagtctgatgtgaaaggcgggggctcaacccccggactgcattggaaactgttgatcttgagtaccggagaggtaagcggaattcctagtgtagcggtgaaatgcgtagatattaggaggaacaccagtggcgaaggcggcttactggacggtaactgacgttgaggctcgaaagcgtggggagcaaacaggattagataccctggtagtccacgccgtaaacgatgaatactaggtgtcgggtggcagagccattcggtgccgcagcaaacgcagtaagtattccacctggggagtacgttcgcaagaatgaaactcaaaggaattgacggggacccgcacaagcggtggagcatgtggtttaattcgaagcaacgcgaagaaccttaccaagtcttgacatccctctgaccggtgagtaacgtcacctttccttcgggacagaggagacaggtggtgcatggttgtcgtcagctcgtgtcgtgagatgttgggttaagtcccgcaacgagcgcaacccctatccttagtagccagcggtttggccgggcactctgaggagactgccagggataacctggaggaaggcggggatgacgtcaaatcatcatgccccttatgatttgggctacacacgtgctacaatggcgtaaacaaagggaagcgagagtgtgagcttaagcaaatcccaaaaataacgtcccagttcggactgcagtctgcaactcgactgcacgaagctggaatcgctagtaatcgcggatcagaatgccgcggtgaatacgttcccgggtcttgtacacaccgcccgtcacaccatgggagtcagtaacgcccgaagtcagtgaccgaaccgaaaggacggagctgccgaaggcgggacggatgactggggtgaagtcgtaacaaggtagccgtatcggaaggtgcggctggatcacctccttt

SEQ ID NO: 734 - DNA, 1527 bp, artificial sequence
  >GCF_005886215.1_03214 Hungatella_sp2
atgagagtttgatcctggctcaggatgaacgctggcggcgtgcttaacacatgcaagtcgagcgaagcatttttaatgaagttttcggatggatttagatttgacttagcggcggacgggtgagtaacgcgtgggtaacctgccttacactgggggataacagttagaaatgactgctaataccgcataagcgcacagtgccgcatggcacggtgtgaaaaactccggtggtgtaagatggacccgcgtctgattaggtagttggtagggtaacggcctaccaagccgacgatcagtagccgacctgagagggtgaccggccacattgggactgagacacggcccaaactcctacgggaggcagcagtggggaatattgcacaatgggcgaaagcctgatgcagcgacgccgcgtgagtgaagaagtatttcggtatgtaaagctctatcagcagggaagaaaatgacggtacctgactaagaagccccggctaactacgtgccagcagccgcggtaatacgtagggggcaagcgttatccggatttactgggtgtaaagggagcgtagacggtttagcaagtctgaagtgaaagcccggggctcaaccccggtactgctttggaaactgttagacttgagtgcaggagaggtaagtggaattcctagtgtagcggtgaaatgcgtagatattaggaggaacaccagtggcgaaggcggcttactggactgtaactgacgttgaggctcgaaagcgtggggagcaaacaggattagataccctggtagtccacgccgtaaacgatgaatactaggtgtcggggagcaaagctcttcggtgccgccgcaaacgcattaagtattccacctggggagtacgttcgcaagaatgaaactcaaaggaattgacggggacccgcacaagcggtggagcatgtggtttaattcgaagcaacgcgaagaaccttaccaagtcttgacatccccctgaccggtccgtaacggggccttcccttcgggacaggggtgacaggtggtgcatggttgtcgtcagctcgtgtcgtgagatgttgggttaagtcccgcaacgagcgcaacccttatccttagtagccagcagtcagatgggaactctagggagactgccagggataacctggaggaaggtggggatgacgtcaaatcatcatgccccttatgatttgggctacacacgtgctacaatggcgtaaacaaagggaagcgaaaccgcgaggtcaagcaaatcccaaaaataacgtctcagttcggattgtagtctgcaactcgactacatgaagctggaatcgctagtaatcgcgaatcagaatgtcgcggtgaatacgttcccgggtcttgtacacaccgcccgtcacaccatgggagtcgataacgcccgaagtcagtgacccaaccttataggagggagctgccgaaggcgggattgataactggggtgaagtcgtaacaaggtagccgtatcggaaggtgcggctggatcacctccttt

SEQ ID NO: 735 - DNA, 1527 bp, artificial sequence; identical to SEQ ID NO: 123
  >GCF_900078295.2_00974 Blautia_wexlerae

SEQ ID NO: 736 - DNA, 1533 bp, artificial sequence
  >GCF_900120005.1_00936 Holdemania_filiformis
atggagagtttgatcctggctcaggatgaacgctggcggcgtgcctaatacatgcaagtcgaacgcttgcttgaggacttgtcttcaagcgggagtggcgaacgggtgagtaatacataagcaatctgcccatcggcctgggataacagttggaaacgactgctaataccggataggtgattggaaggcatcttctgatcattaaagttgggatacaacacggatggatgagcttatggcgtattagctagtaggtgaggtaacggctcacctaggcgatgatacgtagccgacctgagagggtgaccggccacattgggactgagacacggcccaaactcctacgggaggcagcagtagggaattttcggcaatgggcgaaagcctgaccgagcaacgccgcgtgagtgaagaaggccttcgggttgtaaagctctgttgtgaaggaagaacggctcatacagggaatggtatgggagtgacggtactttaccagaaagccacggctaactacgtgccagcagccgcggtaatacgtaggtggcgagcgttatccggaattattgggcgtaaagggtgcgcaggcggttttttaagtttaaggtgaaagcgtggggcttaaccccatatagccttagaaactgagagactagagtacaggagagggcaatggaattccatgtgtagcggtaaaatgcgtagatatatggaggaacaccagtggcgaaggcggttgcctggcctgtaactgacgctcatgcacgaaagcgtggggagcaaataggattagataccctagtagtccacgccgtaaacgatgagaactaagtgttggggaaactcagtgctgcagttaacgcaataagttctccgcctggggagtatgcacgcaagtgtgaaactcaaaggaattgacgggggcccgcacaagcggtggagtatgtggtttaattcgacgcaacgcgaagaaccttaccaggtcttgacatcccctgcaaagacatagagatatgttggaggttatcagggagacaggtggtgcatggttgtcgtcagctcgtgtcgtgagatgttgggttaagtcccgcaacgagcgcaacccttgtctttagttactaacattgagttgaggactctagagagactgccggtgacaaaccggaggaaggtggggatgacgtcaaatcatcatgccccttatgacctgggctacacacgtactacaatggcggatacaacgagaagcaagacagtgatgtggagcaaaactcagaaagtccgtctcagttcggattgaagtctgcaacccgacttcatgaagccggaatcgctagtaatcgcggatcagcatgccgcggtgaatacgttctcgggccttgtacacaccgcccgtcaaaccatgagagttggcaatgcccgaagccggtggcctaacctcgcaagaggagggagccgtcgaaggtagggctgatgattggggttaagtcgtaacaaggtatccctacgggaacgtggggatggatcacctccttt

SEQ ID NO: 737 - DNA, 1529 bp, artificial sequence
  >GCF_900209925.1_00010 Anaerobutyricum_hallii
atttgagagtttgatcctggctcaggatgaacgctggcggcgtgcctaacacatgcaagtcgaacgaagcaccttttgagattcttcggatgattgattggtgactgagtggcggacgggtgagtaacgcgtgggtaacctgccctgtacagggggataacagttggaaacggctgctaataccgcataagcgcacgagaggacatcctcttgtgtgaaaaactccggtggtacaggatgggcccgcgtctgattagctggttggcagggtaacagcctaccaaggcgacgatcagtagccggtctgagaggatgaacggccacattggaactgagacacggtccaaactcctacgggaggcagcagtggggaatattgcacaatgggggaaaccctgatgcagcaacgccgcgtgagtgaagaagtatttcggtatgtaaagctctatcagcagggaagataatgacggtacctgactaagaagctccggctaaatacgtgccagcagccgcggtaatacgtatggagcaagcgttatccggatttactgggtgtaaagggtgcgtaggtggcagtgcaagtcagatgtgaaaggccggggctcaaccccggagctgcatttgaaactgcatagctagagtacaggagaggcaggcggaattcctagtgtagcggtgaaatgcgtagatattaggaggaacaccagtggcgaaggcggcctgctggactgttactgacactgaggcacgaaagcgtggggagcaaacaggattagataccctggtagtccacgccgtaaacgatgaatactaggtgtcggggccgtataggcttcggtgccgtcgcaaacgcagtaagtattccacctggggagtacgttcgcaagaatgaaactcaaaggaattgacggggacccgcacaagcggtggagcatgtggtttaattcgaagcaacgcgaagaaccttaccaggtcttgacatccttctgaccgcaccttaatcggtgctttccttcgggacagaagagacaggtggtgcatggttgtcgtcagctcgtgtcgtgagatgttgggttaagtcccgcaacgagcgcaacccctatcttcagtagccagcaggttaagctgggcactctggagagactgccagggataacctggaggaaggtggggacgacgtcaaatcatcatgccccttatgatctgggcgacacacgtgctacaatggcggtcacaaagtgaggcaaacctgcgagggggagcaaaccacaaaaaggccgtcccagttcggactgtagtctgcaacccgactacacgaagctggaatcgctagtaatcgcgaatcagaatgtcgcggtgaatacgttcccgggtcttgtacacaccgcccgtcacaccatgggagtcggaaatgcccgaagccagtgacccaacctttatggagggagctgtcgaaggtggagccggtaactggggtgaagtcgtaacaaggtagccgtatcggaaggtgcggctggatcacctccttt

SEQ ID NO: 738 - DNA, 1528 bp, artificial sequence
  >GCF_900209925.1_00150 Anaerobutyricum_hallii
atttgagagtttgatcctggctcaggatgaacgctggcggcgtgcctaacacatgcaagtcgaacgaagcacctcttaagattcttcggatgattgatcggtgactgagtggcggacgggtgagtaacgcgtgggtaacctgccctgtacagggggataacagttggaaacggctgctaataccgcataagcgcacgaggggacatcctcttgtgtgaaaaactccggtggtacaggatgggcccgcgtctgattagctggttggcagggtaacggcctaccaaggcgacgatcagtagccggtctgagaggatgaacggccacattggaactgagacacggtccaaactcctacgggaggcagcagtggggaatattgcacaatgggggaaaccctgatgcagcaacgccgcgtgagtgaagaagtatttcggtatgtaaagctctatcagcagggaagataatgacggtacctgactaagaagctccggctaaatacgtgccagcagccgcggtaatacgtatggagcaagcgttatccggatttactgggtgtaaagggtgcgtaggtggcagtgcaagtcagatgtgaaaggccggggctcaaccccggagctgcatttgaaactgcatggctagagtacaggagaggcaggcggaattcctagtgtagcggtgaaatgcgtagatattaggaggaacaccagtggcgaaggcggcctgctggactgttactgacactgaggcacgaaagcgtggggagcaaacaggattagataccctggtagtccacgccgtaaacgatgaatactaggtgtcggggccgtataggcttcggtgccgtcgcaaacgcagtaagtattccacctggggagtacgttcgcaagaatgaaactcaaaggaattgacggggacccgcacaagcggtggagcatgtggtttaattcgaagcaacgcgaagaaccttaccaggtcttgacatccttctgaccactccgtaatgggagtcttccttcgggacagaagagacaggtggtgcatggttgtcgtcagctcgtgtcgtgagatgttgggttaagtcccgcaacgagcgcaacccctatcttcagtagccagcaggttaagctgggcactctggagagactgccagggataacctggaggaaggtggggacgacgtcaaatcatcatgccccttatgatctgggcgacacacgtgctacaatggcggtcacaaagtgaggcaaacctgcgagggggagcaaaccacaaaaaggccgtcccagttcggactgtagtctgcaacccgactacacgaagctggaatcgctagtaatcgcgaatcagaatgtcgcggtgaatacgttcccgggtcttgtacacaccgcccgtcacaccatgggagtcggaaatgcccgaagccagtgacccaaccatatggagggagctgtcgaaggtggagccggtaactggggtgaagtcgtaacaaggtagccgtatcggaaggtgcggctggatcacctccttt

SEQ ID NO: 739 - DNA, 1529 bp, artificial sequence
  >GCF_900209925.1_00239 Anaerobutyricum_hallii
atttgagagtttgatcctggctcaggatgaacgctggcggcgtgcctaacacatgcaagtcgaacgaagcaccttttaagattcttcggatgattgattggtgactgagtggcggacgggtgagtaacgcgtgggtaacctgccctgtacagggggataacagttggaaacggctgctaataccgcataagcgcacgagaggacatcctcttgtgtgaaaaactccggtggtacaggatgggcccgcgtctgattagctggttggcagggtaacggcctaccaaggcgacgatcagtagccggtctgagaggatgaacggccacattggaactgagacacggtccaaactcctacgggaggcagcagtggggaatattgcacaatgggggaaaccctgatgcagcaacgccgcgtgagtgaagaagtatttcggtatgtaaagctctatcagcagggaagataatgacggtacctgactaagaagctccggctaaatacgtgccagcagccgcggtaatacgtatggagcaagcgttatccggatttactgggtgtaaagggtgcgtaggtggcagtgcaagtcagatgtgaaaggccggggctcaaccccggagctgcatttgaaactgcatagctagagtacaggagaggcaggcggaattcctagtgtagcggtgaaatgcgtagatattaggaggaacaccagtggcgaaggcggcctgctggactgttactgacactgaggcacgaaagcgtggggagcaaacaggattagataccctggtagtccacgccgtaaacgatgaatactaggtgtcggggccgtataggcttcggtgccgtcgcaaacgcagtaagtattccacctggggagtacgttcgcaagaatgaaactcaaaggaattgacggggacccgcacaagcggtggagcatgtggtttaattcgaagcaacgcgaagaaccttaccaggtcttgacatccttctgaccactccgtaatgggagttttccttcgggacagaagagacaggtggtgcatggttgtcgtcagctcgtgtcgtgagatgttgggttaagtcccgcaacgagcgcaacccctatcttcagtagccagcaggtaaggctgggcactctggagagactgccagggataacctggaggaaggtggggacgacgtcaaatcatcatgccccttatgatctgggcgacacacgtgctacaatggcggtcacaaagtgaggcaaacccgcgagggggagcaaaccacaaaaaggccgtcccagttcggactgtagtctgcaacccgactacacgaagctggaatcgctagtaatcgcgaatcagaatgtcgcggtgaatacgttcccgggtcttgtacacaccgcccgtcacaccatgggagtcggaaatgcccgaagccagtgacccaacctttatggagggagctgtcgaaggtggagccggtaactggggtgaagtcgtaacaaggtagccgtatcggaaggtgcggctggatcacctccttt

SEQ ID NO: 740 - DNA, 1528 bp, artificial sequence
  >GCF_900209925.1_00659 Anaerobutyricum_hallii
atttgagagtttgatcctggctcaggatgaacgctggcggcgtgcctaacacatgcaagtcgaacgaagcaccttacctgattcttcggatgaaggtctggtgactgagtggcggacgggtgagtaacgcgtgggtaacctgccctgtacagggggataacagttggaaacggctgctaataccgcataagcgcacgagaggacatcctttcgtgtgaaaaactccggtggtacaggatgggcccgcgtctgattagctggttggcagggtaacggcctaccaaggcgacgatcagtagccggtctgagaggatgaacggccacattggaactgagacacggtccaaactcctacgggaggcagcagtggggaatattgcacaatgggggaaaccctgatgcagcaacgccgcgtgagtgaagaagtatttcggtatgtaaagctctatcagcagggaagataatgacggtacctgactaagaagctccggctaaatacgtgccagcagccgcggtaatacgtatggagcaagcgttatccggatttactgggtgtaaagggtgcgtaggtggcagtgcaagtcagatgtgaaaggccggggctcaaccccggagctgcatttgaaactgcatagctagagtacaggagaggcaggcggaattcctagtgtagcggtgaaatgcgtagatattaggaggaacaccagtggcgaaggcggcctgctggactgttactgacactgaggcacgaaagcgtggggagcaaacaggattagataccctggtagtccacgccgtaaacgatgaatactaggtgtcggggccgtataggcttcggtgccgtcgcaaacgcagtaagtattccacctggggagtacgttcgcaagaatgaaactcaaaggaattgacggggacccgcacaagcggtggagcatgtggtttaattcgaagcaacgcgaagaaccttaccaggtcttgacatccttctgaccactccgtaatgggagtcttccttcgggacagaagagacaggtggtgcatggttgtcgtcagctcgtgtcgtgagatgttgggttaagtcccgcaacgagcgcaacccctatcttcagtagccagcaggcaaggctgggcactctggagagactgccagggataacctggaggaaggtggggacgacgtcaaatcatcatgccccttatgatctgggcgacacacgtgctacaatggcggtcacaaagtgaggcaaacccgcgagggggagcaaaccacaaaaaggccgtcccagttcggactgtagtctgcaacccgactacacgaagctggaatcgctagtaatcgcgaatcagaatgtcgcggtgaatacgttcccgggtcttgtacacaccgcccgtcacaccatgggagtcggaaatgcccgaagccagtgacccaaccttttggagggagctgtcgaaggtggagccggtaactggggtgaagtcgtaacaaggtagccgtatcggaaggtgcggctggatcacctccttt

SEQ ID NO: 741 - DNA, 1528 bp, artificial sequence
  >GCF_900209925.1_00999 Anaerobutyricum_hallii
atttgagagtttgatcctggctcaggatgaacgctggcggcgtgcctaacacatgcaagtcgaacgaagcaccttttaagattcttcggatgattgatcggtgactgagtggcggacgggtgagtaacgcgtgggtaacctgccctgtacagggggataacagttggaaacggctgctaataccgcataagcgcacgagaggacatcctcttgtgtgaaaaactccggtggtacaggatgggcccgcgtctgattagctggttggcagggtaacagcctaccaaggcgacgatcagtagccggtctgagaggatgaacggccacattggaactgagacacggtccaaactcctacgggaggcagcagtggggaatattgcacaatgggggaaaccctgatgcagcaacgccgcgtgagtgaagaagtatttcggtatgtaaagctctatcagcagggaagataatgacggtacctgactaagaagctccggctaaatacgtgccagcagccgcggtaatacgtatggagcaagcgttatccggatttactgggtgtaaagggtgcgtaggtggcagtgcaagtcagatgtgaaaggccggggctcaaccccggagctgcatttgaaactgcatagctagagtacaggagaggcaggcggaattcctagtgtagcggtgaaatgcgtagatattaggaggaacaccagtggcgaaggcggcctgctggactgttactgacactgaggcacgaaagcgtggggagcaaacaggattagataccctggtagtccacgccgtaaacgatgaatactaggtgtcggggccgtataggcttcggtgccgtcgcaaacgcagtaagtattccacctggggagtacgttcgcaagaatgaaactcaaaggaattgacggggacccgcacaagcggtggagcatgtggtttaattcgaagcaacgcgaagaaccttaccaggtcttgacatccttctgaccactccgtaatgggagtcttccttcgggacagaagagacaggtggtgcatggttgtcgtcagctcgtgtcgtgagatgttgggttaagtcccgcaacgagcgcaacccctatcttcagtagccagcaggtaaggctgggcactctggagagactgccagggataacctggaggaaggtggggacgacgtcaaatcatcatgccccttatgatctgggcgacacacgtgctacaatggcggtcacaaagtgaggcaaacccgcgagggggagcaaaccacaaaaaggccgtcccagttcggactgtagtctgcaacccgactacacgaagctggaatcgctagtaatcgcgaatcagaatgtcgcggtgaatacgttcccgggtcttgtacacaccgcccgtcacaccatgggagtcggaaatgcccgaagccagtgacccaaccttttggagggagctgtcgaaggtggagccggtaactggggtgaagtcgtaacaaggtagccgtatcggaaggtgcggctggatcacctccttt

SEQ ID NO: 742 - DNA, 1528 bp, artificial sequence
  >GCF_900209925.1_01189 Anaerobutyricum_hallii
atttgagagtttgatcctggctcaggatgaacgctggcggcgtgcctaacacatgcaagtcgaacgaagcaccttttaagattcttcggatgattgatcggtgactgagtggcggacgggtgagtaacgcgtgggtaacctgccctgtacagggggataacagttggaaacggctgctaataccgcataagcgcacgagaggacatcctcttgtgtgaaaaactccggtggtacaggatgggcccgcgtctgattagctggttggcagggtaacggcctaccaaggcgacgatcagtagccggtctgagaggatgaacggccacattggaactgagacacggtccaaactcctacgggaggcagcagtggggaatattgcacaatgggggaaaccctgatgcagcaacgccgcgtgagtgaagaagtatttcggtatgtaaagctctatcagcagggaagataatgacggtacctgactaagaagctccggctaaatacgtgccagcagccgcggtaatacgtatggagcaagcgttatccggatttactgggtgtaaagggtgcgtaggtggcagtgcaagtcagatgtgaaaggccggggctcaaccccggagctgcatttgaaactgcatagctagagtacaggagaggcaggcggaattcctagtgtagcggtgaaatgcgtagatattaggaggaacaccagtggcgaaggcggcctgctggactgttactgacactgaggcacgaaagcgtggggagcaaacaggattagataccctggtagtccacgccgtaaacgatgaatactaggtgtcggggccgtataggcttcggtgccgtcgcaaacgcagtaagtattccacctggggagtacgttcgcaagaatgaaactcaaaggaattgacggggacccgcacaagcggtggagcatgtggtttaattcgaagcaacgcgaagaaccttaccaggtcttgacatccttctgaccactccgtaatgggagtcttccttcgggacagaagagacaggtggtgcatggttgtcgtcagctcgtgtcgtgagatgttgggttaagtcccgcaacgagcgcaacccctatcttcagtagccagcaggtaaggctgggcactctggagagactgccagggataacctggaggaaggtggggacgacgtcaaatcatcatgccccttatgatctgggcgacacacgtgctacaatggcggtcacaaagtgaggcaaacctgcgagggggagcaaaccacaaaaaggccgtcccagttcggactgtagtctgcaacccgactacacgaagctggaatcgctagtaatcgcgaatcagaatgtcgcggtgaatacgttcccgggtcttgtacacaccgcccgtcacaccatgggagtcggaaatgcccgaagccagtgacccaaccatatggagggagctgtcgaaggtggagccggtaactggggtgaagtcgtaacaaggtagccgtatcggaaggtgcggctggatcacctccttt

SEQ ID NO: 743 - DNA, 1528 bp, artificial sequence
  >GCF_900209925.1_01771 Anaerobutyricum_hallii
atttgagagtttgatcctggctcaggatgaacgctggcggcgtgcctaacacatgcaagtcgaacgaagcaccttttaagattcttcggatgattgatcggtgactgagtggcggacgggtgagtaacgcgtgggtaacctgccctgtacagggggataacagttggaaacggctgctaataccgcataagcgcacgagaggacatcctcttgtgtgaaaaactccggtggtacaggatgggcccgcgtctgattagctggttggcagggtaacggcctaccaaggcgacgatcagtagccggtctgagaggatgaacggccacattggaactgagacacggtccaaactcctacgggaggcagcagtggggaatattgcacaatgggggaaaccctgatgcagcaacgccgcgtgagtgaagaagtatttcggtatgtaaagctctatcagcagggaagataatgacggtacctgactaagaagctccggctaaatacgtgccagcagccgcggtaatacgtatggagcaagcgttatccggatttactgggtgtaaagggtgcgtaggtggcagtgcaagtcagatgtgaaaggccggggctcaaccccggagctgcatttgaaactgcatagctagagtacaggagaggcaggcggaattcctagtgtagcggtgaaatgcgtagatattaggaggaacaccagtggcgaaggcggcctgctggactgttactgacactgaggcacgaaagcgtggggagcaaacaggattagataccctggtagtccacgccgtaaacgatgaatactaggtgtcggggccgtataggcttcggtgccgtcgcaaacgcagtaagtattccacctggggagtacgttcgcaagaatgaaactcaaaggaattgacggggacccgcacaagcggtggagcatgtggtttaattcgaagcaacgcgaagaaccttaccaggtcttgacatccttctggccactccgtaatgggagttttccttcgggacagaagagacaggtggtgcatggttgtcgtcagctcgtgtcgtgagatgttgggttaagtcccgcaacgagcgcaacccctatcttcagtagccagcaggtaaggctgggcactctggagagactgccagggataacctggaggaaggtggggacgacgtcaaatcatcatgccccttatgatctgggcgacacacgtgctacaatggcggtcacaaagtgaggcaaacctgcgagggggagcaaaccacaaaaaggccgtcccagttcggactgtagtctgcaacccgactacacgaagctggaatcgctagtaatcgcgaatcagaatgtcgcggtgaatacgttcccgggtcttgtacacaccgcccgtcacaccatgggagtcggaaatgcccgaagccagtgacccaaccttttggagggagctgtcgaaggtggagccggtaactggggtgaagtcgtaacaaggtagccgtatcggaaggtgcggctggatcacctccttt

SEQ ID NO: 744 - DNA, 1528 bp, artificial sequence
  >GCF_900209925.1_02160 Anaerobutyricum_hallii
atttgagagtttgatcctggctcaggatgaacgctggcggcgtgcctaacacatgcaagtcgaacgaagcaccttttaagattcttcggatgattgatcggtgactgagtggcggacgggtgagtaacgcgtgggtaacctgccctgtacagggggataacagttggaaacggctgctaataccgcataagcgcacgagaggacatcctttcgtgtgaaaaactccggtggtacaggatgggcccgcgtctgattagctggttggcagggtaacggcctaccaaggcgacgatcagtagccggtctgagaggatgaacggccacattggaactgagacacggtccaaactcctacgggaggcagcagtggggaatattgcacaatgggggaaaccctgatgcagcaacgccgcgtgagtgaagaagtatttcggtatgtaaagctctatcagcagggaagataatgacggtacctgactaagaagctccggctaaatacgtgccagcagccgcggtaatacgtatggagcaagcgttatccggatttactgggtgtaaagggtgcgtaggtggcagtgcaagtcagatgtgaaaggccggggctcaaccccggagctgcatttgaaactgcatagctagagtacaggagaggcaggcggaattcctagtgtagcggtgaaatgcgtagatattaggaggaacaccagtggcgaaggcggcctgctggactgttactgacactgaggcacgaaagcgtggggagcaaacaggattagataccctggtagtccacgccgtaaacgatgaatactaggtgtcggggccgtataggcttcggtgccgtcgcaaacgcagtaagtattccacctggggagtacgttcgcaagaatgaaactcaaaggaattgacggggacccgcacaagcggtggagcatgtggtttaattcgaagcaacgcgaagaaccttaccaggtcttgacatccttctgaccactccgtaatgggagtcttccttcgggacagaagagacaggtggtgcatggttgtcgtcagctcgtgtcgtgagatgttgggttaagtcccgcaacgagcgcaacccctatcttcagtagccagcaggtaaggctgggcactctggagagactgccagggataacctggaggaaggtggggacgacgtcaaatcatcatgccccttatgatctgggcgacacacgtgctacaatggcggtcacaaagtgaggcaaacccgcgagggggagcaaaccacaaaaaggccgtcccagttcggactgtagtctgcaacccgactacacgaagctggaatcgctagtaatcgcgaatcagaatgtcgcggtgaatacgttcccgggtcttgtacacaccgcccgtcacaccatgggagtcggaaatgcccgaagccagtgacccaaccttttggagggagctgtcgaaggtggagccggtaactggggtgaagtcgtaacaaggtagccgtatcggaaggtgcggctggatcacctccttt

SEQ ID NO: 745 - DNA, 1517 bp, artificial sequence
  >GCF_900240385.1_00007 [Clostridium]_minihomine
tttagagagtttgatcctggctcaggacgaacgctggcggcatgcctaacacatgcaagtcgaacggagtaagagataagcttgcttaactcttacttagtggcggacgggtgagtaacgcgtgagtaacctgcctttcagagggggataacgttctgaaaagaacgctaataccgcatgatatatcggtgtcgcatggcactgatatcaaaggagcaatccgctgaaagatggactcgcgtccgattagccagttggcggggtaatggcccaccaaagcgacgatcggtagccgggttgagagactggacggccacattgggactgagacacggcccagactcctacgggaggcagcagtgggggatattgcacaatggaggaaactctgatgcagcaatgccgcgtgagggaagacggtcttcggattgtaaacctctgtccttggtgaagataatgacggtagccaaggaggaagctccggctaactacgtgccagcagccgcggtaatacgtagggagcaagcgttgtccggatttactgggtgtaaagggtgcgtaggcggcttttcaagtcgggcgtgaaagctgtgggcttaacccacaaattgcgttcgaaactggagagcttgagtgaagtagaggtaggcggaattcccggtgtagcggtgaaatgcgtagagatcgggaggaacaccagtggcgaaggcggcctactgggctttaactgacgctgaggcacgaaagcatgggtagcaaacaggattagataccctggtagtccatgccgtaaacgatgattactaggtgtggggggtctgaccccttccgtgccggagttaacacaataagtaatccacctggggagtacggccgcaaggctgaaactcaaaggaattgacgggggcccgcacaagcagtggagtatgtggtttaattcgaagcaacgcgaagaaccttaccaggtcttgacatccaactaacgaagcagagatgcattaggtgcccttcggggaaagttgagacaggtggtgcatggttgtcgtcagctcgtgtcgtgagatgttgggttaagtcccgcaacgagcgcaacccctgtgattagttgctacgcaagagcactctaatcagactgccgttgacaaaacggaggaaggtggggacgacgtcaaatcatcatgccccttatgacctgggctacacacgtactacaatggtcgttaacaacgggaagctaagccgcgaggtggcgcaaatccccaaaaacggtctcagttcggattgtaggctgcaacccgcctacatgaagttggaattgctagtaatcgcggatcagcatgccgcggtgaatacgttcccgggccttgtacacaccgcccgtcacaccacgggagccggtaatacccgaagccgatagtctaaccgcaaggaggacgtcgtcgaaggtaggattggcgactggggtgaagtcgtaacaaggtagccgtatcggaaggtgcggctggatcacctccttt

SEQ ID NO: 746 - DNA, 1505 bp, artificial sequence; identical to SEQ ID NO: 135
  STR00241.1_Blautia_wexlerae

SEQ ID NO: 747 - DNA, 1013 bp, artificial sequence; identical to SEQ ID NO: 136
  STR00245.1_Blautia_wexlerae

SEQ ID NO: 748 - DNA, 1372 bp, artificial sequence; identical to SEQ ID NO: 139
  STR00185.1_Blautia_wexlerae

SEQ ID NO: 749 - DNA, 1533 bp, artificial sequence
  STR00441_Holdemania_filiformis
atggagagtttgatcctggctcaggatgaacgctggcggcgtgcctaatacatgcaagtcgaacgcttgcttgaggacttgtcttcaagcaggagtggcgaacgggtgagtaatacataagcaatctgcccatcggcctgggataacagttggaaacgactgctaataccggataggtgatgaagaggcatctctcgatcattaaagttgggatacaacacggatggatgagcttatggcgtattagctagtaggtgaggtaacggctcacctaggcgatgatacgtagccgacctgagagggtgaccggccacattgggactgagacacggcccaaactcctacgggaggcagcagtagggaattttcggcaatgggcgaaagcctgaccgagcaacgccgcgtgagtgaagaaggccttcgggttgtaaagctctgttgtgaaggaagaacggctcatacagggaatggtatgggagtgacggtactttaccagaaagccacggctaactacgtgccagcagccgcggtaatacgtaggtggcgagcgttatccggaattattgggcgtaaagggtgcgcaggcggtttgttaagtttaaggtgaaagcgtggggcttaaccccatatagccttagaaactgacagactagagtacaggagagggcaatggaattccatgtgtagcggtaaaatgcgtagatatatggaggaacaccagtggcgaaggcggttgcctggcctgtaactgacgctcatgcacgaaagcgtggggagcaaataggattagataccctagtagtccacgccgtaaacgatgagaactaagtgttggggaaactcagtgctgcagttaacgcaataagttctccgcctggggagtatgcacgcaagtgtgaaactcaaaggaattgacgggggcccgcacaagcggtggagtatgtggtttaattcgacgcaacgcgaagaaccttaccaggtcttgacatcccctgcaaagacatagagatatgttggaggttatcagggagacaggtggtgcatggttgtcgtcagctcgtgtcgtgagatgttgggttaagtcccgcaacgagcgcaacccttgtctttagttgctaacattaagttgaggactctagagagactgccggtgacaaaccggaggaaggtggggatgacgtcaaatcatcatgccccttatgacctgggctacacacgtactacaatggcggatacaacgagaagcaagacagtgatgtggagcaaaactcagaaagtccgtctcagttcggattgaagtctgcaacccgacttcatgaagccggaatcgctagtaatcgcggatcagcatgccgcggtgaatacgttctcgggccttgtacacaccgcccgtcaaaccatgagagttggcaatacccgaagccggtggcctaacctcgcaagaggagggagccgtcgaaggtagggctgatgattggggttaagtcgtaacaaggtatccctacgggaacgtggggatggatcacctccttt

SEQ ID NO: 750 - DNA, 1240 bp, artificial sequence; identical to SEQ ID NO: 143
  STR00473.1_Blautia_wexlerae

SEQ ID NO: 751 - DNA, 1527 bp, artificial sequence; identical to SEQ ID NO: 145
  STR00485.1_Blautia_wexlerae

SEQ ID NO: 752 - DNA, 1527 bp, artificial sequence; identical to SEQ ID NO: 146
  STR00497.1_Blautia_wexlerae

SEQ ID NO: 753 - DNA, 1515 bp, artificial sequence
  STR00524_Acetatifactor_sp1
atgagagtttgatcctggctcaggatgaacgctggcggcgtgcctaacacatgcaagtcgaacggacttttcatgaagcctagcgattgaaaagttagtggcggacgggtgagtaacgcgtgggtaacctgccttgtactgggggacaacagttggaaacgactgctaataccgcataagcgcacagcttcgcatgaagcagtgtgaaaaactccggtggtacaagatggacccgcgtctgattagctggttggtgaggtaacggcccaccaaggcgacgatcagtagccggcctgagagggtgaacggccacattgggactgagacacggcccaaactcctacgggaggcagcagtggggaatattgcacaatgggggaaaccctgatgcagcaacgccgcgtgagtgaagaagtatttcggtatgtaaagctctatcagcaggaaagaaaatgacggtacctgactaagaagccccggctaactacgtgccagcagccgcggtaatacgtagggggcaagcgttatccggatttactgggtgtaaagggagcgtagacggttttgcaagtctgaagtgaaagcccggggcttaaccccgggactgctttggaaactgtagaactagagtgcaggagaggtaagtggaattcctagtgtagcggtgaaatgcgtagatattaggaggaacaccagtggcgaaggcggcttactggactgtaactgacgttgaggctcgaaagcgtggggagcaaacaggattagataccctggtagtccacgccgtaaacgatgattactaggtgttggtgggtacgacccatcggtgccgcagcaaacgcaataagtaatccacctggggagtacgttcgcaagaatgaaactcaaaggaattgacggggacccgcacaagcggtggagcatgtggtttaattcgaagcaacgcgaagaaccttacctggtcttgacatccctatgaataacgggcaatgccgttagtacttcggtacataggagacaggtggtgcatggttgtcgtcagctcgtgtcgtgagatgttgggttaagtcccgcaacgagcgcaacccttatctttagtagccagcagtaagatgggcactctagagagactgccggggataacccggaggaaggtggggatgacgtcaaatcatcatgccccttatgaccagggctacacacgtgctacaatggcgtaaacaaagagaagcgaagtcgtgaggcagagcgaatctcaaaaataacgtctcagttcggattgtagtctgcaactcgactacatgaagctggaatcgctagtaatcgcagatcagaatgctgcggtgaatacgttcccgggtcttgtacacaccgcccgtcacaccatgggagtcggaaatgcccgaagtcggtgacctaaccgcaaggaaggagccgccgaaggcaggtctgataactggggtgaagtcgtaacaaggtagccgtatcggaaggtgcggctggatcacctccttt

SEQ ID NO: 754 - DNA, 1524 bp, artificial sequence
  STR00541_Blautia_caecimuris
gagagtttgatcctggctcaggatgaacgctggcggcgtgcttaacacatgcaagtcgaacggggaacattttatggaagcttcggtggaaatagcttgttcctagtggcggacgggtgagtaacgcgtgggtaacctgcctcacactgggggataacagtcagaaatgactgctaataccgcataagcgcacgggattgcatgatccagtgtgaaaaactccggtggtgtgagatggacccgcgttggattagccagttggcagggtaacggcctaccaaagcgacgatccatagccggcctgagagggtggacggccacattgggactgagacacggcccagactcctacgggaggcagcagtggggaatattgcacaatgggggaaaccctgatgcagcgacgccgcgtgaaggaagaagtatctcggtatgtaaacttctatcagcagggaagaaaatgacggtacctgactaagaagccccggctaactacgtgccagcagccgcggtaatacgtagggggcaagcgttatccggatttactgggtgtaaagggagcgtagacggagcagcaagtctgatgtgaaaggcaggggctcaacccctggactgcattggaaactgttgatcttgagtaccggagaggtaagcggaattcctagtgtagcggtgaaatgcgtagatattaggaggaacaccagtggcgaaggcggcttactggacggtaactgacgttgaggctcgaaagcgtggggagcaaacaggattagataccctggtagtccacgccgtaaacgatgaatactaggtgtcgggtggcagagccattcggtgccgcagcaaacgcagtaagtattccacctggggagtacgttcgcaagaatgaaactcaaaggaattgacggggacccgcacaagcggtggagcatgtggtttaattcgaagcaacgcgaagaaccttaccaagtcttgacatcccgatgaccggcacgtaacggtgccttctcttcggagcatcggagacaggtggtgcatggttgtcgtcagctcgtgtcgtgagatgttgggttaagtcccgcaacgagcgcaacccctatccttagtagccagcggtttggccgggcactctgaggagactgccagggataacctggaggaaggcggggatgacgtcaaatcatcatgccccttatgatttgggctacacacgtgctacaatggcgtaaacaaagggaagcgagagtgtgagcttaagcaaatcccaaaaataacgtcccagttcggactgcagtctgcaactcgactgcacgaagctggaatcgctagtaatcgcggatcagaatgccgcggtgaatacgttcccgggtcttgtacacaccgcccgtcacaccatgggagtcagtaacgcccgaagtcagtgaccgaaccgaaaggacggagctgccgaaggcgggacggatgactggggtgaagtcgtaacaaggtagccgtatcggaaggtgcggctggatcacctccttt

SEQ ID NO: 755 - DNA, 1529 bp, artificial sequence
  STR00592_Anaerobutyricum_hallii
atttgagagtttgatcctggctcaggatgaacgctggcggcgtgcctaacacatgcaagtcgaacgaagcaccttttgagattcttcggatgattgattggtgactgagtggcggacgggtgagtaacgcgtgggtaacctgccctgtacagggggataacagctggaaacggctgctaataccgcataagcgcacgaggagacatctccttgtgtgaaaaactccggtggtacaggatgggcccgcgtctgattagctggttggcagggtaacggcctaccaaggcaacgatcagtagccggtctgagaggatgaacggccacattggaactgagacacggtccaaactcctacgggaggcagcagtggggaatattgcacaatgggggaaaccctgatgcagcaacgccgcgtgagtgaagaagtatttcggtatgtaaagctctatcagcagggaagataatgacggtacctgactaagaagctccggctaaatacgtgccagcagccgcggtaatacgtatggagcaagcgttatccggatttactgggtgtaaagggtgcgtaggtggcagtgcaagtcagatgtgaaaggccggggctcaaccccggagctgcatttgaaactgctcggctagagtacaggagaggcaggcggaattcctagtgtagcggtgaaatgcgtagatattaggaggaacaccagtggcgaaggcggcctgctggactgttactgacactgaggcacgaaagcgtggggagcaaacaggattagataccctggtagtccacgccgtaaacgatgaatactaggtgtcggggccgtataggcttcggtgccgccgctaacgcagtaagtattccacctggggagtacgttcgcaagaatgaaactcaaaggaattgacggggacccgcacaagcggtggagcatgtggtttaattcgaagcaacgcgaagaaccttaccaggtcttgacatccttctgaccgcaccttaatcggtgctttccttcgggacagaagagacaggtggtgcatggttgtcgtcagctcgtgtcgtgagatgttgggttaagtcccgcaacgagcgcaacccctatcttcagtagccagcaggtaaggctgggcactctggagagactgccagggataacctggaggaaggtggggacgacgtcaaatcatcatgccccttatgatctgggcgacacacgtgctacaatggcggtcacagagtgaggcgaacccgcgagggggagcaaaccacaaaaaggccgtcccagttcggactgtagtctgcaacccgactacacgaagctggaatcgctagtaatcgcgaatcagaatgtcgcggtgaatacgttcccgggtcttgtacacaccgcccgtcacaccatgggagtcggaaatgcccgaagccagtgacccaacctttatggagggagctgtcgaaggtggagccggtaactggggtgaagtcgtaacaaggtagccgtatcggaaggtgcggctggatcacctccttt

SEQ ID NO: 756 - DNA, 1530 bp, artificial sequence
  STR00603_Blautia_caecimuris
tacagagagtttgatcctggctcaggatgaacgctggcggcgtgcttaacacatgcaagtcgaacggggattattttgacagagacttcggttgaagtcgttataatcctagtggcggacgggtgagtaacgcgtgggtaacctgcctcacactgggggataacagtcagaaatgactgctaataccgcataagcgcacagagctgcatggctcagtgtgaaaaactccggtggtgtgagatggacccgcgttggattagccagttggcagggtaacggcctaccaaagcgacgatccatagccggcctgagagggtggacggccacattgggactgagacacggcccagactcctacgggaggcagcagtggggaatattgcacaatgggggaaaccctgatgcagcgacgccgcgtgaaggaagaagtatctcggtatgtaaacttctatcagcagggaagaaaatgacggtacctgactaagaagccccggctaactacgtgccagcagccgcggtaatacgtagggggcaagcgttatccggatttactgggtgtaaagggagcgtagacggagcagcaagtctgatgtgaaaggcgggggctcaacccccggactgcattggaaactgttgatcttgagtaccggagaggtaagcggaattcctagtgtagcggtgaaatgcgtagatattaggaggaacaccagtggcgaaggcggcttactggacggtaactgacgttgaggctcgaaagcgtggggagcaaacaggattagataccctggtagtccacgccgtaaacgatgaatactaggtgtcgggtggcagagccattcggtgccgcagcaaacgcagtaagtattccacctggggagtacgttcgcaagaatgaaactcaaaggaattgacggggacccgcacaagcggtggagcatgtggtttaattcgaagcaacgcgaagaaccttaccaagtcttgacatccctctgaccggtgagtaacgtcacctttccttcgggacagaggagacaggtggtgcatggttgtcgtcagctcgtgtcgtgagatgttgggttaagtcccgcaacgagcgcaacccctatccttagtagccagcggtttggccgggcactctgaggagactgccagggataacctggaggaaggcggggatgacgtcaaatcatcatgccccttatgatttgggctacacacgtgctacaatggcgtaaacaaagggaagcgagagtgtgagcttaagcaaatcccaaaaataacgtcccagttcggactgcagtctgcaactcgactgcacgaagctggaatcgctagtaatcgcggatcagaatgccgcggtgaatacgttcccgggtcttgtacacaccgcccgtcacaccatgggagtcagtaacgcccgaagtcagtgaccgaaccgaaaggacggagctgccgaaggcgggacggatgactggggtgaagtcgtaacaaggtagccgtatcggaaggtgcggctggatcacctccttt

SEQ ID NO: 757 - DNA, 1528 bp, artificial sequence; identical to SEQ ID NO: 148
  STR00635.1_Blautia_wexlerae

SEQ ID NO: 758 - DNA, 1529 bp, artificial sequence
  STR00745_Dysosmobacter_welbionis
tatagagagtttgatcctggctcaggacgaacgctggcggcgtgcttaacacatgcaagtcgaacggagcacccttgactgaggtttcggccaaatgataggaatgcttagtggcggactggtgagtaacgcgtgaggaacctaccttccagagggggacaacagttggaaacgactgctaataccgcatgacgcatgaccggggcatcccgggcatgtcaaagattttatcgctggaagatggcctcgcgtctgattagctagatggtggggtaacggcccaccatggcgacgatcagtagccggactgagaggttgaccggccacattgggactgagatacggcccagactcctacgggaggcagcagtggggaatattgggcaatggacgcaagtctgacccagcaacgccgcgtgaaggaagaaggctttcgggttgtaaacttcttttgtcagggaagagtagaagacggtacctgacgaataagccacggctaactacgtgccagcagccgcggtaatacgtaggtggcaagcgttgtccggatttactgggtgtaaagggcgtgcagccgggccggcaagtcagatgtgaaatctggaggcttaacctccaaactgcatttgaaactgtaggtcttgagtaccggagaggttatcggaattccttgtgtagcggtgaaatgcgtagatataaggaagaacaccagtggcgaaggcggataactggacggcaactgacggtgaggcgcgaaagcgtggggagcaaacaggattagataccctggtagtccacgctgtaaacgatggatactaggtgtgcggggactgaccccctgcgtgccgcagttaacacaataagtatcccacctggggagtacgatcgcaaggttgaaactcaaaggaattgacgggggcccgcacaagcggtggattatgtggtttaattcgaagcaacgcgaagaaccttaccagggcttgacatcctactaacgaagtagagatacatcaggtgcccttcggggaaagtagagacaggtggtgcatggttgtcgtcagctcgtgtcgtgagatgttgggttaagtcccgcaacgagcgcaacccctattgttagttgctacgcaagagcactctagcgagactgccgttgacaaaacggaggaaggtggggacgacgtcaaatcatcatgccccttatgtcctgggctacacacgtaatacaatggcggtcaacagagggaggcaaagccgcgaggcagagcaaacccccaaaagccgtcccagttcggatcgcaggctgcaacccgcctgcgtgaagtcggaatcgctagtaatcgcggatcagcatgccgcggtgaatacgttcccgggccttgtacacaccgcccgtcacaccatgagagtcgggaacacccgaagtccgtagcctaaccgcaaggagggcgcggccgaaggtgggttcgataattggggtgaagtcgtaacaaggtagccgtatcggaaggtgcggctggatcacctccttt

SEQ ID NO: 759 - DNA, 1062 bp, artificial sequence; identical to SEQ ID NO: 156
  STR00899.1_Blautia_wexlerae

SEQ ID NO: 760 - DNA, 1515 bp, artificial sequence
  STR00914_Acetatifactor_sp1
atgagagtttgatcctggctcaggatgaacgctggcggcgtgcctaacacatgcaagtcgaacggacttacaatgaagcctagcgatagaaaagttagtggcggacgggtgagtaacgcgtgggtaacctgccttgtactgggggacaacagttggaaacgactgctaataccgcataagcgcacagcttcgcatgaagcagtgtgaaaaactccggtggtacaagatggacccgcgtctgattagctggttggtgaggtaacggcccaccaaggcgacgatcagtagccggcctgagagggtgaacggccacattgggactgagacacggcccaaactcctacgggaggcagcagtggggaatattgcacaatgggggaaaccctgatgcagcaacgccgcgtgagtgaagaagtatttcggtatgtaaagctctatcagcaggaaagaaaatgacggtacctgactaagaagccccggctaactacgtgccagcagccgcggtaatacgtagggggcaagcgttatccggatttactgggtgtaaagggagcgtagacggttttgcaagtctgaagtgaaagcccggggcttaaccccgggactgctttggaaactgtagaactagagtgcaggagaggtaagtggaattcctagtgtagcggtgaaatgcgtagatattaggaggaacaccagtggcgaaggcggcttactggactgtaactgacgttgaggctcgaaagcgtggggagcaaacaggattagataccctggtagtccacgccgtaaacgatgattactaggtgttggtgggtatgacccatcggtgccgcagcaaacgcaataagtaatccacctggggagtacgttcgcaagaatgaaactcaaaggaattgacggggacccgcacaagcggtggagcatgtggtttaattcgaagcaacgcgaagaaccttacctggtcttgacatccctatgaataacgggcaatgccgttagtacttcggtacataggagacaggtggtgcatggttgtcgtcagctcgtgtcgtgagatgttgggttaagtcccgcaacgagcgcaacccttatctttagtagccagcagtaagatgggcactctagagagactgccggggataacccggaggaaggtggggatgacgtcaaatcatcatgccccttatgaccagggctacacacgtgctacaatggcgtaaacaaagagaagcgaagtcgtgaggcagagcgaatctcaaaaataacgtctcagttcggattgtagtctgcaactcgactacatgaagctggaatcgctagtaatcgcagatcagaatgctgcggtgaatacgttcccgggtcttgtacacaccgcccgtcacaccatgggagtcggaaatgcccgaagtcggtgacctaaccgcaaggaaggagccgccgaaggcaggtctgataactggggtgaagtcgtaacaaggtagccgtatcggaaggtgcggctggatcacctccttt

SEQ ID NO: 761 - DNA, 1527 bp, artificial sequence; identical to SEQ ID NO: 168
  STR01611.1_Blautia_wexlerae

SEQ ID NO: 762 - DNA, 1527 bp, artificial sequence; identical to SEQ ID NO: 169
  STR01613.3_Blautia_wexlerae

SEQ ID NO: 763 - DNA, 1398 bp, artificial sequence; identical to SEQ ID NO: 170
  STR01636.1_Blautia_wexlerae

SEQ ID NO: 764 - DNA, 1535 bp, artificial sequence
  STR01781_Holdemania_massiliensis
atggagagtttgatcctggctcaggatgaacgctggcggcgtgcctaatacatgcaagtcgaacgctttgtaaaggagcttgcttctttacgaggagtggcgaacgggtgagtaatacataagcaatctgcccatcggcctgggataacagttggaaacggctgctaataccggataggttagtctttggcatcagggactaattaaagttgggatacaacacggatggatgagcttatggcgtattagctagtaggtgaggtaacggcccacctaggcgatgatacgtagccgacctgagagggtgaccggccacattgggactgagacacggcccaaactcctacgggaggcagcagtagggaattttcggcaatgggcgaaagcctgaccgagcaacgccgcgtgagtgaagaaggccttcgggttgtaaagctctgttgtgaaggaagaacggctcatagagggaatgctatgggagtgacggtactttaccagaaagccacggctaactacgtgccagcagccgcggtaatacgtaggtggcgagcgttatccggaattattgggcgtaaagggtgcgcaggcggtttgaaaagtttaaggtgaaagcgtggggcttaaccccatacagccttagaaactgtcagactagagtacaggagagggcaatggaattccatgtgtagcggtaaaatgcgtagatatatggaggaacaccagtggcgaaggcggttgcctggcctgtaactgacgctcatgcacgaaagcgtggggagcaaataggattagataccctagtagtccacgccgtaaacgatgagaactaagtgttggggaaactcagtgctgcagttaacgcaataagttctccgcctggggagtatgcacgcaagtgtgaaactcaaaggaattgacgggggcccgcacaagcggtggagtatgtggtttaattcgacgcaacgcgaagaaccttaccaggtcttgacataccaggcaaagctatagagatatagtggaggctatcctggatacaggtggtgcatggttgtcgtcagctcgtgtcgtgagatgttgggttaagtcccgcaacgagcgcaacccttgtctttagttactaacattaagttgaggactctagagagactgccggtgacaaaccggaggaaggtggggatgacgtcaaatcatcatgccccttatgacctgggctacacacgtactacaatggcggatacaacgagaagcaagacagcaatgtggagcaaacctcagaaagtccgtctcagttcggattgaagtctgcaacccgacttcatgaagccggaatcgctagtaatcgcggatcagcatgccgcggtgaatacgttctcgggccttgtacacaccgcccgtcaaaccatgagagttggcaatacccgaagccggtggcctaaccctgcaaagggagggagccgtcgaaggtagggctgatgattggggttaagtcgtaacaaggtatccctacgggaacgtggggatggatcacctccttt

SEQ ID NO: 765 - DNA, 1422 bp, artificial sequence
  STR01960_Blautia_caecimuris
ctagtggcggacgggtgagtaacgcgtgggtaacctgcctcacactgggggataacagtcagaaatgactgctaataccgcataagcgcacgggattgcatgatccagtgtgaaaaactccggtggtgtgagatggacccgcgttggattagccagttggcagggtaacggcctaccaaagcgacgatccatagccggcctgagagggtggacggccacattgggactgagacacggcccagactcctacgggaggcagcagtggggaatattgcacaatgggggaaaccctgatgcagcgacgccgcgtgaaggaagaagtatctcggtatgtaaacttctatcagcagggaagaaaatgacggtacctgactaagaagccccggctaactacgtgccagcagccgcggtaatacgtagggggcaagcgttatccggatttactgggtgtaaagggagcgtagacggagcagcaagtctgatgtgaaaggcgggggctcaacccccggactgcattggaaactgttgatcttgagtaccggagaggtaagcggaattcctagtgtagcggtgaaatgcgtagatattaggaggaacaccagtggcgaaggcggcttactggacggtaactgacgttgaggctcgaaagcgtggggagcaaacaggattagataccctggtagtccacgccgtaaacgatgaatactaggtgtcgggtggcagagccattcggtgccgcagcaaacgcagtaagtattccacctggggagtacgttcgcaagaatgaaactcaaaggaattgacggggacccgcacaagcggtggagcatgtggtttaattcgaagcaacgcgaagaaccttaccaagtcttgacatcccgatgaccggcacgtaacggtgccttctcttcggagcatcggagacaggtggtgcatggttgtcgtcagctcgtgtcgtgagatgttgggttaagtcccgcaacgagcgcaacccctatccttagtagccagcggtttggccgggcactctgaggagactgccagggataacctggaggaaggcggggatgacgtcaaatcatcatgccccttatgatttgggctacacacgtgctacaatggcgtaaacaaagggaagcgagagtgtgagcttaagcaaatcccaaaaataacgtcccagttcggactgcagtctgcaactcgactgcacgaagctggaatcgctagtaatcgcggatcagaatgccgcggtgaatacgttcccgggtcttgtacacaccgcccgtcacaccatgggagtcagtaacgcccgaagtcagtgaccgaaccgaaaggacggagctgccgaaggcgggacggatgactggggtgaagtcgtaacaaggtagccgtatcggaaggtgcggctggatcacctccttt

SEQ ID NO: 766 - DNA, 1528 bp, artificial sequence
  STR02115_Anaerobutyricum_hallii
atttgagagtttgatcctggctcaggatgaacgctggcggcgtgcctaacacatgcaagtcgaacgaagcaccttttaagattcttcggatgattgattggtgactgagtggcggacgggtgagtaacgcgtgggtaacctgccctgtacagggggataacagttggaaacggctgctaataccgcataagcgcacgagaggacatcctcttgtgtgaaaaactccggtggtacaggatgggcccgcgtctgattagctggttggcagggtaacggcctaccaaggcgacgatcagtagccggtctgagaggatgaacggccacattggaactgagacacggtccaaactcctacgggaggcagcagtggggaatattgcacaatgggggaaaccctgatgcagcaacgccgcgtgagtgaagaagtatttcggtatgtaaagctctatcagcagggaagataatgacggtacctgactaagaagctccggctaaatacgtgccagcagccgcggtaatacgtatggagcaagcgttatccggatttactgggtgtaaagggtgcgtaggtggcagtgcaagtcagatgtgaaaggccggggctcaaccccggagctgcatttgaaactgcatagctagagtacaggagaggcaggcggaattcctagtgtagcggtgaaatgcgtagatattaggaggaacaccagtggcgaaggcggcctgctggactgttactgacactgaggcacgaaagcgtggggagcaaacaggattagataccctggtagtccacgccgtaaacgatgaatactaggtgtcggggccgtataggcttcggtgccgtcgcaaacgcagtaagtattccacctggggagtacgttcgcaagaatgaaactcaaaggaattgacggggacccgcacaagcggtggagcatgtggtttaattcgaagcaacgcgaagaaccttaccaggtcttgacatccttctgaccactccgtaatgggagtcttccttcgggacagaagagacaggtggtgcatggttgtcgtcagctcgtgtcgtgagatgttgggttaagtcccgcaacgagcgcaacccctatcttcagtagccagcaggtaaggctgggcactctggagagactgccagggataacctggaggaaggtggggacgacgtcaaatcatcatgccccttatgatctgggcgacacacgtgctacaatggcggtcacaaagtgaggcgaacctgcgagggggagcaaaccacaaaaaggccgtcccagttcggactgtagtctgcaacccgactacacgaagctggaatcgctagtaatcgcgaatcagaatgtcgcggtgaatacgttcccgggtcttgtacacaccgcccgtcacaccatgggagtcggaaatgcccgaagccagtgacccaaccttttggagggagctgtcgaaggtggagccggtaactggggtgaagtcgtaacaaggtagccgtatcggaaggtgcggctggatcacctccttt

SEQ ID NO: 767 - DNA, 1509 bp, artificial sequence
  STR02166_Akkermansia_muciniphila
atggagagtttgattctggctcagaacgaacgctggcggcgtggataagacatgcaagtcgaacgggagaattgctagcttgctaataattctctagtggcgcacgggtgagtaacacgtgagtaacctgcctcttagtgggggatagccctgggaaaccgggattaataccgcatacgattgaaagatcaaagcagcaatgcgctaggagatgggctcgcggcctattagttagttggtgaggtaacggctcaccaaggcgatgacgggtagccggtctgagaggatgtccggccacactggaactgagacacggtccagacacctacgggtggcagcagtcgagaatcattcacaatgggggcaaccctgatggtgcgacgccgcgtgggggaatgaaggtcttcggattgtaaacccctgtcatgtgggagcaaattaaaaagatagtaccacaagaggaagagacggctaactctgtgccagcagccgcggtaatacagaggtctcaagcgttgttcggaatcactgggcgtaaagcgtgcgtaggctgtttcgtaagtcgtgtgtgaaaggcaggggctcaacccctggattgcacatgatactgcgagactagagtaatggagggggaaccggaattctcggtgtagcagtgaaatgcgtagatatcgagaggaacactcgtggcgaaggcgggttcctggacattaactgacgctgaggcacgaaggccaggggagcgaaagggattagatacccctgtagtcctggcagtaaacggtgcacgcttggtgtgcggggaatcgaccccctgcgtgccggagctaacgcgttaagcgtgccgcctggggagtacggtcgcaagattaaaactcaaagaaattgacggggacccgcacaagcggtggagtatgtggcttaattcgatgcaacgcgaagaaccttacctgggcttgacatgtaatgaacaacatgtgaaagcatgcgactcttcggaggcgttacacaggtgctgcatggccgtcgtcagctcgtgtcgtgagatgtttggttaagtccagcaacgagcgcaacccctgttgccagttaccatcgagtaatgtcggggactctggcgagactgcccagatcaactgggaggaaggtggggacgacgtcaggtcagtatggcccttatgcccagggctgcacacgtactacaatgcccagtacagagggggccgaagccgcgaggcggaggaaatcctgaaaactgggcccagttcggactgtaggctgcaacccgcctacacgaagccggaatcgctagtaatggcgcatcagctacggcgccgtgaatacgttcccgggtcttgtacacaccgcccgtcacatcatggaagccggtcgcacccgaagtatctgaagccaaccgcaaggaggcagggtcctaaggtgagactggtaactgggatgaagtcgtaacaaggtagccgtaggggaacctgcggctggatcacctccttt

SEQ ID NO: 768 - DNA, 1515 bp, artificial sequence
  STR02267_Acetatifactor_sp1
atgagagtttgatcctggctcaggatgaacgctggcggcgtgcctaacacatgcaagtcgaacggacttttcatgaagcctagcgattggaaagttagtggcggacgggtgagtaacgcgtgggtaacctgccttgtactgggggacaacagttggaaacgactgctaataccgcataagcgcacagcttcgcatgaagcagtgtgaaaaactccggtggtacaagatggacccgcgtctgattagctggttggtgaggtaacggcccaccaaggcaacgatcagtagccggcctgagagggtgaacggccacattgggactgagacacggcccaaactcctacgggaggcagcagtggggaatattgcacaatgggggaaaccctgatgcagcaacgccgcgtgagtgaagaagtatttcggtatgtaaagctctatcagcaggaaagaaaatgacggtacctgactaagaagccccggctaactacgtgccagcagccgcggtaatacgtagggggcaagcgttatccggatttactgggtgtaaagggagcgtagacggttttgcaagtctgaagtgaaagcccggggcttaaccccgggactgctttggaaactgtagaactagagtgcaggagaggtaagtggaattcctagtgtagcggtgaaatgcgtagatattaggaggaacaccagtggcgaaggcggcttactggactgtaactgacgttgaggctcgaaagcgtggggagcaaacaggattagataccctggtagtccacgccgtaaacgatgattactaggtgttggtgggtatgacccatcggtgccgcagcaaacgcaataagtaatccacctggggagtacgttcgcaagaatgaaactcaaaggaattgacggggacccgcacaagcggtggagcatgtggtttaattcgaagcaacgcgaagaaccttacctggtcttgacatccctatgaataacgggcaatgccgttagtacttcggtacataggagacaggtggtgcatggttgtcgtcagctcgtgtcgtgagatgttgggttaagtcccgcaacgagcgcaacccttatctttagtagccagcagtaagatgggcactctagagagactgccggggataacccggaggaaggtggggatgacgtcaaatcatcatgccccttatgaccagggctacacacgtgctacaatggcgtaaacaaagagaagcgaagtcgtgaggcagagcgaatctcaaaaataacgtctcagttcggattgtagtctgcaactcgactacatgaagctggaatcgctagtaatcgcagatcagaatgctgcggtgaatacgttcccgggtcttgtacacaccgcccgtcacaccatgggagtcggaaatgcccgaagtcggtgacctaaccgcaaggaaggagccgccgaaggcaggtctgataactggggtgaagtcgtaacaaggtagccgtatcggaaggtgcggctggatcacctccttt

SEQ ID NO: 769 - DNA, 1528 bp, artificial sequence; identical to SEQ ID NO: 178
  STR02414.1_Blautia_wexlerae

SEQ ID NO: 770 - DNA, 1527 bp, artificial sequence; identical to SEQ ID NO: 180
  STR02450.1_Blautia_wexlerae

SEQ ID NO: 771 - DNA, 1515 bp, artificial sequence
  STR02479_Acetatifactor_sp1
atgagagtttgatcctggctcaggatgaacgctggcggcgtgcctaacacatgcaagtcgaacggacttacattgaagcctagcgatatgtaagttagtggcggacgggtgagtaacgcgtgggtaacctgccttgtactgggggacaacagttggaaacgactgctaataccgcataagcgcacagcttcgcatgaagcagtgtgaaaaactccggtggtacaagatggacccgcgtctgattagctggttggtgaggtaacggcccaccaaggcaacgatcagtagccggcctgagagggtgaacggccacattgggactgagacacggcccaaactcctacgggaggcagcagtggggaatattgcacaatgggggaaaccctgatgcagcaacgccgcgtgagtgaagaagtatttcggtatgtaaagctctatcagcaggaaagaaaatgacggtacctgactaagaagccccggctaactacgtgccagcagccgcggtaatacgtagggggcaagcgttatccggatttactgggtgtaaagggagcgtagacggttttgcaagtctgaagtgaaagcccggggcttaaccccgggactgctttggaaactgtagaactagagtgcaggagaggtaagtggaattcctagtgtagcggtgaaatgcgtagatattaggaggaacaccagtggcgaaggcggcttactggactgtaactgacgttgaggctcgaaagcgtggggagcaaacaggattagataccctggtagtccacgccgtaaacgatgattactaggtgttggtgggtatgacccatcggtgccgcagcaaacgcaataagtaatccacctggggagtacgttcgcaagaatgaaactcaaaggaattgacggggacccgcacaagcggtggagcatgtggtttaattcgaagcaacgcgaagaaccttacctggtcttgacatccctatgaataacgggcaatgccgttagtacttcggtacataggagacaggtggtgcatggttgtcgtcagctcgtgtcgtgagatgttgggttaagtcccgcaacgagcgcaacccttatctttagtagccagcagtaagatgggcactctagagagactgccggggataacccggaggaaggtggggatgacgtcaaatcatcatgccccttatgaccagggctacacacgtgctacaatggcgtaaacaaagagaagcgaagtcgtgaggcagagcgaatctcaaaaataacgtctcagttcggattgtagtctgcaactcgactacatgaagctggaatcgctagtaatcgcagatcagaatgctgcggtgaatacgttcccgggtcttgtacacaccgcccgtcacaccatgggagtcggaaatgcccgaagtcggtgacctaaccgcaaggaaggagccgccgaaggcaggtctgataactggggtgaagtcgtaacaaggtagccgtatcggaaggtgcggctggatcacctccttt

SEQ ID NO: 772 - DNA, 1518 bp, artificial sequence; identical to SEQ ID NO: 182
  STR02509.1_Blautia_wexlerae

SEQ ID NO: 773 - DNA, 1424 bp, artificial sequence
  STR02541_Anaerobutyricum_hallii
ctgagtggcggacgggtgagtaacgcgtgggtaacctgccctgtacagggggataacagctggaaacggctgctaataccgcataagcgcacgaggagacatctccttgtgtgaaaaactccggtggtacaggatgggcccgcgtctgattagctggttggcagggtaacggcctaccaaggcaacgatcagtagccggtctgagaggatgaacggccacattggaactgagacacggtccaaactcctacgggaggcagcagtggggaatattgcacaatgggggaaaccctgatgcagcaacgccgcgtgagtgaagaagtatttcggtatgtaaagctctatcagcagggaagataatgacggtacctgactaagaagctccggctaaatacgtgccagcagccgcggtaatacgtatggagcaagcgttatccggatttactgggtgtaaagggtgcgtaggtggcagtgcaagtcagatgtgaaaggccggggctcaaccccggagctgcatttgaaactgcatagctagagtacaggagaggcaggcggaattcctagtgtagcggtgaaatgcgtagatattaggaggaacaccagtggcgaaggcggcctgctggactgttactgacactgaggcacgaaagcgtggggagcaaacaggattagataccctggtagtccacgccgtaaacgatgaatactaggtgtcggggccgtataggctccggtgccgccgctaacgcagtaagtattccacctggggagtacgttcgcaagaatgaaactcaaaggaattgacggggacccgcacaagcggtggagcatgtggtttaattcgaagcaacgcgaagaaccttaccaggtcttgacatccttctgaccactccgtaatgggagttttccttcgggacagaagagacaggtggtgcatggttgtcgtcagctcgtgtcgtgagatgttgggttaagtcccgcaacgagcgcaacccctatcttcagtagccagcaggtaaggctgggcactctggagagactgccagggataacctggaggaaggtggggacgacgtcaaatcatcatgccccttatgatctgggcgacacacgtgctacaatggcggtcacagagtgaggcgaacccgcgagggggagcaaaccacaaaaaggccgtcccagttcggactgtagtctgcaacccgactacacgaagctggaatcgctagtaatcgcgaatcagaatgtcgcggtgaatacgttcccgggtcttgtacacaccgcccgtcacaccatgggagtcggaaatgcccgaagccagtgacccaaccttttggagggagctgtcgaaggtggagccggtaactggggtgaagtcgtaacaaggtagccgtatcggaaggtgcggctggatcacctccttt

SEQ ID NO: 774 - DNA, 1565 bp, artificial sequence
  GCF_900103425.1_01161_[Allisonella]_histaminiformans
ttgaagagtttgatcatggctcagattgaacgctggcggcaggcctaacacatgcaagtcgagcggaaacagaaagtagcttgctactttgctgtcgagcggcggacgggtgagtaatgcctagggaactgcccagtcgagggggataacagttggaaacgactgctaataccgcatacgccctacgggggaaaggaggggacgcgtttttcgaagtgcgcctttcgcgattggatgtacctaggtgggattagctagttggtaaggtaatggcttaccaaggcgacgatccctagctggtctgagaggatgatcagccacactggaactgagacacggtccagactcctacgggaggcagcagtggggaatattgcacaatgggcgcaagcctgatgcagccatgccgcgtgtgtgaagaaggccttcgggttgtaaagcactttcagcgaggaggaaaggttgtagtttaataaactatagctgtgacgttactcgcagaagaagcaccggctaacttcgtgccagcagccgcggtaatacgaggggtgcaagcgttaatcggaattactgggcgtaaagcgtacgcaggcggtttgttaagcaagatgtgaaagccccgggctcaacctgggaattgcattttgaactggcaaactagagtcttgtagaggggggtagaatttcaggtgtagcggtgaaatgcgtagagatctgaaggaataccggtggcgaaggcggccccctggacaaagactgacgctgaggtacgaaagcgtggggagcaaacaggattagataccctggtagtccacgccgtaaacgatgtctactcggaatttggtgtcttgaacactgggttcccaagctaacgcattaagtagaccgcctggggagtacggccgcaaggttaaaactcaaatgaattgacgggggcccgcacaagcggtggagcatgtggtttaattcgatgcaacgcgaagaaccttacctactcttgacatccacagaattcgctagagatagcttagtgccttcgggaactgtgagacaggtgctgcatggctgtcgtcagctcgtgttgtgaaatgttgggttaagtcccgcaacgagcgcaacccttatccttatttgccagcacgtaatggtgggaactttagggagactgccggtgataaaccggaggaaggtggggacgacgtcaagtcatcatggcccttacgagtagggctacacacgtgctacaatggtcggtacagagggtcgcaacgccgcgaggtcaagctaatcccacaaagccggtcgtagtccggatcggagtctgcaactcgactccgtgaagtcggaatcgctagtaatcgtgaatcagaatgtcacggtgaatacgttcccgggccttgtacacaccgcccgtcacaccatgggagtgggctgcaccagaagtagatagcttaaccgttctttcctcggagagaatggagggcgtttaccacggtgtggttcatgactggggtgaagtcgtaacaaggtagccctaggggaacctggggctggatcacctcctt

SEQ ID NO: 775 - DNA, 1530 bp, artificial sequence
  STR00526_[Clostridium]_asparagiforme_group
atttgagagtttgatcctggctcaggatgaacgctggcggcgtgcctaacacatgcaagtcgaacgaagcattttagatgaagttttcggatggattctgagatgactgagtggcggacgggtgagtaacacgtggataacctgcctcacactgggggacaacagttagaaatgactgctaataccgcataagcgcacagtaccgcatggtacagtgtgaaaaactccggtggtgtgagatggatccgcgtctgattagccagttggcggggtaacggcccaccaaagcgacgatcagtagccgacctgagagggtgaccggccacattgggactgagacacggcccaaactcctacgggaggcagcagtggggaatattgcacaatgggcgaaagcctgatgcagcgacgccgcgtgagtgaagaagtatttcggtatgtaaagctctatcagcagggaagataatgacggtacctgactaagaagccccggctaactacgtgccagcagccgcggtaatacgtagggggcaagcgttatccggatttactgggtgtaaagggagcgtagacggcatggcaagtctgaagtgaaaacccagggctcaaccctgggactgctttggaaactgtcaagctagagtgcaggagaggtaagtggaattcctagtgtagcggtgaaatgcgtagatattaggaggaacaccagtggcgaaggcggcttactggactgtaactgacgttgaggctcgaaagcgtggggagcaaacaggattagataccctggtagtccacgccgtaaacgatgagtgctaggtgttggggggcaaagcccttcggtgccgtcgcaaacgcaataagcactccacctggggagtacgttcgcaagaatgaaactcaaaggaattgacggggacccgcacaagcggtggagcatgtggtttaattcgaagcaacgcgaagaaccttaccaagtcttgacatcctcttgaccggcgtgtaacggcgcctttccttcgggacaagagagacaggtggtgcatggttgtcgtcagctcgtgtcgtgagatgttgggttaagtcccgcaacgagcgcaacccttatccttagtagccagcaataagatgggcactctagggagactgccagggacaacctggaggaaggtggggatgacgtcaaatcatcatgccccttatgatttgggctacacacgtgctacaatggcgtaaacaaagggaagcgaccctgcgaaggtgagcaaatctcaaaaataacgtcccagttcggactgtagtctgcaacccgactacacgaagctggaatcgctagtaatcgcgaatcagaatgtcgcggtgaatacgttcccgggtcttgtacacaccgcccgtcacaccatgggagtcagcaacgcccgaagtcagtgacccaactcgcaagagagggagctgccgaaggcggggcaggtaactggggtgaagtcgtaacaaggtagccgtatcggaaggtgcggctggatcacctccttt

SEQ ID NO: 776 - DNA, 1528 bp, artificial sequence
  STR00666_[Clostridium]_asparagiforme_group
atttgagagtttgatcctggctcaggatgaacgctggcggcgtgcctaacacatgcaagtcgaacgaagcattttagatgaagttttcggatggattctgagatgactgagtggcggacgggtgagtaacacgtggataacctgcctcacactgggggacaacagttagaaatgactgctaataccgcataagcgcacagtaccgcatggtacggtgtgaaaaactccggtggtgtgagatggatccgcgtctgattagccagttggcggggtaacggcccaccaaagcgacgatcagtagccgacctgagagggtgaccggccacattgggactgagacacggcccaaactcctacgggaggcagcagtggggaatattgcacaatgggcgaaagcctgatgcagcgacgccgcgtgagtgaagaagtatttcggtatgtaaagctctatcagcagggaagataatgacggtacctgactaagaagccccggctaactacgtgccagcagccgcggtaatacgtagggggcaagcgttatccggatttactgggtgtaaagggagcgtagacggcatggcaagtctgaagtgaaaacccagggctcaaccctgggactgctttggaaactgtcaagctagagtgcaggagaggtaagtggaattcctagtgtagcggtgaaatgcgtagatattaggaggaacaccagtggcgaaggcggcttactggactgtaactgacgttgaggctcgaaagcgtggggagcaaacaggattagataccctggtagtccacgccgtaaacgatgagtgctaggtgttggggggcaaagcccttcggtgccgtcgcaaacgcaataagcactccacctggggagtacgttcgcaagaatgaaactcaaaggaattgacggggacccgcacaagcggtggagcatgtggtttaattcgaagcaacgcgaagaaccttaccaagtcttgacatcctcttgaccggcgtgtaacggcgcctttccttcgggacaagagagacaggtggtgcatggttgtcgtcagctcgtgtcgtgagatgttgggttaagtcccgcaacgagcgcaacccttatccttagtagccagcattaagatgggcactctagggagactgccagggacaacctggaggaaggtggggatgacgtcaaatcatcatgccccttatgatttgggctacacacgtgctacaatggcgtaaacaaagggaagcgaccctgcgaaggtgagcaaatctcaaaaataacgtcccagttcggactgtagtctgcaacccgactacacgaagctggaatcgctagtaatcgcgaatcagaatgtcgcggtgaatacgttcccgggtcttgtacacaccgcccgtcacaccatgggagtcagcaacgcccgaagtcagtgacccaaccgaaaggagggagctgccgaaggcggggcaggtaactggggtgaagtcgtaacaaggtagccgtatcggaaggtgcggctggatcacctccttt

SEQ ID NO: 777 - DNA, 1528 bp, artificial sequence; identical to SEQ ID NO: 776
  STR00695_[Clostridium]_asparagiforme_group

SEQ ID NO: 778 - DNA, 1528 bp, artificial sequence; identical to SEQ ID NO: 776
  STR00696_[Clostridium]_asparagiforme_group

SEQ ID NO: 779 - DNA, 820 bp, artificial sequence
  STR01102_[Clostridium]_asparagiforme_group
ggcgaaggcggcttactggactgtaactgacgttgaggctcgaaagcgtggggagcaaacaggattagataccctggtagtccacgccgtaaacgatgagtgctaggtgttggggggcaaagcccttcggtgccgtcgcaaacgcaataagcactccacctggggagtacgttcgcaagaatgaaactcaaaggaattgacggggacccgcacaagcggtggagcatgtggtttaattcgaagcaacgcgaagaaccttaccaagtcttgacatcctcttgaccggcgtgtaacgtcgcctttccttcgggacaggggagacaggtggtgcatggttgtcgtcagctcgtgtcgtgagatgttgggttaagtcccgcaacgagcgcaacccttatccttagtagccagcattgagatgggcactctagggagactgccagggacaacctggaggaaggtggggatgacgtcaaatcatcatgccccttatgatttgggctacacacgtgctacaatggcgtaaacaaagggaagcgaccctgcgaaggtgagcaaatctcaaaaataacgtcccagttcggactgtagtctgcaacccgactacacgaagctggaatcgctagtaatcgcgaatcagaatgtcgcggtgaatacgttcccgggtcttgtacacaccgcccgtcacaccatgggagtcagcaacgcccgaagtcagtgacccaactcgcaagagagggagctgccgaaggcggggcaggtaactggggtgaagtcgtaacaaggtagccgtatcggaaggtgcggctggatcacctccttt

SEQ ID NO: 780 - DNA, 1000 bp, artificial sequence
  STR01192_[Clostridium]_asparagiforme_group
gcaagcgttatccggatttactgggtgtaaagggagcgtagacggcatggcaagtctgaagtgaaaacccagggctcaaccctgggactgctttggaaactgtcaagctagagtgcaggagaggtaagtggaattcctagtgtagcggtgaaatgcgtagatattaggaggaacaccagtggcgaaggcggcttactggactgtaactgacgttgaggctcgaaagcgtggggagcaaacaggattagataccctggtagtccacgccgtaaacgatgagtgctaggtgttggggggcaaagcccttcggtgccgtcgcaaacgcaataagcactccacctggggagtacgttcgcaagaatgaaactcaaaggaattgacggggacccgcacaagcggtggagcatgtggtttaattcgaagcaacgcgaagaaccttaccaagtcttgacatcctcttgaccggcgtgtaacggcgcctttccttcgggacaggggagacaggtggtgcatggttgtcgtcagctcgtgtcgtgagatgttgggttaagtcccgcaacgagcgcaacccttatccttagtagccagcattaagatgggcactctagggagactgccagggacaacctggaggaaggtggggatgacgtcaaatcatcatgccccttatgatttgggctacacacgtgctacaatggcgtaaacaaagggaagcgaccctgcgaaggtgagcaaatctcaaaaataacgtcccagttcggactgtagtctgcaacccgactacacgaagctggaatcgctagtaatcgcgaatcagaatgtcgcggtgaatacgttcccgggtcttgtacacaccgcccgtcacaccatgggagtcagcaacgcccgaagtcagtgacccaactcgcaagagagggagctgccgaaggcggggcaggtaactggggtgaagtcgtaacaaggtagccgtatcggaaggtgcggctggatcacctccttt

SEQ ID NO: 781 - DNA, 1530 bp, artificial sequence
  STR01395_[Clostridium]_asparagiforme_group
atttgagagtttgatcctggctcaggatgaacgctggcggcgtgcctaacacatgcaagtcgaacgaagcatttcagatgaagttttcggatggattctgagatgactgagtggcggacgggtgagtaacacgtggataacctgcctcacactgggggacaacagttagaaatgactgctaataccgcataagcgcacagtaccgcatggtacagtgtgaaaaactccggtggtgtgagatggatccgcgtctgattagccagttggcggggtaacggcccaccaaagcgacgatcagtagccgacctgagagggtgaccggccacattgggactgagacacggcccaaactcctacgggaggcagcagtggggaatattgcacaatgggcgaaagcctgatgcagcgacgccgcgtgagtgaagaagtatttcggtatgtaaagctctatcagcagggaagataatgacggtacctgactaagaagccccggctaactacgtgccagcagccgcggtaatacgtagggggcaagcgttatccggatttactgggtgtaaagggagcgtagacggcatggcaagtctgaagtgaaaacccagggctcaaccctgggactgctttggaaactgtcaagctagagtgcaggagaggtaagtggaattcctagtgtagcggtgaaatgcgtagatattaggaggaacaccagtggcgaaggcggcttactggactgtaactgacgttgaggctcgaaagcgtggggagcaaacaggattagataccctggtagtccacgccgtaaacgatgagtgctaggtgttggggggcaaagcccttcggtgccgtcgcaaacgcaataagcactccacctggggagtacgttcgcaagaatgaaactcaaaggaattgacggggacccgcacaagcggtggagcatgtggtttaattcgaagcaacgcgaagaaccttaccaagtcttgacatccccctgaccggcgtgtaacggcgcctttccttcgggacaggggagacaggtggtgcatggttgtcgtcagctcgtgtcgtgagatgttgggttaagtcccgcaacgagcgcaacccttatccttagtagccagcattaagatgggcactctagggagactgccagggacaacctggaggaaggtggggatgacgtcaaatcatcatgccccttatgatttgggctacacacgtgctacaatggcgtaaacaaagggaagcgaccctgcgaaggtgagcaaatctcaaaaataacgtcccagttcggactgtagtctgcaacccgactacacgaagctggaatcgctagtaatcgcgaatcagaatgtcgcggtgaatacgttcccgggtcttgtacacaccgcccgtcacaccatgggagtcagcaacgcccgaagtcagtgacccaactcgcaagagagggagctgccgaaggcggggcaggtaactggggtgaagtcgtaacaaggtagccgtatcggaaggtgcggctggatcacctccttt

SEQ ID NO: 782 - DNA, 1433 bp, artificial sequence
  STR01398_[Clostridium]_asparagiforme_group
ttctgagatgactgagtggcggacgggtgagtaacacgtggataacctgcctcacactgggggacaacagttagaaatgactgctaataccgcataagcgcacagtaccgcatggtacagtgtgaaaaactccggtggtgtgagatggatccgcgtctgattagccagttggcggggtaacggcccaccaaagcgacgatcagtagccgacctgagagggtgaccggccacattgggactgagacacggcccaaactcctacgggaggcagcagtggggaatattgcacaatgggcgaaagcctgatgcagcgacgccgcgtgagtgaagaagtatttcggtatgtaaagctctatcagcagggaagataatgacggtacctgactaagaagccccggctaactacgtgccagcagccgcggtaatacgtagggggcaagcgttatccggatttactgggtgtaaagggagcgtagacggcatggcaagtctgaagtgaaaacccagggctcaaccctgggactgctttggaaactgtcaagctagagtgcaggagaggtaagtggaattcctagtgtagcggtgaaatgcgtagatattaggaggaacaccagtggcgaaggcggcttactggactgtaactgacgttgaggctcgaaagcgtggggagcaaacaggattagataccctggtagtccacgccgtaaacgatgagtgctaggtgttggggggcaaagcccttcggtgccgtcgcaaacgcaataagcactccacctggggagtacgttcgcaagaatgaaactcaaaggaattgacggggacccgcacaagcggtggagcatgtggtttaattcgaagcaacgcgaagaaccttaccaagtcttgacatccccctgaccggcgtgtaacggcgcctttccttcgggacaggggagacaggtggtgcatggttgtcgtcagctcgtgtcgtgagatgttgggttaagtcccgcaacgagcgcaacccttatccttagtagccagcattaagatgggcactctagggagactgccagggacaacctggaggaaggtggggatgacgtcaaatcatcatgccccttatgatttgggctacacacgtgctacaatggcgtaaacaaagggaagcgaccctgcgaaggtgagcaaatctcaaaaataacgtcccagttcggactgtagtctgcaacccgactacacgaagctggaatcgctagtaatcgcgaatcagaatgtcgcggtgaatacgttcccgggtcttgtacacaccgcccgtcacaccatgggagtcagcaacgcccgaagtcagtgacccaaccgaaaggagggagctgccgaaggcggggcaggtaactggggtgaagtcgtaacaaggtagccgtatcggaaggtgcggctggatcacctccttt

SEQ ID NO: 783 - DNA, 1530 bp, artificial sequence
  STR01489_[Clostridium]_asparagiforme_group
atttgagagtttgatcctggctcaggatgaacgctggcggcgtgcctaacacatgcaagtcgaacgaagcatttcagatgaagttttcggatggattctgagatgactgagtggcggacgggtgagtaacacgtggataacctgcctcacactgggggacaacagttagaaatgactgctaataccgcataagcgcacagtaccgcatggtacagtgtgaaaaactccggtggtgtgagatggatccgcgtctgattagccagttggcggggtaacggcccaccaaagcgacgatcagtagccgacctgagagggtgaccggccacattgggactgagacacggcccaaactcctacgggaggcagcagtggggaatattgcacaatgggcgaaagcctgatgcagcgacgccgcgtgagtgaagaagtatttcggtatgtaaagctctatcagcagggaagataatgacggtacctgactaagaagccccggctaactacgtgccagcagccgcggtaatacgtagggggcaagcgttatccggatttactgggtgtaaagggagcgtagacggcatggcaagtctgaagtgaaaacccagggctcaaccctgggactgctttggaaactgtcaagctagagtgcaggagaggtaagtggaattcctagtgtagcggtgaaatgcgtagatattaggaggaacaccagtggcgaaggcggcttactggactgtaactgacgttgaggctcgaaagcgtggggagcaaacaggattagataccctggtagtccacgccgtaaacgatgagtgctaggtgttggggggcaaagcccttcggtgccgtcgcaaacgcaataagcactccacctggggagtacgttcgcaagaatgaaactcaaaggaattgacggggacccgcacaagcggtggagcatgtggtttaattcgaagcaacgcgaagaaccttaccaagtcttgacatcctcttgaccggcgtgtaacggcgcctttccttcgggacaagggagacaggtggtgcatggttgtcgtcagctcgtgtcgtgagatgttgggttaagtcccgcaacgagcgcaacccttatccttagtagccagcattaagatgggcactctagggagactgccagggacaacctggaggaaggtggggatgacgtcaaatcatcatgccccttatgatttgggctacacacgtgctacaatggcgtaaacaaagggaagcgaccctgcgaaggtgagcaaatctcaaaaataacgtcccagttcggactgtagtctgcaacccgactacacgaagctggaatcgctagtaatcgcgaatcagaatgtcgcggtgaatacgttcccgggtcttgtacacaccgcccgtcacaccatgggagtcagcaacgcccgaagtcagtgacccaactcgcaagagagggagctgccgaaggcggggcaggtaactggggtgaagtcgtaacaaggtagccgtatcggaaggtgcggctggatcacctccttt

SEQ ID NO: 784 - DNA, 1039 bp, artificial sequence
  STR02411_[Clostridium]_asparagiforme_group
ggctaactacgtgccagcagccgcggtaatacgtagggggcaagcgttatccggatttactgggtgtaaagggagcgtagacggcatggcaagtctgaagtgaaaacccagggctcaaccctgggactgctttggaaactgtcaagctagagtgcaggagaggtaagtggaattcctagtgtagcggtgaaatgcgtagatattaggaggaacaccagtggcgaaggcggcttactggactgtaactgacgttgaggctcgaaagcgtggggagcaaacaggattagataccctggtagtccacgccgtaaacgatgagtgctaggtgttggggggcaaagcccttcggtgccgtcgcaaacgcaataagcactccacctggggagtacgttcgcaagaatgaaactcaaaggaattgacggggacccgcacaagcggtggagcatgtggtttaattcgaagcaacgcgaagaaccttaccaagtcttgacatcctcttgaccggcgtgtaacggcgcctttccttcgggacaagagagacaggtggtgcatggttgtcgtcagctcgtgtcgtgagatgttgggttaagtcccgcaacgagcgcaacccttatccttagtagccagcattaagatgggcactctagggagactgccagggacaacctggaggaaggtggggatgacgtcaaatcatcatgccccttatgatttgggctacacacgtgctacaatggcgtaaacaaagggaagcgaccctgcgaaggtgagcaaatctcaaaaataacgtcccagttcggactgtagtctgcaacccgactacacgaagctggaatcgctagtaatcgcgaatcagaatgtcgcggtgaatacgttcccgggtcttgtacacaccgcccgtcacaccatgggagtcagcaacgcccgaagtcagtgacccaactcgcaagagagggagctgccgaaggcggggcaggtaactggggtgaagtcgtaacaaggtagccgtatcggaaggtgcggctggatcacctccttt

SEQ ID NO: 785 - DNA, 1548 bp, artificial sequence
  GCF_000158075.1_00605_[Clostridium]_asparagiforme_group
tatggagagtttgatcctggctcaggacgaacgctggcggcgtgcctaatacatgcaagtcgaacggatcttgtttagaagcttgcttctaaacttggttagtggcggacgggtgagtaacacgtaggcaacctgcccataagatcgggataacattcggaaacgaatgctaagaccggataaacaatttgatcgcatggtcgaattgggaaacgcggagcaatctgcggcttgtggatgggcctgcggcgcattagctagttggtggggtaatggctcaccaaggcgacgatgcgtagccgacctgagagggtgaacggccacactgggactgagacacggcccagactcctacgggaggcagcagtagggaatcttccacaatgggcgaaagcctgatggagcaacgccgcgtgagtgaggaaggctttcgggtcgtaaagctctgttgccagggaagaataagggtgagagtaactgctcatccgatgacggtacctgagaagaaagcccggctaactacgtgccagcagccgcggtaatacgtagggggcaagcgttgtccggatttattgggcgtaaagcgcgcgcaggcggttctttaagtctggtgtctaagtgcggggctcaaccccgtgatgcactggaaactggggaacttgagtgcagaagaggagagcggaattccacgtgtagcggtgaaatgcgtagagatgtggaggaacaccagtggcgaaggcggctctctggactgtaactgacgctgaggcgcgaaagcgtggggagcaaacaggattagataccctggtagtccacgctgtaaacgatgagtgctaggtgttgggggtatcatgcctcggtgccgaagttaacacattaagcactccgcctggggagtacggtcgcaagactgaaactcaaaggaattgacggggacccgcacaagcagtggagtatgtggtttaattcgaagcaacgcgaagaaccttaccaggtcttgacatccctctgaatcctctagagatagaggcggccttcgggacagaggagacaggtggtgcatggttgtcgtcagctcgtgtcgtgagatgttgggttaagtccgcaacgagcgcacctaaactagttgccagcaggttaagctgggcactctaggttgactgccggtgacaaaccggaggaaggcggggatgacgtcaaatcatcatgccccttatgacctgggctacacacgtactacaatggccggtacaacgggctgcgaaaccgcgaggtggagccaatcccaacaaagccggtctcagttcggattgcaggctgcaactcgcctgcatgaagtcggaattgctagtaatcgcggatcagcatgccgcggtgaatacgttcccgggtcttgtacacaccgcccgtcacaccacgagagtttacaacacccgaagtcggtggggtaacccgcaagggagccagccgccgaaggtggggtagatgattggggtgaagtcgtaacaaggtagccgtatcggaaggtgcggctggatcacctccttt

SEQ ID NO: 786 - DNA, 1516 bp, artificial sequence
  GCF_000509045.1_00018_[Clostridium]_asparagiforme_group
atggagagtttgatcctggctcaggacgaacgctggcggcgtgcgtaatacatgcaagtcgagcggaccttcgggtcagcggcggacgggtgaggaacacgtgagtgatcgggctgtgagtgggggatatcgggccgaaaggcgcggcaatcccgcatacgttccggggaaccggaagaaagcttggcaacaggcgctcacaggggagctcgcggcccattagctagttgggggggtaatggcctcccaaggcgacgatgggtagccggcctgagagggtgaacggccacactgggactgagacacggcccagactcctacgggaggcagcagtagggaatcttccacaatgggcgcaagcctgatggagcaacgccgcgtgagtgaagacggccttcgggttgtaaagctctgtctgtcgggacgaagaccggcccggaagggccggggagccggtaccgacggaggaagccccctgcaaactacgtgccagcagccgcggtaagacgtagggggcaagcgttgtccggaattactgggcgtaaagggcgtgtaggcggtgcgatacgtagcggttttaagcctccggctcacccggaggagggcggctaaacggtcgcgctagagggcaggagaggtgcgtggaattcctggtggagcggtgaaatgcgtagagatcaggaagaacacccgtggcgaaggcggcgcactggcctggccctgacgctgaggcgcgacagcgtggggagcgaacgggattagataccccggtagtccacgccgtaaacgatgggtactaggtgtcgcccgggtccaccgggcggtgccggagctaacgcactaagtaccccgcctggggagtacggccgcaaggttgaaactcaaaggaattgacgggggcccgcacaagcagtggagcatgtggtttaattcgacgcaacgcgcagaaccttaccaggactggacacgctcgtgagcgccgcgaaagcggcgggcccttcggggagcgagcgcaggtgctgcatggttgtcgtcagctcgtgtcgtgagatgttgggttaagtcccgcaacgagcgcaacccttgtcgtgtgttgccagcggttcggccgggcactcacacgagactgccggtgacaaaccggaggaaggtggggatgacgtcaaatccgcatggccttgatgttctgggctacacacgtgctacaatggtcccgacaacgggatgcgacggcgcgagccggagccaatccttcaaacgggatctcagttcggattgcaggctgcaactcgcctgcatgaagccggaattgctagtaatcgcccatcagcatggggcggtgaattcgttcccgggccttgtacacaccgcccgtcacaccacgagagtcggccacacccgaagccgggcgatccaaccgcaggtgcggagggtcccgtcgacggtggggtcggtgattggggtgaagtcgtaacaaggtagccgtatcggaaggtgcggctggatcacctccttt

SEQ ID NO: 787 - DNA, 1532 bp, artificial sequence
  GCF_003024655.1_04525_[Clostridium]_asparagiforme_group
tgaagagtttgatcatggctcagattgaacgctggcggcaggcctaacacatgcaagtcgagcggatgagaggagcttgcttctcgattcagcggcggacgggtgagtaatgcctaggaatctgcctggtagtgggggacaacgtttcgaaaggaacgctaataccgcatacgtcctacgggagaaagcaggggaccttcgggccttgcgctatcagatgagcctaggtcggattagctagttggtgaggtaatggctcaccaaggcgacgatccgtaactggtctgagaggatgatcagtcacactggaactgagacacggtccagactcctacgggaggcagcagtggggaatattggacaatgggcgaaagcctgatccagccatgccgcgtgtgtgaagaaggtcttcggattgtaaagcactttaagttgggaggaagggttgtagattaatactctgcaattttgacgttaccgacagaataagcaccggctaactctgtgccagcagccgcggtaatacagagggtgcaagcgttaatcggaattactgggcgtaaagcgcgcgtaggtggtttgttaagttggatgtgaaagccccgggctcaacctgggaactgcatccaaaactggcaagctagagtacggtagagggtggtggaatttcctgtgtagcggtgaaatgcgtagatataggaaggaacaccagtggcgaaggcgaccacctggactgatactgacactgaggtgcgaaagcgtggggagcaaacaggattagataccctggtagtccacgccgtaaacgatgtcaactagccgttggaatccttgagattttagtggcgcagctaacgcattaagttgaccgcctggggagtacggccgcaaggttaaaactcaaatgaattgacgggggcccgcacaagcggtggagcatgtggtttaattcgaagcaacgcgaagaaccttaccaggccttgacatgcagagaactttccagagatggattggtgccttcgggaactctgacacaggtgctgcatggctgtcgtcagctcgtgtcgtgagatgttgggttaagtcccgtaacgagcgcaacccttgtccttagttaccagcacgtcatggtgggcactctaaggagactgccggtgacaaaccggaggaaggtggggatgacgtcaagtcatcatggcccttacggcctgggctacacacgtgctacaatggtcggtacagagggttgccaagccgcgaggtggagctaatctcacaaaaccgatcgtagtccggatcgcagtctgcaactcgactgcgtgaagtcggaatcgctagtaatcgcgaatcagaatgtcgcggtgaatacgttcccgggccttgtacacaccgcccgtcacaccatgggagtgggttgcaccagaagtagctagtctaaccttcggggggacggttaccacggtgtgattcatgactggggtgaagtcgtaacaaggtagccgtaggggaacctgcggctggatcacctcctt

SEQ ID NO: 788 - DNA, 1475 bp, artificial sequence
  GCF_003466005.1_04326_[Clostridium]_asparagiforme_group
atgaagagtttgatcctggctcaggacgaacgctggcggcgtgcctaatgcatgcaagtcgcacgcacccgcttcggcgggtgagtggcgcacggctgagtaacacgtgggaacccgccccccggtgggggataacgcgacgaaagttgcgctaatcccgcatacgtccttcgggggaaagcgcagtgcgcgccgggggaggggcctgcggcccatcaggtcgttggtggggtaagggcctaccaagccgatgacgggtagctggtctgggaggatgaccagccagactgggactgagacacggcccagactcctacgggaggcagcagcaaggaattttcggcaatgggcgcaagcctgaccgagcaacgccgcgtgcgggatgacggccttcgggttgtaaaccgcttttcggggggacgaccctgacggtacccccggaatcagccccggctaactctgtgccagcagccgcggtaagacagagggggcgagcgttgtccggagtcactgggcgtaaagcgcgcgcaggcggcaacctaagtgtcgtgtgaaagcccccggctcaaccgggggaggccatggcaaactgggtcgctcgagctgcggagaggcccctcgaattgccggtgtagcggtgaaatgcgtagagatcggcaggaagaccaagggggaagccagggggctggccgcaggctgacgctgaggcgcgacagcgtggggagcaaaccggattagatacccgggtagtccacgccgtaaacgatgaccactcggcgtgtggcgactattgacgtcgcggcgcgccctagctcacgcgataagtggtccgcctgggaactacgagcgcaagcttaaaactcaaaggaattgacgggggcccgcacaagcagcggagcgtgtggtttaattcgacgcaacccgaagaaccttacccagactggacatgacggtgcagacggcggaaacgtcgtcgcctgcgagggtccgtcacaggtgctgcatggctgtcgtcagctcgtgtcgtgagatgttgggttaagtcccgcaacgagcgcaacccctgcggttagttacccgtgtctaaccggactgcccttcggggaggaaggcggggatgacgtcaagtccgcatggcccttacgtctggggcgacacacacgctacaatggcgccgacaatgcgtcgctcccgcgcaagcggatgctaatcgccaaacggcgccccagtgcagatcgggggctgcaactcgcccccgtgaaggcggagttgctagtaaccgcgtatcagccatggcgcggtgaatacgtacccgggccttgtacacaccgcccgtcacgtcatgggagttgtcaatgcctgaagtccgccagctaaccggtttccggaggcagcggccgagggcaggggcagcgactgggacgaagtcgtaacaaggtagccgtaccggaaggtgcggctggatcacctccttt

SEQ ID NO: 789 - DNA, 1565 bp, artificial sequence
  GCF_003479335.1_04645_[Clostridium]_asparagiforme_group
tatgagagtttgatcctggctcaggacgaacgctggcggcgtgcctaatacatgcaagtcgaacgcacagatatcaacagaagctgcttgcagtggaagttaattgatgtgagtggcggacgggtgagtaacacgtgggtaacctacccaaaagtgggggataacatttggaaacagatgctaataccgcataatttaagtgaccacatggtcacttaatgaaagatggtttcggctatcacttttggatggacccgcggcgtattagctagttggtgggataacggcctaccaaggcgatgatacgtagccgacctgagagggtaatcggccacattgggactgagacacggcccaaactcctacgggaggcagcagtagggaatcttccacaatggacgaaagtctgatggagcaacgccgcgtgagtgaagaaggttttcggatcgtaaaactctgttgttggagaagaacagggactagagtaactgttagtcctatgacggtatccaaccagaaagccacggctaactacgtgccagcagccgcggtaatacgtaggtggcaagcgttgtccggatttattgggcgtaaagcgagcgcaggcggttttttaagtctgatgtgaaagccttcggcttaaccgaagaagtgcattagaaactgggaaacttgagtgcagaagaggagagtggaactccatgtgtagcggtgaaatgcgtagatatatggaagaacaccagtggcgaaggcggctctctggtctgtaactgacgctgaggctcgaaagtatggggagcgaacaggattagataccctggtagtccataccgtaaacgatgaatgctaagtgttggagggtttccgcccttcagtgctgcagctaacgcattaagcattccgcctggggagtacgaccgcaaggttgaaactcaaaggaattgacgggggcccgcacaagcggtggagcatgtggtttaattcgaagctacgcgaagaaccttaccaggtcttgacatcctttgaccactgtagagatacagctttcccttcggggacaaagtgacaggtggtgcatggttgtcgtcagctcgtgtcgtgagatgttgggttaagtcccgcaacgagcgcaacccttatgactagttgccagcattaagttgggcactctagtgagactgccggtgacaaaccggaggaaggtggggatgacgtcaaatcagcatgccccttatgacctgggctacacacgtgctacaatggttggtacaacgagttgcgaacccgcgagggtaagctaatctcttaaagccaatctcagttcggattgtaggctgcaactcgcctacatgaagtcggaatcgctagtaatcgcggatcagcacgccgcggtgaatacgttcccgggccttgtacacaccgcccgtcacaccatgagagtttgtaacacccgaagccggtggggtaacctctatgaggagctaaccgtctaaggtgggacagatgattggggtgaagtcgtaacaaggtagccgtaggagaacctgcggctggatcacctcctt

SEQ ID NO: 790 - DNA, 1540 bp, artificial sequence
  STR00314_[Clostridium]_hylemonae
aacgagagtttgatcctggctcaggatgaacgctggcggcgtgcttaacacatgcaagtcgaacgaagcaatactgtgtgaagagattagcttgctaagatcagaactttgtattgactgagtggcggacgggtgagtaacgcgtgggcaacctgccttacacagggggataacagctagaaatggctgctaataccgcataagacctcagtaccgcatggtagaggggtaaaaactccggtggtgtaagatgggcccgcgtctgattaggtagttggtagggtaacggcctaccaagccgacgatcagtagccgacctgagagggtgaccggccacattgggactgagacacggcccaaactcctacgggaggcagcagtggggaatattgcacaatgggggaaaccctgatgcagcgacgccgcgtgaaggatgaagtatttcggtatgtaaacttctatcagcagggaagaagatgacggtacctgactaagaagccccggctaactacgtgccagcagccgcggtaatacgtagggggcaagcgttatccggatttactgggtgtaaagggagcgtagacggcatggcaagtctgaagtgaaagcccggggctcaaccccgggactgctttggaaactgtcaggctagagtgtcggagaggcaagtggaattcctagtgtagcggtgaaatgcgtagatattaggaggaacaccagtggcgaaggcggcttgctggacgatgactgacgttgaggctcgaaagcgtggggagcaaacaggattagataccctggtagtccacgccgtaaacgatgattactaggtgtcgggaagcaaagcttttcggtgccgcagccaacgcaataagtaatccacctggggagtacgttcgcaagaatgaaactcaaaggaattgacggggacccgcacaagcggtggagcatgtggtttaattcgaagcaacgcgaagaaccttacctgatcttgacatcccggtgacaaagtatgtaatgtactctttcttcggaacaccggtgacaggtggtgcatggttgtcgtcagctcgtgtcgtgagatgttgggttaagtcccgcaacgagcgcaacccttatctttagtagccagcatttaaggtgggcactctagagagactgccagggataacctggaggaaggtggggatgacgtcaaatcatcatgccccttatgaccagggctacacacgtgctacaatggcgtaaacaaagggaagcgaccctgtgaaggcaagcaaatcccaaaaataacgtctcagttcggattgtagtctgcaactcgactacatgaagctggaatcgctagtaatcgcgaatcagaatgtcgcggtgaatacgttcccgggtcttgtacacaccgcccgtcacaccatgggagtcagtaacgcccgaagccggtgacctaaccgaaaggaaggagccgtcgaaggtgggaccgataactggggtgaagtcgtaacaaggtagccgtatcggaaggtgcggctggatcacctccttt

SEQ ID NO: 791 - DNA, 1540 bp, artificial sequence
  STR00314.1_[Clostridium]_hylemonae
aacgagagtttgatcctggctcaggatgaacgctggcggcgtgcttaacacatgcaagtcgaacgaagcaatactgtgtgaagagattagcttgctaagatcagaactttgtattgactgagtggcggacgggtgagtaacgcgtgggcaacctgccttacacagggggataacagctagaaatggctgctaataccgcataagacctcagtaccgcatggtagaggggtaaaaactccggtggtgtaagatgggcccgcgtctgattaggtagttggtagggtaacggcctaccaagccgacgatcagtagccgacctgagagggtgaccggccacattgggactgagacacggcccaaactcctacgggaggcagcagtggggaatattgcacaatgggggaaaccctgatgcagcgacgccgcgtgaaggatgaagtatttcggtatgtaaacttctatcagcagggaagaagatgacggtacctgactaagaagccccggctaactacgtgccagcagccgcggtaatacgtagggggcaagcgttatccggatttactgggtgtaaagggagcgtagacggcatggcaagtctgaagtgaaagcccggggctcaaccccgggactgctttggaaactgtcaggctagagtgtcggagaggcaagtggaattcctagtgtagcggtgaaatgcgtagatattaggaggaacaccagtggcgaaggcggcttgctggacgatgactgacgttgaggctcgaaagcgtggggagcaaacaggattagataccctggtagtccacgccgtaaacgatgattactaggtgtcgggaagcaaagcttttcggtgccgcagccaacgcaataagtaatccacctggggagtacgttcgcaagaatgaaactcaaaggaattgacggggacccgcacaagcggtggagcatgtggtttaattcgaagcaacgcgaagaaccttacctgatcttgacatcccggtgacaaagtatgtaatgtactctttcttcggaacaccggtgacaggtggtgcatggttgtcgtcagctcgtgtcgtgagatgttgggttaagtcccgcaacgagcgcaacccttatctttagtagccagcatttgaggtgggcactctagagagactgccagggataacctggaggaaggtggggatgacgtcaaatcatcatgccccttatgaccagggctacacacgtgctacaatggcgtaaacaaagggaagcgatcctgtgaaggcaagcaaatcccaaaaataacgtctcagttcggattgtagtctgcaactcgactacatgaagctggaatcgctagtaatcgcgaatcagaatgtcgcggtgaatacgttcccgggtcttgtacacaccgcccgtcacaccatgggagtcagtaacgcccgaagccggtgacctaaccgaaaggaaggagccgtcgaaggtgggaccgataactggggtgaagtcgtaacaaggtagccgtatcggaaggtgcggctggatcacctccttt

SEQ ID NO: 792 - DNA, 1540 bp, artificial sequence
  STR00314.2_[Clostridium]_hylemonae
aacgagagtttgatcctggctcaggatgaacgctggcggcgtgcttaacacatgcaagtcgaacgaagcaatactgtgtgaagagattagcttgctaagatcagaactttgtattgactgagtggcggacgggtgagtaacgcgtgggcaacctgccttacacagggggataacagctagaaatggctgctaataccgcataagacctcagtaccgcatggtagaggggtaaaaactccggtggtgtaagatgggcccgcgtctgattaggtagttggtagggtaacggcctaccaagccgacgatcagtagccgacctgagagggtgaccggccacattgggactgagacacggcccaaactcctacgggaggcagcagtggggaatattgcacaatgggggaaaccctgatgcagcgacgccgcgtgaaggatgaagtatttcggtatgtaaacttctatcagcagggaagaagatgacggtacctgactaagaagccccggctaactacgtgccagcagccgcggtaatacgtagggggcaagcgttatccggatttactgggtgtaaagggagcgtagacggcatggcaagtctgaagtgaaagcccggggctcaaccccgggactgctttggaaactgtcaggctagagtgtcggagaggcaagtggaattcctagtgtagcggtgaaatgcgtagatattaggaggaacaccagtggcgaaggcggcttgctggacgatgactgacgttgaggctcgaaagcgtggggagcaaacaggattagataccctggtagtccacgccgtaaacgatgattactaggtgtcgggaagcaaagcttttcggtgccgcagccaacgcaataagtaatccacctggggagtacgttcgcaagaatgaaactcaaaggaattgacggggacccgcacaagcggtggagcatgtggtttaattcgaagcaacgcgaagaaccttacctgatcttgacatcccggtgacaaagtatgtaatgtactctttcttcggaacaccggtgacaggtggtgcatggttgtcgtcagctcgtgtcgtgagatgttgggttaagtcccgcaacgagcgcaacccttatctttagtagccagcatttgaggtgggcactctagagagactgccagggataacctggaggaaggtggggatgacgtcaaatcatcatgccccttatgaccagggctacacacgtgctacaatggcgtaaacaaagggaagcgaccctgtgaaggcaagcaaatcccaaaaataacgtctcagttcggattgtagtctgcaactcgactacatgaagctggaatcgctagtaatcgcgaatcagaatgtcgcggtgaatacgttcccgggtcttgtacacaccgcccgtcacaccatgggagtcagtaacgcccgaagccggtgacctaaccgaaaggaaggagccgtcgaaggtgggaccgataactggggtgaagtcgtaacaaggtagccgtatcggaaggtgcggctggatcacctccttt

SEQ ID NO: 793 - DNA, 1538 bp, artificial sequence
  STR00314.3_[Clostridium]_hylemonae
cgagagtttgatcctggctcaggatgaacgctggcggcgtgcttaacacatgcaagtcgaacgaagcaatactgtgtgaagagattagcttgctaagatcagaactttgtattgactgagtggcggacgggtgagtaacgcgtgggcaacctgccttacacagggggataacagctagaaatggctgctaataccgcataagacctcagtaccgcatggtagaggggtaaaaactccggtggtgtaagatgggcccgcgtctgattaggtagttggtagggtaacggcctaccaagccgacgatcagtagccgacctgagagggtgaccggccacattgggactgagacacggcccaaactcctacgggaggcagcagtggggaatattgcacaatgggggaaaccctgatgcagcgacgccgcgtgaaggatgaagtatttcggtatgtaaacttctatcagcagggaagaagatgacggtacctgactaagaagccccggctaactacgtgccagcagccgcggtaatacgtagggggcaagcgttatccggatttactgggtgtaaagggagcgtagacggcatggcaagtctgaagtgaaagcccggggctcaaccccgggactgctttggaaactgtcaggctagagtgtcggagaggcaagtggaattcctagtgtagcggtgaaatgcgtagatattaggaggaacaccagtggcgaaggcggcttgctggacgatgactgacgttgaggctcgaaagcgtggggagcaaacaggattagataccctggtagtccacgccgtaaacgatgattactaggtgtcgggaagcaaagcttttcggtgccgcagctaacgcaataagtaatccacctggggagtacgttcgcaagaatgaaactcaaaggaattgacggggacccgcacaagcggtggagcatgtggtttaattcgaagcaacgcgaagaaccttacctgatcttgacatcccggtgacaaagtatgtaaagtactctttcttcggaacaccggtgacaggtggtgcatggttgtcgtcagctcgtgtcgtgagatgttgggttaagtcccgcaacgagcgcaacccttatctttagtagccagcatttgaggtgggcactctagagagactgccagggataacctggaggaaggtggggatgacgtcaaatcatcatgccccttatgaccagggctacacacgtgctacaatggcgtaaacaaagggaagcgaccctgtgaaggcaagcaaatcccaaaaataacgtctcagttcggattgtagtctgcaactcgactacatgaagctggaatcgctagtaatcgcgaatcagaatgtcgcggtgaatacgttcccgggtcttgtacacaccgcccgtcacaccatgggagtcagtaacgcccgaagccggtgacctaaccgaaaggaaggagccgtcgaaggtgggaccgataactggggtgaagtcgtaacaaggtagccgtatcggaaggtgcggctggatcacctccttt

SEQ ID NO: 794 - DNA, 1537 bp, artificial sequence
  STR01956_[Clostridium]_hylemonae
gagagtttgatcctggctcaggatgaacgctggcggcgtgcttaacacatgcaagtcgaacgaagcaatactgtgtgaagagattagcttgctaagatcagaactttgtattgactgagtggcggacgggtgagtaacgcgtgggcaacctgccttacacagggggataacagctagaaatggctgctaataccgcataagacctcagtaccgcatggtagaggggtaaaaactccggtggtgtaagatgggcccgcgtctgattaggtagttggtagggtaacggcctaccaagccgacgatcagtagccgacctgagagggtgaccggccacattgggactgagacacggcccaaactcctacgggaggcagcagtggggaatattgcacaatgggggaaaccctgatgcagcgacgccgcgtgaaggatgaagtatttcggtatgtaaacttctatcagcagggaagaagatgacggtacctgactaagaagccccggctaactacgtgccagcagccgcggtaatacgtagggggcaagcgttatccggatttactgggtgtaaagggagcgtagacggcatggcaagtctgaagtgaaagcccggggctcaaccccgggactgctttggaaactgtcaggctagagtgtcggagaggcaagtggaattcctagtgtagcggtgaaatgcgtagatattaggaggaacaccagtggcgaaggcggcttgctggacgatgactgacgttgaggctcgaaagcgtggggagcaaacaggattagataccctggtagtccacgccgtaaacgatgattactaggtgtcgggaagcaaagcttttcggtgccgcagccaacgcaataagtaatccacctggggagtacgttcgcaagaatgaaactcaaaggaattgacggggacccgcacaagcggtggagcatgtggtttaattcgaagcaacgcgaagaaccttacctgatcttgacatcccggtgacaaagtatgtaatgtactctttcttcggaacaccggtgacaggtggtgcatggttgtcgtcagctcgtgtcgtgagatgttgggttaagtcccgcaacgagcgcaacccttatctttagtagccagcatttgaggtgggcactctagagagactgccagggataacctggaggaaggtggggatgacgtcaaatcatcatgccccttatgaccagggctacacacgtgctacaatggcgtaaacaaagggaagcgaccctgtgaaggcaagcaaatcccaaaaataacgtctcagttcggattgtagtctgcaactcgactacatgaagctggaatcgctagtaatcgcgaatcagaatgtcgcggtgaatacgttcccgggtcttgtacacaccgcccgtcacaccatgggagtcagtaacgcccgaagccggtgacctaaccgaaaggaaggagccgtcgaaggtgggaccgataactggggtgaagtcgtaacaaggtagccgtatcggaaggtgcggctggatcacctccttt

SEQ ID NO: 795 - DNA, 1540 bp, artificial sequence; identical to SEQ ID NO: 792
  STR02051_[Clostridium]_hylemonae

SEQ ID NO: 796 - DNA, 1527 bp, artificial sequence
  GCF_005844135.1_02316_[Clostridium]_hylemonae
acggagagtttgatcctggctcaggacgaacgctggcggcgtgcttaacacatgcaagtcgaacgatgatccggtttcggccggtgattagtggcgaacgggtgagtaacacgtgggcaatctgccctgcactctgggacaagccctggaaacggggtctaataccggatatgacacatgagggcatcctcgtgtgtggaaagctccggcggtgcaggatgagcccgcggcctatcagctagttggtggggtagtggcctaccaaggcgacgacgggtagccggcctgagagggcgaccggccacactgggactgagacacggcccagactcctacgggaggcagcagtggggaatattgcacaatgggcgaaagcctgatgcagcgacgccgcgtgagggatgaatgccttcgggttgtaaacctctttcagtagggaagaagccttcgggtgacggtacctgcagaagaagcaccggctaactacgtgccagcagccgcggtaatacgtagggtgcgagcgttgtccggaattattgggcgtaaagagctcgtaggcggcttgtcacgtcggttgtgaaagcccggggcttaaccccgggtctgcagtcgatacgggcaggctagagttcggtaggggagatcggaattcctggtgtagcggtgaaatgcgcagatatcaggaggaacaccggtggcgaaggcggatctctgggccgatactgacgctgaggagcgaaagcgtggggagcgaacaggattagataccctggtagtccacgccgtaaacggtgggaactaggtgtgggcgacattccacgtcgtccgtgccgcagctaacgcattaagttccccgcctggggagtacggccgcaaggctaaaactcaaaggaattgacgggggcccgcacaagcggcggagcatgtggcttaattcgacgcaacgcgaagaaccttaccaaggcttgacatacaccggaaaaccgtggagacacggtcccccttgtggtcggtgtacaggtggtgcatggctgtcgtcagctcgtgtcgtgagatgttgggttaagtcccgcaacgagcgcaacccttatcctgtgttgccagcacgcccttcggggtggtggggactcacgggagactgccggggtcaactcggaggaaggtggggacgacgtcaagtcatcatgccccttatgtcttgggctgcacacgtgctacaatggccggtacaatgagctgcgataccgtgaggtggagcgaatctcaaaaagccggtctcagttcggattggggtctgcaactcgaccccatgaagtcggagtcgctagtaatcgtagatcagcattgctacggtgaatacgttcccgggccttgtacacaccgcccgtcacgtcacgaaagtcggtaacacccgaagccggtggcctaaccccttgtgggagggagctgtcgaaggtgggactggcgattgggacgaagtcgtaacaaggtagccgtaccggaaggtgcggctggatcacctccttt

SEQ ID NO: 797 - DNA, 1529 bp, artificial sequence
  GCF_000803105.1_03215_[Coprobacter]_secundus_group
taaagagtttgatcctggctcagattgaacgctggcggcatgccttacacatgcaagtcgaacggcagcataggagcttgctcctgatggcgagtggcgaacgggtgagtaatatatcggaacgtgccctagagtgggggataactagtcgaaagattagctaataccgcatacgatctacggatgaaagtgggggatcgcaagacctcatgctcctggagcggccgatatctgattagctagttggtggggtaaaagctcaccaaggcgacgatcagtagctggtctgagaggacgaccagccacactgggactgagacacggcccagactcctacgggaggcagcagtggggaattttggacaatgggggcaaccctgatccagcaatgccgcgtgagtgaagaaggccttcgggttgtaaagctcttttgtcagggaagaaacggttgaggctaatatcctcgactaatgacggtacctgaagaataagcaccggctaactacgtgccagcagccgcggtaatacgtagggtgcaagcgttaatcggaattactgggcgtaaagcgtgcgcaggcggttatgtaagacagatgtgaaatccccgggctcaacctgggaattgcatttgtgactgcatggctagagtgtgtcagaggggggtagaattccacgtgtagcagtgaaatgcgtagatatgtggaggaataccgatggcgaaggcagccccctgggataacactgacgctcatgcacgaaagcgtggggagcaaacaggattagataccctggtagtccacgccctaaacgatgtctactagttgtcgggtcttaattgacttggtaacgcagctaacgcgtgaagtagaccgcctggggagtacggtcgcaagattaaaactcaaaggaattgacggggacccgcacaagcggtggatgatgtggattaattcgatgcaacgcgaaaaaccttacctacccttgacatggatggaatcccgaagagatttgggagtgctcgaaagagaaccatcacacaggtgctgcatggctgtcgtcagctcgtgtcgtgagatgttgggttaagtcccgcaacgagcgcaacccttgtcattagttgctacgaaagggcactctaatgagactgccggtgacaaaccggaggaaggtggggatgacgtcaagtcctcatggcccttatgggtagggcttcacacgtcatacaatggtacatacagagggccgccaacccgcgagggggagctaatcccagaaagtgtatcgtagtccggattgtagtctgcaactcgactacatgaagttggaatcgctagtaatcgcggatcagcatgtcgcggtgaatacgttcccgggtcttgtacacaccgcccgtcacaccatgggagcgggttttaccagaagtgggtagcctaaccgcaaggagggcgcttaccacggtaggattcgtgactggggtgaagtcgtaacaaggtagccgtatcggaaggtgcggctggatcacctccttt

SEQ ID NO: 798 - DNA, 1546 bp, artificial sequence
  GCF_001403595.1_00018_[Coprobacter]_secundus_group
aatgagagtttgatcctggctcaggacgaacgctggcggcgtgcctaatacatgcaagtagaacgctgaagactggtgcttgcactagtcagatgagttgcgaacgggtgagtaacgcgtaggtaacctacctcatagcgggggataactattggaaacgatagctaataccgcatgacaattaagtactcatgtactaaatttaaaaggagcaattgcttcactatgagatggacctgcgttgtattagctagttggtgaggtaacggctcaccaaggccacgatacatagccgacctgagagggtgatcggccacactgggactgagacacggcccagactcctacgggaggcagcagtagggaatcttcggcaatgggggcaaccctgaccgagcaacgccgcgtgagtgaagaaggttttcggatcgtaaagctctgttgttagagaagaacggtaatgggagtggaaaatccattacgtgacggtaactaaccagaaagggacggctaactacgtgccagcagccgcggtaatacgtaggtctcgagcgttgtccggatttattgggcgtaaagcgagcgcaggcggttatttaagtctgaagttaaaggccgtggctcaaccatggttcgctttggaaactggataacttgagtgcagaaggggagagtggaattccatgtgtagcggtgaaatgcgtagatatatggaggaacaccggtggcgaaagcggctctctggtctgtaactgacgctgaggctcgaaagcgtggggagcaaacaggattagataccctggtagtccacgccgtaaacgatgagtgctaggtgttaggccctttccggggcttagtgccgcagctaacgcattaagcactccgcctggggagtacgaccgcaaggttgaaactcaaaggaattgacgggggcccgcacaagcggtggagcatgtggtttaattcgaagcaacgcgaagaaccttaccaggtcttgacatccctctgaccgtcctagagataggactttccttcgggacagaggtgacaggtggtgcatggttgtcgtcagctcgtgtcgtgagatgttgggttaagtcccgcaacgagcgcaacccctattgttagttgccatcattaagttgggcactctagcgagactgccggtaataaaccggaggaaggtggggatgacgtcaaatcatcatgccccttatgacctgggctacacacgtgctacaatggttggtacaacgagtcgcaagccggtgacggcaagctaatctcttaaagccaatctcagttcggattgtaggctgcaactcgcctacatgaagtcggaatcgctagtaatcgcggatcagcacgccgcggtgaatacgttcccgggccttgtacacaccgcccgtcacaccacgagagtttgtaacacccgaagtcggtgaggtaacctaataggagccagccgcctaaggtgggatagatgattggggtgaagtcgtaacaaggtagccgtatcggaaggtgcggctggatcacctccttt

SEQ ID NO: 799 - DNA, 1546 bp, artificial sequence; identical to SEQ ID NO: 798
  GCF_001403595.1_03271_[Coprobacter]_secundus_group

SEQ ID NO: 800 - DNA, 892 bp, artificial sequence
  STR00733_[Faecalicatena]_orotica
ctagagtgtcggagaggtaagtggaattcctagtgtagcggtgaaatgcgtagatattaggaggaacaccagtggcgaaggcggcttactggacgatgactgacgttgaggctcgaaagcgtggggagcaaacaggattagataccctggtagtccacgccgtaaacgatgaatactaggtgtcgggtggcaaagccattcggtgccgcagcaaacgcagtaagtattccacctggggagtacgttcgcaagaatgaaactcaaaggaattgacggggacccgcacaagcggtggagcatgtggtttaattcgaagcaacgcgaagaaccttacctgctcttgacatcccgctgaccggccagtaatgtggccttcccttcggggcagtggagacaggtggtgcatggttgtcgtcagctcgtgtcgtgagatgttgggttaagtcccgcaacgagcgcaacccttatctttagtagccagcggtttggccgggcactctagagagactgccagggataacctggaggaaggtggggatgacgtcaaatcatcatgccccttatgagcagggctacacacgtgctacaatggcgtaaacaaagggaggcaatactgtgaagtggagcaaatcccaaaaataacgtctcagttcggattgtagtctgcaactcgactacatgaagctggaatcgctagtaatcgcgaatcagaatgtcgcggtgaatacgttcccgggtcttgtacacaccgcccgtcacaccatgggagttggtaacgcccgaagtcagtgacccaaccgcaaggagggagctgccgaaggtgggaccgataactggggtgaagtcgtaacaaggtagccgtatcggaaggtgcggctggatcacctccttt

SEQ ID NO: 801 - DNA, 1530 bp, artificial sequence
  STR01091_[Faecalicatena]_orotica
aacgagagtttgatcctggctcaggatgaacgctggcggcgtgcttaacacatgcaagtcgagcgaagcactttacttagatttcttcggattgaagagtgttgtgactgagcggcggacgggtgagtaacgcgtgggtaacctgcctcatacagggggataacagttagaaatgactgctaataccgtataagaccacggtgccgcatggcacagtggtaaaaactccggtggtatgagatggacccgcgtctgattagctagttggtagggtaacggcttaccaaggcgacgatcagtagccgacctgagagggtgaccggccacattgggactgagacacggcccaaactcctacgggaggcagcagtggggaatattgcacaatgggggaaaccctgatgcagcgacgccgcgtgaaggatgaagtatttcggtatgtaaacttctatcagcagggaagaaaatgacggtacctgactaagaagccccggctaactacgtgccagcagccgcggtaatacgtagggggcaagcgttatccggatttactgggtgtaaagggagcgtagacggtgatgcaagtctgatgtgaaaacccggggctcaaccccgggactgcattggaaactgtgtgactagagtgtcggagaggtaagtggaattcctagtgtagcggtgaaatgcgtagatattaggaggaacaccagtggcgaaggcggcttactggacgatgactgacgttgaggctcgaaagcgtggggagcaaacaggattagataccctggtagtccacgccgtaaacgatgaatactaggtgtcgggtggcaaagccattcggtgccgcagcaaacgcagtaagtattccacctggggagtacgttcgcaagaatgaaactcaaaggaattgacggggacccgcacaagcggtggagcatgtggtttaattcgaagcaacgcgaagaaccttacctgctcttgacatcccgctgaccggccagtaatgtggccttcccttcggggcagtggagacaggtggtgcatggttgtcgtcagctcgtgtcgtgagatgttgggttaagtcccgcaacgagcgcaacccttatctttagtagccagcggtcaggccgggcactctagagagactgccagggataacctggaggaaggtggggatgacgtcaaatcatcatgccccttatgagcagggctacacacgtgctacaatggcgtaaacaaagggaggcaatactgtgaagtggagcaaatcccaaaaataacgtctcagttcggattgtagtctgcaactcgactacatgaagctggaatcgctagtaatcgcgaatcagaatgtcgcggtgaatacgttcccgggtcttgtacacaccgcccgtcacaccatgggagttggtaacgcccgaagtcagtgacccaaccgcaaggagggagctgccgaaggtgggaccgataactggggtgaagtcgtaacaaggtagccgtatcggaaggtgcggctggatcacctccttt

SEQ ID NO: 802 - DNA, 1530 bp, artificial sequence
  STR01091.1_[Faecalicatena]_orotica
aacgagagtttgatcctggctcaggatgaacgctggcggcgtgcttaacacatgcaagtcgagcgaagcactttactttgatttcttcggaatgaagagtgttgtgactgagcggcggacgggtgagtaacgcgtgggtaacctgcctcatacagggggataacagttagaaatgactgctaataccgtataagaccacagtgccgcatggcacggtggtaaaaactccggtggtatgagatggacccgcgtctgattagcttgttggtaaggtaacggcttaccaaggcgacgatcagtagccgacctgagagggtgaccggccacattgggactgagacacggcccaaactcctacgggaggcagcagtggggaatattgcacaatgggggaaaccctgatgcagcgacgccgcgtgaaggatgaagtatttcggtatgtaaacttctatcagcagggaagaaaatgacggtacctgactaagaagccccggctaactacgtgccagcagccgcggtaatacgtagggggcaagcgttatccggatttactgggtgtaaagggagcgtagacggtaatgcaagtctgatgtgaaaacccggggctcaaccccgggactgcattggaaactgtgtgactagagtgtcggagaggtaagtggaattcctagtgtagcggtgaaatgcgtagatattaggaggaacaccagtggcgaaggcggcttactggacgatgactgacgttgaggctcgaaagcgtggggagcaaacaggattagataccctggtagtccacgccgtaaacgatgaatactaggtgtcgggtggcaaagccattcggtgccgcagcaaacgcagtaagtattccacctggggagtacgttcgcaagaatgaaactcaaaggaattgacggggacccgcacaagcggtggagcatgtggtttaattcgaagcaacgcgaagaaccttacctgctcttgacatcccgctgaccggccagtaatgtggccttcccttcggggcagtggagacaggtggtgcatggttgtcgtcagctcgtgtcgtgagatgttgggttaagtcccgcaacgagcgcaacccttatctttagtagccagcggtcaggccgggcactctagagagactgccagggataacctggaggaaggtggggatgacgtcaaatcatcatgccccttatgagcagggctacacacgtgctacaatggcgtaaacaaagggaggcaatactgtgaagtggagcaaatcccaaaaataacgtctcagttcggattgtagtctgcaactcgactacatgaagctggaatcgctagtaatcgcgaatcagaatgtcgcggtgaatacgttcccgggtcttgtacacaccgcccgtcacaccatgggagttggtaacgcccgaagtcagtgacccaaccgcaaggagggagctgccgaaggtgggaccgataactggggtgaagtcgtaacaaggtagccgtatcggaaggtgcggctggatcacctccttt

SEQ ID NO: 803 - DNA, 1530 bp, artificial sequence
  STR01091.2_[Faecalicatena]_orotica
aacgagagtttgatcctggctcaggatgaacgctggcggcgtgcttaacacatgcaagtcgagcgaagcactttacttagatttcttcggattgaagagtgttgtgactgagcggcggacgggtgagtaacgcgtgggtaacctgcctcatacagggggataacagttagaaatgactgctaataccgtataagaccacggtgccgcatggcacagtggtaaaaactccggtggtatgagatggacccgcgtctgattagcttgttggtaaggtaacggcctaccaaggcgacgatcagtagccgacctgagagggtgaccggccacattgggactgagacacggcccaaactcctacgggaggcagcagtggggaatattgcacaatgggggaaaccctgatgcagcgacgccgcgtgaaggatgaagtatttcggtacgtaaacttctatcagcagggaagaaaatgacggtacctgactaagaagccccggctaactacgtgccagcagccgcggtaatacgtagggggcaagcgttatccggatttactgggtgtaaagggagcgtagacggtgatgcaagtctgatgtgaaaacccggggctcaaccccgggactgcattggaaactgtgtgactagagtgtcggagaggtaagtggaattcctagtgtagcggtgaaatgcgtagatattaggaggaacaccagtggcgaaggcggcttactggacgatgactgacgttgaggctcgaaagcgtggggagcaaacaggattagataccctggtagtccacgccgtaaacgatgaatactaggtgtcgggtggcaaagccattcggtgccgcagcaaacgcagtaagtattccacctggggagtacgttcgcaagaatgaaactcaaaggaattgacggggacccgcacaagcggtggagcatgtggtttaattcgaagcaacgcgaagaaccttacctgctcttgacatcccgctgaccggccagtaatgtggccttcccttcggggcagtggagacaggtggtgcatggttgtcgtcagctcgtgtcgtgagatgttgggttaagtcccgcaacgagcgcaacccctatctttagtagccagcggtcaggccgggcactctagagagactgccagggataacctggaggaaggtggggatgacgtcaaatcatcatgccccttatgagcagggctacacacgtgctacaatggcgtaaacaaagggaggcaatactgtgaagtggagcaaatcccaaaaataacgtctcagttcggattgtagtctgcaactcgactacatgaagctggaatcgctagtaatcgcgaatcagaatgtcgcggtgaatacgttcccgggtcttgtacacaccgcccgtcacaccatgggagttggtaacgcccgaagtcagtgacccaaccgcaaggagggagctgccgaaggtgggaccgataactggggtgaagtcgtaacaaggtagccgtatcggaaggtgcggctggatcacctccttt

SEQ ID NO: 804 - DNA, 1531 bp, artificial sequence
  STR01091.3_[Faecalicatena]_orotica
tacgagagtttgatcctggctcaggatgaacgctggcggcgtgcttaacacatgcaagtcgagcgaagcacaatactcaagatttcttcggattgaagagtgttgtgactgagcggcggacgggtgagtaacgcgtgggtaacctgcctcatacagggggataacagttagaaatgactgctaataccgtataagaccacagtgccgcatggcacagtggtaaaaactccggtggtatgagatggacccgcgtctgattagcttgttggtaaggtaacggcttaccaaggcgacgatcagtagccgacctgagagggtgaccggccacattgggactgagacacggcccaaactcctacgggaggcagcagtggggaatattgcacaatgggggaaaccctgatgcagcgacgccgcgtgaaggatgaagtatttcggtatgtaaacttctatcagcagggaagaaaatgacggtacctgactaagaagccccggctaactacgtgccagcagccgcggtaatacgtagggggcaagcgttatccggatttactgggtgtaaagggagcgtagacggtgatgcaagtctgatgtgaaaacccggggctcaaccccgggactgcattggaaactgtgtgactagagtgtcggagaggtaagtggaattcctagtgtagcggtgaaatgcgtagatattaggaggaacaccagtggcgaaggcggcttactggacgatgactgacgttgaggctcgaaagcgtggggagcaaacaggattagataccctggtagtccacgccgtaaacgatgaatactaggtgtcgggtggcaaagccattcggtgccgcagcaaacgcagtaagtattccacctggggagtacgttcgcaagaatgaaactcaaaggaattgacggggacccgcacaagcggtggagcatgtggtttaattcgaagcaacgcgaagaaccttacctgctcttgacatcccgctgaccggccagtaatgtggccttcccttcggggcagtggagacaggtggtgcatggttgtcgtcagctcgtgtcgtgagatgttgggttaagtcccgcaacgagcgcaacccttatctttagtagccagcggcttggccgggcactctagagagactgccagggataacctggaggaaggtggggatgacgtcaaatcatcatgccccttatgagcagggctacacacgtgctacaatggcgtaaacaaagggaggcaatactgtgaagtggagcaaatcccaaaaataacgtctcagttcggattgtagtctgcaactcgactacatgaagctggaatcgctagtaatcgcgaatcagaatgtcgcggtgaatacgttcccgggtcttgtacacaccgcccgtcacaccatgggagttggtaacgcccgaagtcagtgacccaaccgcaaggagggagctgccgaaggtgggaccgataactggggtgaagtcgtaacaaggtagccgtatcggaaggtgcggctggatcacctccttt

SEQ ID NO: 805 - DNA, 1530 bp, artificial sequence
  STR01091.4_[Faecalicatena]_orotica
aacgagagtttgatcctggctcaggatgaacgctggcggcgtgcttaacacatgcaagtcgagcgaagcactttacttagatttcttcggattgaagagtgttgtgactgagcggcggacgggtgagtaacgcgtgggtaacctgcctcatacagggggataacagttagaaatgactgctaataccgtataagaccacggtgccgcatggcacagtggtaaaaactccggtggtatgagatggacccgcgtctgattagcttgttggtaaggtaacggcttaccaaggcgacgatcagtagccgacctgagagggtgaccggccacattgggactgagacacggcccaaactcctacgggaggcagcagtggggaatattgcacaatgggggaaaccctgatgcagcgacgccgcgtgaaggatgaagtatttcggtatgtaaacttctatcagcagggaagaaaatgacggtacctgactaagaagccccggctaactacgtgccagcagccgcggtaatacgtagggggcaagcgttatccggatttactgggtgtaaagggagcgtagacggtgatgcaagtctgatgtgaaaacccggggctcaaccccgggactgcattggaaactgtgtgactagagtgtcggagaggtaagtggaattcctagtgtagcggtgaaatgcgtagatattaggaggaacaccagtggcgaaggcggcttactggacgatgactgacgttgaggctcgaaagcgtggggagcaaacaggattagataccctggtagtccacgccgtaaacgatgaatactaggtgtcgggtggcaaagccattcggtgccgcagcaaacgcagtaagtattccacctggggagtacgttcgcaagaatgaaactcaaaggaattgacggggacccgcacaagcggtggagcatgtggtttaattcgaagcaacgcgaagaaccttacctgctcttgacatcccgctgaccggccagtaatgtggccttcccttcggggcagtggagacaggtggtgcatggttgtcgtcagctcgtgtcgtgagatgttgggttaagtcccgcaacgagcgcaacccttatctttagtagccagcggtcaggccgggcactctagagagactgccagggataacctggaggaaggtggggatgacgtcaaatcatcatgccccttatgagcagggctacacacgtgctacaatggcgtaaacaaagggaagcaatactgtgaagtggagcaaatcccaaaaataacgtctcagttcggattgtagtctgcaactcgactacatgaagctggaatcgctagtaatcgcgaatcagaatgtcgcggtgaatacgttcccgggtcttgtacacaccgcccgtcacaccatgggagttggtaacgcccgaagtcagtgacccaaccgcaaggagggagctgccgaaggtgggaccgataactggggtgaagtcgtaacaaggtagccgtatcggaaggtgcggctggatcacctccttt

SEQ ID NO: 806 - DNA, 1426 bp, artificial sequence
  STR01314_[Faecalicatena]_orotica
tgactgagcggcggacgggtgagtaacgcgtgggtaacctgcctcatacagggggataacagttagaaatgactgctaataccgtataagaccacggtgccgcatggcacagtggtaaaaactccggtggtatgagatggacccgcgtctgattagcttgttggtaaggtaacggcttaccaaggcgacgatcagtagccgacctgagagggtgaccggccacattgggactgagacacggcccaaactcctacgggaggcagcagtggggaatattgcacaatgggggaaaccctgatgcagcgacgccgcgtgaaggatgaagtatttcggtatgtaaacttctatcagcagggaagaaaatgacggtacctgactaagaagccccggctaactacgtgccagcagccgcggtaatacgtagggggcaagcgttatccggatttactgggtgtaaagggagcgtagacggtgatgcaagtctgatgtgaaaacccggggctcaaccccgggactgcattggaaactgtgtgactagagtgtcggagaggtaagtggaattcctagtgtagcggtgaaatgcgtagatattaggaggaacaccagtggcgaaggcggcttactggacgatgactgacgttgaggctcgaaagcgtggggagcaaacaggattagataccctggtagtccacgccgtaaacgatgaatactaggtgtcgggtggcaaagccattcggtgccgcagcaaacgcagtaagtattccacctggggagtacgttcgcaagaatgaaactcaaaggaattgacggggacccgcacaagcggtggagcatgtggtttaattcgaagcaacgcgaagaaccttacctgctcttgacatcccgctgaccggccagtaatgtggccttcccttcggggcagtggagacaggtggtgcatggttgtcgtcagctcgtgtcgtgagatgttgggttaagtcccgcaacgagcgcaacccttatctttagtagccagcggtcaggccgggcactctagagagactgccagggataacctggaggaaggtggggatgacgtcaaatcatcatgccccttatgagcagggctacacacgtgctacaatggcgtaaacaaagggaggcaatactgtgaagtggagcaaatcccaaaaataacgtctcagttcggattgtagtctgcaactcgactacatgaagctggaatcgctagtaatcgcgaatcagaatgtcgcggtgaatacgttcccgggtcttgtacacaccgcccgtcacaccatgggagttggtaacgcccgaagtcagtgacccaaccgcaaggagggagctgccgaaggtgggaccgataactggggtgaagtcgtaacaaggtagccgtatcggaaggtgcggctggatcacctccttt

SEQ ID NO: 807 - DNA, 1426 bp, artificial sequence; identical to SEQ ID NO: 806
  STR01316_[Faecalicatena]_orotica

SEQ ID NO: 808 - DNA, 1541 bp, artificial sequence
  GCF_003149245.1_05171_[Faecalicatena]_orotica
ttgaagagtttgatcatggctcagattgaacgctggcggcaggcctaacacatgcaagtcgagcggcagcgggaaagtagcttgctacttttgccggcgagcggcggacgggtgagtaatgcctgggaaattgcccagtcgagggggataacagttggaaacgactgctaataccgcatacgccctacgggggaaagcaggggaccttcgggccttgcgcgattggatatgcccaggtgggattagctagttggtgaggtaatggctcaccaaggcgacgatccctagctggtctgagaggatgatcagccacactggaactgagacacggtccagactcctacgggaggcagcagtggggaatattgcacaatgggggaaaccctgatgcagccatgccgcgtgtgtgaagaaggccttcgggttgtaaagcactttcagcgaggaggaaaggtcagtagctaatatctgctgactgtgacgttactcgcagaagaagcaccggctaactccgtgccagcagccgcggtaatacggagggtgcaagcgttaatcggaattactgggcgtaaagcgcacgcaggcggttggataagttagatgtgaaagccccgggctcaacctgggaattgcatttaaaactgtccagctagagtcttgtagaggggggtagaattccaggtgtagcggtgaaatgcgtagagatctggaggaataccggtggcgaaggcggccccctggacaaagactgacgctcaggtgcgaaagcgtggggagcaaacaggattagataccctggtagtccacgccgtaaacgatgtcgatttggaggctgtgtccttgagacgtggcttccggagctaacgcgttaaatcgaccgcctggggagtacggccgcaaggttaaaactcaaatgaattgacgggggcccgcacaagcggtggagcatgtggtttaattcgatgcaacgcgaagaaccttacctggccttgacatgtctggaatcctgtagagatacgggagtgccttcgggaatcagaacacaggtgctgcatggctgtcgtcagctcgtgtcgtgagatgttgggttaagtcccgcaacgagcgcaacccctgtcctttgttgccagcacgtaatggtgggaactcaagggagactgccggtgataaaccggaggaaggtggggatgacgtcaagtcatcatggcccttacggccagggctacacacgtgctacaatggcgcgtacagagggctgcaagctagcgatagtgagcgaatcccaaaaagcgcgtcgtagtccggattggagtctgcaactcgactccatgaagtcggaatcgctagtaatcgcaaatcagaatgttgcggtgaatacgttcccgggccttgtacacaccgcccgtcacaccatgggagtgggttgcaccagaagtagatagcttaaccttcgggagggcgtttaccacggtgtgattcatgactggggtgaagtcgtaacaaggtaaccctaggggaacctggggttggatcacctcctt

SEQ ID NO: 809 - DNA, 1565 bp, artificial sequence
  GCF_003479085.1_04736_[Faecalicatena]_orotica
tatgagagtttgatcctggctcaggacgaacgctggcggcgtgcctaatacatgcaagtcgaacgcacagatattaacagaagctgcttgcagtggaagttaattgatgtgagtggcggacgggtgagtaacacgtgggtaacctacccaaaagtgggggataacatttggaaacagatgctaataccgcataatttaagtgaccacatggtcacttaatgaaagatggtttcggctatcacttttggatggacccgcggcgtattagctagttggtgggataacggcctaccaaggcgatgatacgtagccgacctgagagggtaatcggccacattgggactgagacacggcccaaactcctacgggaggcagcagtagggaatcttccacaatggacgaaagtctgatggagcaacgccgcgtgagtgaagaaggttttcggatcgtaaaactctgttgttggagaagaacagggactagagtaactgttagtcctatgacggtatccaaccagaaagccacggctaactacgtgccagcagccgcggtaatacgtaggtggcaagcgttgtccggatttattgggcgtaaagcgagcgcaggcggttttttaagtctgatgtgaaagccttcggcttaaccgaagaagtgcattagaaactgggaaacttgagtgcagaagaggagagtggaactccatgtgtagcggtgaaatgcgtagatatatggaagaacaccagtggcgaaggcggctctctggtctgtaactgacgctgaggctcgaaagtatggggagcgaacaggattagataccctggtagtccataccgtaaacgatgaatgctaagtgttggagggtttccgcccttcagtgctgcagctaacgcattaagcattccgcctggggagtacgaccgcaaggttgaaactcaaaggaattgacgggggcccgcacaagcggtggagcatgtggtttaattcgaagctacgcgaagaaccttaccaggtcttgacatcctttgaccactgtagagatacagctttcccttcggggacaaagtgacaggtggtgcatggttgtcgtcagctcgtgtcgtgagatgttgggttaagtcccgcaacgagcgcaacccttatgactagttgccagcattaagttgggcactctagtgagactgccggtgacaaaccggaggaaggtggggatgacgtcaaatcagcatgccccttatgacctgggctacacacgtgctacaatggttggtacaacgagttgcgaacccgcgagggtaagctaatctcttaaagccaatctcagttcggattgtaggctgcaactcgcctacatgaagtcggaatcgctagtaatcgcggatcagcacgccgcggtgaatacgttcccgggccttgtacacaccgcccgtcacaccatgagagtttgtaacacccgaagccggtggggtaacctctatgaggagctaaccgtctaaggtgggacagatgattggggtgaagtcgtaacaaggtagccgtaggagaacctgcggctggatcacctcctt

SEQ ID NO: 810 - DNA, 1533 bp, artificial sequence
  GCF_900115945.1_01190_[Faecalicatena]_orotica
ctgaagagtttgatcatggctcagattgaacgctggcggcaggcttaacacatgcaagtcgagcgggggaaggtagcttgctactggacctagcggcggacgggtgagtaatgcttaggaatctgcctattagtgggggacaacattccgaaaggaatgctaataccgcatacgtcctacgggagaaagcaggggaccttcgggccttgcgctaatagatgagcctaagtcggattagctagttggtggggtaaaggcctaccaaggcgacgatctgtagcgggtctgagaggatgatccgccacactgggactgagacacggcccagactcctacgggaggcagcagtggggaatattggacaatggggggaaccctgatccagccatgccgcgtgtgtgaagaaggccttatggttgtaaagcactttaagcgaggaggaggctactagtattaatactactggatagtggacgttactcgcagaataagcaccggctaactctgtgccagcagccgcggtaatacagagggtgcgagcgttaatcggatttactgggcgtaaagcgtgcgtaggcggccatttaagtcaaatgtgaaatccccgagcttaacttgggaattgcattcgatactggatggctagagtatgggagaggatggtagaattccaggtgtagcggtgaaatgcgtagagatctggaggaataccgatggcgaaggcagccatctggcctaatactgacgctgaggtacgaaagcatggggagcaaacaggattagataccctggtagtccatgccgtaaacgatgtctactagccgttggggcctttgaggctttagtggcgcagctaacgcgataagtagaccgcctggggagtacggtcgcaagactaaaactcaaatgaattgacgggggcccgcacaagcggtggagcatgtggtttaattcgatgcaacgcgaagaaccttacctggccttgacatactagaaactttccagagatggattggtgccttcgggaatctagatacaggtgctgcatggctgtcgtcagctcgtgtcgtgagatgttgggttaagtcccgcaacgagcgcaacccttttccttacttgccagcatttcggatgggaactttaaggatactgccagtgacaaactggaggaaggcggggacgacgtcaagtcatcatggcccttacggccagggctacacacgtgctacaatggtcggtacaaagggttgctacctagcgataggatgctaatctcaaaaagccgatcgtagtccggattggagtctgcaactcgactccatgaagtcggaatcgctagtaatcgcggatcagaatgccgcggtgaatacgttcccgggccttgtacacaccgcccgtcacaccatgggagtttgttgcaccagaagtaggtagtctaaccgcaaggaggacgcttaccacggtgtggccgatgactggggtgaagtcgtaacaaggtagccgtaggggaacctgcggctggatcacctcctt

SEQ ID NO: 811 - DNA, 1567 bp, artificial sequence
  STR00788_[Lactobacillus]_paracasei
tatgagagtttgatcctggctcaggatgaacgctggcggcgtgcctaatacatgcaagtcgaacgagttctcgttgatgatcggtgcttgcaccgagattcaacatggaacgagtggcggacgggtgagtaacacgtgggtaacctgcccttaagtgggggataacatttggaaacagatgctaataccgcatagatccaagaaccgcatggttcttggctgaaagatggcgtaagctatcgcttttggatggacccgcggcgtattagctagttggtgaggtaatggctcaccaaggcgatgatacgtagccgaactgagaggttgatcggccacattgggactgagacacggcccaaactcctacgggaggcagcagtagggaatcttccacaatggacgcaagtctgatggagcaacgccgcgtgagtgaagaaggctttcgggtcgtaaaactctgttgttggagaagaatggtcggcagagtaactgttgtcggcgtgacggtatccaaccagaaagccacggctaactacgtgccagcagccgcggtaatacgtaggtggcaagcgttatccggatttattgggcgtaaagcgagcgcaggcggttttttaagtctgatgtgaaagccctcggcttaaccgaggaagcgcatcggaaactgggaaacttgagtgcagaagaggacagtggaactccatgtgtagcggtgaaatgcgtagatatatggaagaacaccagtggcgaaggcggctgtctggtctgtaactgacgctgaggctcgaaagcatgggtagcgaacaggattagataccctggtagtccatgccgtaaacgatgaatgctaggtgttggagggtttccgcccttcagtgccgcagctaacgcattaagcattccgcctggggagtacgaccgcaaggttgaaactcaaaggaattgacgggggcccgcacaagcggtggagcatgtggtttaattcgaagcaacgcgaagaaccttaccaggtcttgacatcttttgatcacctgagagatcaggtttccccttcgggggcaaaatgacaggtggtgcatggttgtcgtcagctcgtgtcgtgagatgttgggttaagtcccgcaacgagcgcaacccttatgactagttgccagcatttagttgggcactctagtaagactgccggtgacaaaccggaggaaggtggggatgacgtcaaatcatcatgccccttatgacctgggctacacacgtgctacaatggatggtacaacgagttgcgagaccgcgaggtcaagctaatctcttaaagccattctcagttcggactgtaggctgcaactcgcctacacgaagtcggaatcgctagtaatcgcggatcagcacgccgcggtgaatacgttcccgggccttgtacacaccgcccgtcacaccatgagagtttgtaacacccgaagccggtggcgtaacccttttagggagcgagccgtctaaggtgggacaaatgattagggtgaagtcgtaacaaggtagccgtaggagaacctgcggctggatcacctccttt

SEQ ID NO: 812 - DNA, 887 bp, artificial sequence
  GCF_000014525.1_00255_[Lactobacillus]_paracasei
ttggagagtttgatcctggcgtcaggacgaacggctggcggcgtgcttaacacatgcaagtcgaacgaagagcgatggaagcttgcttctatcaatcttagtggcgaacgggtgagtaacgcgtaatcaacctgcccttcagagggggacaacagttggaaacgactgctaataccgcatacgattcgacctcggcatcgaggatggatgaaaggtggcctctatttataagctatcactgaaggaggggattgcgtctgattagctagttggaggggtaacggcccaccaaggcaatgatcagtagccggtctgagaggatgaacggccacattgggactgagacacggcccagactcctacgggaggcagcagtggggaatcttccgcaatggacgaaagtctgacggagcaacgccgcgtgagtgatgacggccttcgggttgtaaagctctgttaatcgggacgaaaggtcctcttgcgaatagttagaggaattgacggtaccggaatagaaagccacggctaactacgtgccagcagccgcggtaatacgtaggtggcaagcgttgtccggaattattgggcgtaaagcgcgcgcaggcggatcagttagtctgtcttaaaagttcggggcttaaccccgtgatgggatggaaactgctgatctagagtatcggagaggaaagtggaattcctagtgtagcggtgaaatgcgtagatattaggaagaacaccagtggcgaaggcgactttctggacgaaaactgacgctgaggcgcgaaagccaggggagcgaacgggattagataccccggtagtcctggccgtaaacgatgggtactaggtgtaggaggtatcgaccccttctgtgccggagttaacgc

SEQ ID NO: 813 - DNA, 1537 bp, artificial sequence
  GCF_000014525.1_00811_[Lactobacillus]_paracasei
ttgaagagtttgatcatggctcagattgaacgctggcggcaggcctaacacatgcaagtcgaacggtaacaggaagcgcttgctgcttcgctgacgagtggcggacgggtgagtaatgtctgggaaactgcctgatggagggggataactactggaaacggtagctaataccgcataacgtcgcaagaccaaagagggggaccttcgggcctcttgccatcggatgtgcccagatgggattagcttgttggtggggtaacggctcaccaaggcgacgatccctagctggtctgagaggatgaccagccacactggaactgagacacggtccagactcctacgggaggcagcagtggggaatattgcacaatgggcgcaagcctgatgcagccatgccgcgtgtatgaagaaggccttcgggttgtaaagtactttcagcggggaggaagggagtaaagttaatacctttgctcattgacgttacccgcagaagaagcaccggctaactccgtgccagcagccgcggtaatacggagggtgcaagcgttaatcggaattactgggcgtaaagcgcacgcaggcggtttgttaagtcagatgtgaaatccccgggctcaacctgggaactgcatctgatactggcaagcttgagtctcgtagaggggggtagaattccaggtgtagcggtgaaatgcgtagagatctggaggaataccggtggcgaaggcggccccctggacgaagactgacgctcaggtgcgaaagcgtggggagcaaacaggattagataccctggtagtccacgccgtaaacgatgtcgacttggaggttgtgcccttgaggcgtggcttccggagctaacgcgttaagtcgaccgcctggggagtacggccgcaaggttaaaactcaaatgaattgacgggggcccgcacaagcggtggagcatgtggtttaattcgatgcaacgcgaagaaccttacctggtcttgacatccacggaagttttcagagatgagaatgtgccttcgggaaccgtgagacaggtgctgcatggctgtcgtcagctcgtgttgtgaaatgttgggttaagtcccgcaacgagcgcaacccttatcctttgttgccagcggtccggccgggaactcaaaggagactgccagtgataaactggaggaaggtggggatgacgtcaagtcatcatggcccttacgaccagggctacacacgtgctacaatggcgcatacaaagagaagcgacctcgcgagagcaagcggacctcataaagtgcgtcgtagtccggattggagtctgcaactcgactccatgaagtcggaatcgctagtaatcgtggatcagaatgccacggtgaatacgttcccgggccttgtacacaccgcccgtcacaccatgggagtgggttgcaaaagaagtaggtagcttaaccttcgggagggcgcttaccactttgtgattcatgactggggtgaagtcgtaacaaggtaaccgtaggggaacctgcggttggatcacctcctt

SEQ ID NO: 814 - DNA, 1538 bp, artificial sequence
  GCF_000014525.1_00855_[Lactobacillus]_paracasei
ttgaagagtttgatcatggctcagattgaacgctggcggcaggcctaacacatgcaagtcgaacggtaacaggaagcagcttgctgtttcgctgacgagtggcggacgggtgagtaatgtctgggaaactgcctgatggagggggataactactggaaacggtagctaataccgcataacgtcgcaagaccaaagagggggaccttcgggcctcttgccatcggatgtgcccagatgggattagctagtaggtggggtaacggctcacctaggcgacgatccctagctggtctgagaggatgaccagccacactggaactgagacacggtccagactcctacgggaggcagcagtggggaatattgcacaatgggcgcaagcctgatgcagccatgccgcgtgtatgaagaaggccttcgggttgtaaagtactttcagcggggaggaagggagtaaagttaatacctttgctcattgacgttacccgcagaagaagcaccggctaactccgtgccagcagccgcggtaatacggagggtgcaagcgttaatcggaattactgggcgtaaagcgcacgcaggcggtttgttaagtcagatgtgaaatccccgggctcaacctgggaactgcatctgatactggcaagcttgagtctcgtagaggggggtagaattccaggtgtagcggtgaaatgcgtagagatctggaggaataccggtggcgaaggcggccccctggacgaagactgacgctcaggtgcgaaagcgtggggagcaaacaggattagataccctggtagtccacgccgtaaacgatgtcgacttggaggttgtgcccttgaggcgtggcttccggagctaacgcgttaagtcgaccgcctggggagtacgaccgcaaggttaaaactcaaatgaattgacgggggcccgcacaagcggtggagcatgtggtttaattcgatgcaacgcgaagaaccttacctggtcttgacatccacggaagttttcagagatgagaatgtgccttcgggaaccgtgagacaggtgctgcatggctgtcgtcagctcgtgttgtgaaatgttgggttaagtcccgcaacgagcgcaacccttatcctttgttgccagcggtccggccgggaactcaaaggagactgccagtgataaactggaggaaggtggggatgacgtcaagtcatcatggcccttacgaccagggctacacacgtgctacaatggcgcatacaaagagaagcgacctcgcgagagcaagcggacctcataaagtgcgtcgtagtccggattggagtctgcaactcgactccatgaagtcggaatcgctagtaatcgtggatcagaatgccacggtgaatacgttcccgggccttgtacacaccgcccgtcacaccatgggagtgggttgcaaaagaagtaggtagcttaaccttcgggagggcgcttaccactttgtgattcatgactggggtgaagtcgtaacaaggtaaccgtaggggaacctgcggttggatcacctcctt

SEQ ID NO: 815 - DNA, 1538 bp, artificial sequence
  GCF_000014525.1_01822_[Lactobacillus]_paracasei
ttgaagagtttgatcatggctcagattgaacgctggcggcaggcctaacacatgcaagtcgaacggtaacaggaagcagcttgctgtttcgctgacgagtggcggacgggtgagtaatgtctgggaaactgcctgatggagggggataactactggaaacggtagctaataccgcataacgtcgcaagaccaaagagggggaccttcgggcctcttgccatcggatgtgcccagatgggattagctagtaggtggggtaacggctcacctaggcgacgatccctagctggtctgagaggatgaccagccacactggaactgagacacggtccagactcctacgggaggcagcagtggggaatattgcacaatgggcgcaagcctgatgcagccatgccgcgtgtatgaagaaggccttcgggttgtaaagtactttcagcggggaggaagggagtaaagttaatacctttactcattgacgttacccgcagaagaagcaccggctaactccgtgccagcagccgcggtaatacggagggtgcaagcgttaatcggaattactgggcgtaaagcgcacgcaggcggtttgttaagtcagatgtgaaatccccgggctcaacctgggaactgcatctgatactggcaagcttgagtctcgtagaggggggtagaattccaggtgtagcggtgaaatgcgtagagatctggaggaataccggtggcgaaggcggccccctggacgaagactgacgctcaggtgcgaaagcgtggggagcaaacaggattagataccctggtagtccacgccgtaaacgatgtcgacttggaggttgtgcccttgaggtgtggcttccggagctaacgcgttaagtcgaccgcctggggagtacggccgcaaggttaaaactcaaatgaattgacgggggcccgcacaagcggtggagcatgtggtttaattcgatgcaacgcgaagaaccttacctggtcttgacatccacggaagttttcagagatgagaatgtgccttcgggaaccgtgagacaggtgctgcatggctgtcgtcagctcgtgttgtgaaatgttgggttaagtcccgcaacgagcgcaacccttatcctttgttgccagcggtccggccgggaactcaaaggagactgccagtgataaactggaggaaggtggggatgacgtcaagtcatcatggcccttacgaccagggctacacacgtgctacaatggcgcatacaaagagaagcgacctcgcgagagcaagcggacctcataaagtgcgtcgtagtccggattggagtctgcaactcgactccatgaagtcggaatcgctagtaatcgtggatcagaatgccacggtgaatacgttcccgggccttgtacacaccgcccgtcacaccatgggagtgggttgcaaaagaagtaggtagcttaaccttcgggagggcgcttaccactttgtgattcatgactggggtgaagtcgtaacaaggtaaccgtaggggaacctgcggttggatcacctcctt

SEQ ID NO: 816 - DNA, 1538 bp, artificial sequence
  GCF_000014525.1_02502_[Lactobacillus]_paracasei
ttgaagagtttgatcatggctcagattgaacgctggcggcaggcctaacacatgcaagtcgaacggtaacaggaagcagcttgctgtttcgctgacgagtggcggacgggtgagtaatgtctgggaaactgcctgatggagggggataactactggaaacggtagctaataccgcataacgtcgcaagaccaaagagggggaccttcgggcctcttgccatcggatgtgcccagatgggattagctagtaggtggggtaacggctcacctaggcgacgatccctagctggtctgagaggatgaccagccacactggaactgagacacggtccagactcctacgggaggcagcagtggggaatattgcacaatgggcgcaagcctgatgcagccatgccgcgtgtatgaagaaagccttcgggttgtaaagtactttcagcggggaggaagggagtaaagttaatacctttgctcattgacgttacccgcagaagaagcaccggctaactccgtgccagcagccgcggtaatacggagggtgcaagcgttaatcggaattactgggcgtaaagcgcacgcaggcggtttgttaagtcagatgtgaaatccccgggctcaacctgggaactgcatctgatactggcaagcttgagtctcgtagaggggggtagaattccaggtgtagcggtgaaatgcgtagagatctggaggaataccggtggcgaaggcggccccctggacgaagactgacgctcaggtgcgaaagcgtggggagcaaacaggattagataccctggtagtccacgctgtaaacgatgtcgacttggaggttgtgcccttgaggtgtggcttccggagctaacgcgttaagtcgaccgcctggggagtacggccgcaaggttaaaactcaaatgaattgacgggggcccgcacaagcggtggagcatgtggtttaattcgatgcaacgcgaagaaccttacctggtcttgacatccacggaagttttcagagatgagaatgtgccttcgggaaccgtgagacaggtgctgcatggctgtcgtcagctcgtgttgtgaaatgttgggttaagtcccgcaacgagcgcaacccttatcctttgttgccagcggtccggccgggaactcaaaggagactgccagtgataaactggaggaaggtggggatgacgtcaagtcatcatggcccttacgaccagggctacacacgtgctacaatggcgcatacaaagagaagcgacctcgcgagagcaagcggacctcataaagtgcgtcgtagtccggattggagtctgcaactcgactccatgaagtcggaatcgctagtaatcgtggatcagaatgccacggtgaatacgttcccgggccttgtacacaccgcccgtcacaccatgggagtgggttgcaaaagaagtaggtagcttaaccttcgggagggcgcttaccactttgtgattcacgactggggtgaagtcgtaacaaggtaaccgtaggggaacctgcggttggatcacctcctt

SEQ ID NO: 817 - DNA, 1538 bp, artificial sequence
  GCF_000019245.4_00271_[Lactobacillus]_paracasei
ttgaagagtttgatcatggctcagattgaacgctggcggcaggcctaacacatgcaagtcgaacggtaacaggaaacagcttgctgtttcgctgacgagtggcggacgggtgagtaatgtctgggaaactgcctgatggagggggataactactggaaacggtagctaataccgcataatgtcgcaagaccaaagagggggaccttagggcctcttgccatcggatgtgcccagatgggattagctagtaggtggggtaacggctcacctaggcgacgatccctagctggtctgagaggatgaccagccacactggaactgagacacggtccagactcctacgggaggcagcagtggggaatattgcacaatgggcgcaagcctgatgcagccatgccgcgtgtatgaagaaggccttcgggttgtaaagtactttcagcggggaggaagggagtaaagttaatacctttgctcattgacgttacccgcagaagaagcaccggccaactccgtgccagcagccgcggtaatacggagggtgcaagcgttaatcggaattactgggcgtaaagcgcacgcaggcggtttgttaagtcagatgtgaaatccccgggctcaacctgggaactgcatctgatactggcaagcttgagtctcgtagaggggggtagaattccaggtgtagcggtgaaatgcgtagagatctggaggaataccggtggcgaaggcggccccctggacgaagactgacgctcaggtgcgaaagcgtggggagcaaacaggattagataccctggtagtccacgccgtaaacgatgtcgacttggaggttgtgcccttgaggcgtggcttccggagctaacgcgttaagtcgaccgcctggggagtacggccgcaaggttaaaactcaaatgaattgacgggggcccgcacaagcggtggagcatgtggtttaattcgatgcaacgcgaagaaccttacctggtcttgacatccacggaagttttcagagatgagaatgtgccttcgggaaccgtgagacaggtgctgcatggctgtcgtcagctcgtgttgtgaaatgttgggttaagtcccgcaacgagcgcaacccttatcctttgttgccagcggtccggccgggaactcaaaggagactgccagtgataaactggaggaaggtggggatgacgtcaagtcatcatggcccttacgaccagggctacacacgtgctacaatggcgcatacaaagagaagcgacctcgcgagagcaagcggacctcataaagtgcgtcgtagtccggattggagtctgcaactcgactccatgaagtcggaatcgctagtaatcgtggatcagaatgccacggtgaatacgttcccgggccttgtacacaccgcccgtcacaccatgggagtgggttgcaaaagaagtaggtagcttaaccttcgggagggcgcttaccactttgtgattcatgactggggtgaagtcgtaacaaggtaaccgtaggggaacctgcggttggatcacctcctt

SEQ ID NO: 818 - DNA, 1538 bp, artificial sequence
  GCF_000019245.4_00720_[Lactobacillus]_paracasei
ttgaagagtttgatcatggctcagattgaacgctggcggcaggcctaacacatgcaagtcgaacggtaacaggaagcagcttgctgcttcgctgacgagtggcggacgggtgagtaatgtctgggaaactgcctgatggagggggataactactggaaacggtagctaataccgcataatgtcgcaagaccaaagagggggaccttcgggcctcttgccatcggatgtgcccagatgggattagcttgttggtggggtaacggctcaccaaggcgacgatccctagctggtctgagaggatgaccagccacactggaactgagacacggtccagactcctacgggaggcagcagtggggaatattgcacaatgggcgcaagcctgatgcagccatgccgcgtgtatgaagaaggccttcgggttgtaaagtactttcagcggggaggaagggagtaaagttaatacctttgctcattgacgttacccgcagaagaagcaccggctaactccgtgccagcagccgcggtaatacggagggtgcaagcgttaatcggaattactgggcgtaaagcgcacgcaggcggtttgttaagtcagatgtgaaatccccgggctcaacctgggaactgcatctgatactggcaagcttgagtctcgtagaggggggtagaattccaggtgtagcggtgaaatgcgtagagatctggaggaataccggtggtgaaggcggccccctggacgaagactgacgctcaggtgcgaaagcgtggggagcaaacaggattagataccctggtagtccacgccgtaaacgatgtcgacttggaggttgtgcccttgaggcgtggcttccggagctaacgcgttaagtcgaccgcctggggagtacggccgcaaggttaaaactcaaatgaattgacgggggcccgcacaagcggtggagcatgtggtttaattcgatgcaacgcgaagaaccttacctggtcttgacatccacggaagttttcagagatgagaatgtgccttcgggaaccgtgagacaggtgctgcatggctgtcgtcagctcgtgttgtgaaatgttgggttaagtcccgcaacgagcgcaacccttatcctttgttgccagcggtccggccgggaactcaaaggagactgccagtgataaactggaggaaggtggggatgacgtcaagtcatcatggcccttacgaccagggctacacacgtgctacaatggcgcatacaaagagaagcgacctcgcgagagcaagcggacctcataaagtgcgtcgtagtccggattggagtctgcaactcgactccatgaagtcggaatcgctagtaatcgtggatcagaatgccacggtgaatacgttcccgggccttgtacacaccgcccgtcacaccatgggagtgggttgcaaaagaagtaggtagcttaaccttcgggagggcgcttaccactttgtgattcatgactggggtgaagtcgtaacaaggtaaccgtaggggaacctgcggttggatcacctcctt

SEQ ID NO: 819 - DNA, 1538 bp, artificial sequence
  GCF_000019245.4_00758_[Lactobacillus]_paracasei
ttgaagagtttgatcatggctcagattgaacgctggcggcaggcctaacacatgcaagtcgaacggtaacaggaaacagcttgctgtttcgctgacgagtggcggacgggtgagtaatgtctgggaaactgcctgatggagggggataactactggaaacggtagctaataccgcataacgtcgaaagaccaaagagggggaccttcgggcctcttgccatcggatgtgcccagatgggattagctagtaggtggggtaacggctcacctaggcgacgatccctagctggtctgagaggatgaccagccacactggaactgagatacggtccagactcctacgggaggcagcagtggggaatattgcacaatgggcgcaagcctgatgcagccatgccgcgtgtatgaagaaggccttcgggttgtaaagtactttcagcggggaggaagggagtaaagttaatacctttgctcattgacgttacccgcagaagaagcaccggctaactccgtgccagcagccgcggtaatacggagggtgcaagcgttaatcggaattactgggcgtaaagcgcacgcaggcggtttgttaagtcagatgtgaaatccccgggctcaacctgggaactgcatctgatactggcaagcttgagtctcgtagaggggggtagaattccaggtgtagcggtgaaatgcgtagagatctggaggaataccggtggcgaaggcggccccctggacgaagactgacgctcaggtgcgaaagcgtggggagcaaacaggattagataccctggtagtccacgccgtaaacgatgtcgacttggaggttgtgcccttgaggcgtggcttccggagctaacgcgttaagtcgaccgcctggggagtacggccgcaaggttaaaactcaaatgaattgacgggggcccgcacaagcggtggagcatgtggtttaattcgatgcaacgcgaagaaccttacctggtcttgacatccacggaagttttcagagatgagaatgtgccttcgggaaccgtgagacaggtgctgcatggctgtcgtcagctcgtgttgtgaaatgttgggttaagtcccgcaacgagcgcaacccttatcctttgttgccagcggtccggccgggaactcaaaggagactgccagtgataaactggaggaaggtggggatgacgtcaagtcatcatggcccttacgaccagggctacacacgtgctacaatggcgcatacaaagagaagcgacctcgcgagagcaagcggacctcataaagtgcgtcgtagtccggattggagtctgcaactcgactccatgaagtcggaatcgctagtaatcgtggatcagaatgccacggtgaatacgttcccgggccttgtacacaccgcccgtcacaccatgggagtgggttgcaaaagaagtaggtagcttaaccttcgggagggcgcttaccactttgtgattcatgactggggtgaagtcgtaacaaggtaaccgtaggggaacctgcggttggatcacctcctt

SEQ ID NO: 820 - DNA, 1538 bp, artificial sequence
  GCF_000019245.4_01718_[Lactobacillus]_paracasei
ttgaagagtttgatcatggctcagattgaacgctggcggcaggcctaacacatgcaagtcgaacggtaacaggaagcagcttgctgcttcgctgacgagtggcggacgggtgagtaatgtctgggaaactgcctgatggagggggataactactggaaacggtagctaataccgcataatgtcgcaagaccaaagagggggaccttcgggcctcttgccatcggatgtgcccagatgggattagcttgttggtggggtaacggctcaccaaggcgacgatccctagctggtctgagaggatgaccagccacactggaactgagacacggtccagactcctacgggaggcagcagtggggaatattgcacaatgggcgcaagcctgatgcagccatgccgcgtgtatgaagaaggccttcgggttgtaaagtactttcagcggggaggaagggagtaaagttaatacctttgctcattgacgttacccgcagaagaagcaccggctaactccgtgccagcagccgcggtaatacggagggtgcaagcgttaatcggaattactgggcgtaaagcgcacgcaggcggtttgttaagtcagatgtgaaatccccgggctcaacctgggaactgcatctgatactggcaagcttgagtctcgtagaggggggtagaattccaggtgtagcggtgaaatgcgtagagatctggaggaataccggtggcgaaggcggccccctggacgaagactgacgctcaggtgcgaaagcgtggggagcaaacaggattagataccctggtagtccacgccgtaaacgatgtcgacttggaggttgtgcccttgaggcgtggcttccggagctaacgcgttaagtcgaccgcctggggagtacggccgcaaggttaaaactcaaatgaattgacgggggcccgcacaagcggtggagcatgtggtttaattcgatgcaacgcgaagaaccttacctggtcttgacatccacggaagttttcagagatgagaatgtgccttcgggaaccgtgagacaggtgctgcatggctgtcgtcagctcgtgttgtgaaatgttgggttaagtcccgcaacgagcgcaacccttatcctttgttgccagcggtccggccgggaactcaaaggagactgccagtgataaactggaggaaggtggggatgacgtcaagtcatcatggcccttacgaccagggctacacacgtgctacaatggcgcatacaaagagaagcgacctcgcgagagcaagcggacctcataaagtgcgtcgtagtccggattggagtctgcaactcgactccatgaagtcggaatcgctagtaatcgtggatcagaatgccacggtgaatacgttcccgggccttgtacacaccgcccgtcacaccatgggagtgggttgcaaaagaagtaggtagcttaaccttcgggagggcgcttaccactttgtgattcatgactggggtgaagtcgtaacaaggtaaccgtaggggaacctgcggttggatcacctcctt

SEQ ID NO: 821 - DNA, 1538 bp, artificial sequence
  GCF_000019245.4_02333_[Lactobacillus]_paracasei
ttgaagagtttgatcatggctcagattgaacgctggcggcaggcctaacacatgcaagtcgaacggtaacaggaatcagcttgctgattcgctgacgagtggcggacgggtgagtaatgtctgggaaactgcctgatggagggggataactactggaaacggtagctaataccgcataatgtcgcaagaccaaagagggggaccttcgggcctcttgccatcggatgtgcccagatgggattagcttgttggtggggtaacggctcaccaaggcgacgatccctagctggtctgagaggatgaccagccacactggaactgagacacggtccagactcctacgggaggcagcagtggggaatattgcacaatgggcgcaagcctgatgcagccatgccgcgtgtatgaagaaggccttcgggttgtaaagtactttcagcggggaggaagggagtaaagttaatacctttgctcattgacgttacccgcagaagaagcaccggctaactccgtgccagcagccgcggtaatacggagggtgcaagcgttaatcggaattactgggcgtaaagcgcacgcaggcggtttgttaagtcagatgtgaaatccccgggctcaacctgggaactgcatctgatactggcaagcttgagtctcgtagaggggggtagaattccaggtgtagcggtgaaatgcgtagagatctggaggaataccggtggcgaaggcggccccctggacgaagactgacgctcaggtgcgaaagcgtggggagcaaacaggattagataccctggtagtccacgccgtaaacgatgtcgacttggaggttgtgcccttgaggcgtggcttccggagctaacgcgttaagtcgaccgcctggggagtacggccgcaaggttaaaactcaaatgaattgacgggggcccgcacaagcggtggagcatgtggtttaattcgatgcaacgcgaagaaccttacctggtcttgacatccacggaagttttcagagatgagaatgtgccttcgggaaccgtgagacaggtgctgcatggctgtcgtcagctcgtgttgtgaaatgttgggttaagtcccgcaacgagcgcaacccttatcctttgttgccagcggtccggccgggaactcaaaggagactgccagtgataaactggaggaaggtggggatgacgtcaagtcatcatggcccttacgaccagggctacacacgtgctacaatggcgcatacaaagagaagcgacctcgcgagagcaagcggacctcataaagtgcgtcgtagtccggattggagtctgcaactcgactccatgaagtcggaatcgctagtaatcgtggatcagaatgccacggtgaatacgttcccgggccttgtacacaccgcccgtcacaccatgggagtgggttgcaaaagaagtaggtagcttaaccttcgggagggcgcttaccactttgtgattcatgactggggtgaagtcgtaacaaggtaaccgtaggggaacctgcggttggatcacctcctt

SEQ ID NO: 822 - DNA, 1509 bp, artificial sequence
  GCF_000026485.1_00256_[Lactobacillus]_paracasei
agtgagagtttgatcctggctcaggacgaacgctggcggcgtgcctaacacatgcaagtcgagcgaggggagtttcttcggaaacaaacctagcggcggacgggtgagtaacacgtgggcaacctgccttgtagaggggaatagcctcccgaaagggagattaataccgcataacattgcagcttcgcatggagcagcaattaaaggagtaatccgctacaagatgggcccgcggcgcattagctagttggtgaggtaacggctcaccaaggcgacgatgcgtagccgacctgagagggtgatcggccacattgggactgagacacggcccagactcctacgggaggcagcagtggggaatattgcacaatgggggaaaccctgatgcagcaacgccgcgtgagtgatgaaggttttcggatcgtaaagctctgtcttcagggacgataatgacggtacctgaggaggaagccacggctaactacgtgccagcagccgcggtaatacgtaggtggcgagcgttgtccggatttactgggcgtaaaggagcgtaggcggactttaagtgagatgtgaaatacccgggctcaacctgggggctgcatttcaaactggaagtctagagtgcaggagaggagagtggaattcctagtgtagcggtgaaatgcgtagagattaggaagaacaccagtggcgaaggcgactctctggactgtaactgacgctgaggctcgaaagcgtggggagcaaacaggattagataccctggtagtccacgccgtaaacgatggatactaggtgtgggaggtatcaactccttccgtgccgccgttaacacattaagtatcccgcctggggagtacggtcgcaagattaaaactcaaaggaattgacgggggcccgcacaagcagcggagcatgtggtttaattcgaagcaacgcgaagaaccttacctagacttgacatctcctgcattactcttaatcgaggaagttccttcggggacaggatgacaggtggtgcatggttgtcgtcagctcgtgtcgtgagatgttgggttaagtcccgcaacgagcgcaacccttattgttagttgctaccatttagttgagcactctagcgagactgcccgggttaaccgggaggaaggtggggatgacgtcaaatcatcatgcccttatgtctagggctacacacgtgctacaatggcaagtacaacgagatgcaataccgtgaggtggagctaaactataaaacttgtctcagttcggattgtaggctgaaactcgcctacatgaagctggagttgctagtaatcgcgaatcagcatgtcgcggtgaatacgttcccgggccttgtacacaccgcccgtcacaccatgagagttggcaatacccaaagttcgtgagctaaccgtaaggaggcagcgacctaaggtagggtcagcgattggggtgaagtcgtaacaaggtagccgtaggagaacctgcggctggatcacctccttt

SEQ ID NO: 823 - DNA, 1510 bp, artificial sequence
  GCF_000026485.1_00878_[Lactobacillus]_paracasei
agtgagagtttgatcctggctcaggacgaacgctggcggcgtgcctaacacatgcaagtcgagcgaggggagtttcttcggaaacaaacctagcggcggacgggtgagtaacacgtgggcaacctgccttgtagaggggaatagcctcccgaaagggagattaataccgcataacattgcagcttcgcatggagcagcaattaaaggagtaatccgctacaagatgggcccgcggcgcattagctagttggtgaggtaacggctcaccaaggcgacgatgcgtagccgacctgagagggtgatcggccacattgggactgagacacggcccagactcctacgggaggcagcagtggggaatattgcacaatgggggaaaccctgatgcagcaacgccgcgtgagtgatgaaggttttcggatcgtaaagctctgtcttcagggacgataatgacggtacctgaggaggaagccacggctaactacgtgccagcagccgcggtaatacgtaggtggcgagcgttgtccggatttactgggcgtaaagggagcgtaggcggactttaagtgagatgtgaaataccgggctcaacctgggggctgcatttcaaactggaagtctagagtgcaggagaggagagtggaattcctagtgtagcggtgaaatgcgtagagattaggaagaacaccagtggcgaaggcgactctctggactgtaactgacgctgaggctcgaaagcgtggggagcaaacaggattagataccctggtagtccacgccgtaaacgatggatactaggtgtgggaggtatcaactccttccgtgccgccgttaacacattaagtatcccgcctggggagtacggtcgcaagattaaaactcaaaggaattgacgggggcccgcacaagcagcggagcatgtggtttaattcgaagcaacgcgaagaaccttacctagacttgacatctcctgcattactcttaatcgaggaagtctcttcggggacaggatgacaggtggtgcatggttgtcgtcagctcgtgtcgtgagatgttgggttaagtcccgcaacgagcgcaacccttattgttagttgctaccatttagttgagcactctagcgagactgcccgggttaaccgggaggaaggtggggatgacgtcaaatcatcatgccccttatgtctagggctacacacgtgctacaatggcaagtacaacgagatgcaataccgcgaggtggagctaaactataaaacttgtctcagttcggattgtaggctgaaactcgcctacatgaagctggagttgctagtaatcgcgaatcagcatgtcgcggtgaatacgttcccgggccttgtacacaccgcccgtcacaccatgagagttggcaatacccaaagttcgtgagctaaccgcaaggaggcagcgacctaaggtagggtcagcgattggggtgaagtcgtaacaaggtagccgtaggagaacctgcggctggatcacctccttt

SEQ ID NO: 824 - DNA, 1511 bp, artificial sequence
  GCF_000026485.1_00920_[Lactobacillus]_paracasei
agtgagagtttgatcctggctcaggacgaacgctggcggcgtgcctaacacatgcaagtcgagcgagggagtttcttcggaaacaaacctagcggcggacgggtgagtaacacgtgggcaacctgccttgtagaggggaatagcctcccgaaagggagattaataccgcataacattgcagcttcgcatggagcagcaattaaaggagtaatccgctacaagatgggcccgcggcgcattagctagttggtgaggtaacggctcaccaaggcgacgatgcgtagccgacctgagagggtgatcggccacattgggactgagacacggcccagactcctacgggaggcagcagtggggaatattgcacaatgggggaaaccctgatgcagcaacgccgcgtgagtgatgaaggttttcggatcgtaaagctctgtcttcagggacgataatgacggtacctgaggaggaagccacggctaactacgtgccagcagccgcggtaatacgtaggtggcgagcgttgtccggatttactgggcgtaaagggagcgtaggcggacttttaagtgagatgtgaaatacccgggctcaacctgggggctgcatttcaaactggaagtctagagtgcaggagaggagagtggaattcctagtgtagcggtgaaatgcgtagagattaggaagaacaccagtggcgaaggcgactctctggactgtaactgacgctgaggctcgaaagcgtggggagcaaacaggattagataccctggtagtccacgccgtaaacgatggatactaggtgtgggaggtatcaactccttccgtgccgccgttaacacattaagtatcccgcctggggagtacggtcgcaagattaaaactcaaaggaattgacgggggcccgcacaagcagcggagcatgtggtttaattcgaagcaacgcgaagaaccttacctagacttgacatctcctgcattactcttaatcgaggaagtcccttcggggacaggatgacaggtggtgcatggttgtcgtcagctcgtgtcgtgagatgttgggttaagtcccgcaacgagcgcaacccttattgttagttgctaccatttagttgagcactctagcgagactgcccgggttaaccgggaggaaggtggggatgacgtcaaatcatcatgccccttatgtctagggctacacacgtgctacaatggcaagtacaacgagatgcaataccgtgaggtggagctaaactataaaacttgtctcagttcggattgtaggctgaaactcgcctacatgaagctggagttgctagtaatcgcgaatcagcatgtcgcggtgaatacgttcccgggccttgtacacaccgcccgtcacaccatgagagttggcaatacccaaagttcgtgagctaaccgcaaggaggcagcgacctaaggtagggtcagcgattggggtgaagtcgtaacaaggtagccgtaggagaacctgcggctggatcacctccttt

SEQ ID NO: 825 - DNA, 1510 bp, artificial sequence
  GCF_000026485.1_02024_[Lactobacillus]_paracasei
agtgagagtttgatcctggctcaggacgaacgctggcggcgtgcctaacacatgcaagtcgagcgagggagtttcttcggaaacaaacctagcggcggacgggtgagtaacacgtgggcaacctaccttgtagagggaatagcctcccgaaagggagattaataccgcataacattgcagcttcgcatggagcagcaattaaaggagtaatccgctacaagatgggcccgcggcgcattagctagttggtgaggtaacggctcaccaaggcgacgatgcgtagccgacctgagagggtgatcggccacattgggactgagacacggcccagactcctacgggaggcagcagtggggaatattgcacaatgggggaaaccctgatgcagcaacgccgcgtgagtgatgaaggttttcggatcgtaaagctctgtcttcagggacgataatgacggtacctgaggaggaagccacggctaactacgtgccagcagccgcggtaatacgtaggtggcgagcgttgtccggatttactgggcgtaaagggagcgtaggcggacttttaagtgagatgtgaaatacccgggctcaacctgggggctgcatttcaaactggaagtctagagtgcaggagaggagagtggaattcctagtgtagcggtgaaatgcgtagagattaggaagaacaccagtggcgaaggcgactctctggactgtaactgacgctgaggctcgaaagcgtggggagcaaacaggattagataccctggtagtccacgccgtaaacgatggatactaggtgtgggaggtatcaactccttccgtgccgccgttaacacattaagtatcccgcctggggagtacggtcgcaagattaaaactcaaaggaattgacgggggcccgcacaagcagcggagcatgtggtttaattcgaagcaacgcgaagaaccttacctagacttgacatctcctgcattactcttaatcgaggaagtcccttcggggacaggatgacaggtggtgcatggttgtcgtcagctcgtgtcgtgagatgttgggttaagtcccgcaacgagcgcaacccttattgttagttgctaccatttagttgagcactctagcgagactgcccgggttaaccgggaggaaggtggggatgacgtcaaatcatcatgccccttatgtctagggctacacacgtgctacaatggcaagtacaacgagatgcaataccgtgaggtggagctaaactataaaacttgtctcagttcggattgtaggctgaaactcgcctacatgaagctggagttgctagtaatcgcgaatcagcatgtcgcggtgaatacgttcccgggccttgtacacaccgcccgtcacaccatgagagttggcaatacccaaagttcgtgagctaaccgtaaggaggcagcgacctaaggtagggtcagcgattggggtgaagtcgtaacaaggtagccgtaggagaacctgcggctggatcacctccttt

SEQ ID NO: 826 - DNA, 1504 bp, artificial sequence
  GCF_000026485.1_02646_[Lactobacillus]_paracasei
agtgagagtttgatcctggctcaggacgaacgctggcggcgtgcctaacacatgcaagtcgagcgagggagtttcttcggaaacaaacctagcggcggacgggtgagtaacacgtgggcaacctgccttgtagaggggaatagcctcccgaaagggagattaataccgcataacattgcagcttcgcatggagcagcaattaaaggagtaatccgctacaagatgggcccgcggcgcattagctagttggtgaggtaacggctcaccaaggcgacgatgcgtagccgacctgagagggtgatcggccacattgggactgagacacggcccagactcctacgggaggcagcagtggggaatattgcacaatggggaaccctgatgcagcaacgccgcgtgagtgatgaaggttttcggatcgtaaagctctgtcttcagggacgataatgacggtacctgaggaggaagccacggctaactacgtgccagcagccgcggtaatacgtaggtggcgagcgttgtccggatttactgggcgtaaagggagcgtaggcggacttttaagtgagatgtgaaatacccgggctcaacctgggggctgcatttcaaactggaagtctagagtgcaggagaggagagtggaattcctagtgtagcggtgaaatgcgtagagattaggaagaacaccagtggcgaaggcgactctctggactgtaactgacgctgaggctcgaaagcgtggggagcaaacaggattagataccctggtagtccacgccgtaaacgatggatactaggtgtgggaggtatcaactccttccgtgccgccgttaacacattaagtatcccgcctggggagtacggtcgcaagattaaaactcaaaggaattgacggggcccgcacaagcagcggagcatgtggtttaattcgaagcaacgcgaagaaccttacctagacttgacatctcctgcattactcttaatcgaggaagtccttcggggacaggatgacaggtggtgcatggttgtcgtcagctcgtgtcgtgagatgttgggttaagtcccgcaacgagcgcaacccttattgttagttgctaccatttagttgagcactctagcgagactgcccgggttaaccgggaggaaggtggggatgacgtcaaatcatcatgcccctatgtctagggctacacgtgctacaatggcaagtacaacgagatgcaataccgcgaggtggagctaaactataaaacttgtctcagttcggattgtaggctgaaactcgcctacatgaagctggagttgctagtaatcgcgaatcagcatgtcgcggtgaatacgttcccgggccttgtacacaccgcccgtcacaccatgagagttggcaatacccaaagttcgtgagctaaccgcaaggaggcagcgacctaaggtagggtcagcgattggggtgaagtcgtaacaaggtagccgtaggagaacctgcggctggatcacctccttt

SEQ ID NO: 827 - DNA, 1539 bp, artificial sequence
  GCF_000155515.2_00270_[Lactobacillus]_paracasei
tgaagagtttgatcctggctcagattgaacgctagcgggatgccttacacatgcaagtcgaacggcagcgggaaagtagcttgctacttttgccggcgagtggcgaacgggtgagtaatgtatcggaacgtgcccagtagcgggggataactacgcgaaagcgtggctaataccgcatacgccctacgggggaaagggggggatcttaggacctctcactattggagcggccgatatcggattagctagttggtggggtaaaggcctaccaaggcgacgatccgtagctggtttgagaggacgaccagccacactgggactgagacacggcccagactcctacgggaggcagcagtggggaattttggacaatgggggaaaccctgatccagccatcccgcgtgtgcgatgaaggccttcgggttgtaaagcacttttgtcagggaagaaaaggtttcggataatacccggaactgatgacggtacctgaagaataagcaccggctaactacgtgccagcagccgcggtaatacgtagggtgcaagcgttaatcggaattactgggcgtaaagcgtgcgcaggcggttcggaaagaaagatgtgaaatcccagggctcaaccttggaactgcatttttaactaccgaactagagtatgtcagaggggggtggaattccacgtgtagcagtgaaatgcgtagatatgtggaggaacaccgatggcgaaggcagccccctgggataatactgacgctcatgcacgaaagcgtggggagcaaacaggattagataccctggtagtccacgccctaaacgatgtcaactagctgttgggcccttcggggcttagtagcgcagctaacgcgtgaagttgaccgcctggggagtacggtcgcaagattaaaactcaaaggaattgacggggacccgcacaagcggtggatgatgtggattaattcgatgcaacgcgaaaaaccttacctacccttgacatgtctggaatcctgaagagatttaggagtgctcgcaagagaaccggaacacaggtgctgcatggctgtcgtcagctcgtgtcgtgagatgttgggttaagtcccgcaacgagcgcaacccttgtcattagttgctacatttagttgagcactctaatgagactgccggtgacaaaccggaggaaggtggggatgacgtcaagtcctcatggcccttatgggtagggcttcacacgtcatacaatggtcgggacagagggttgccaaaccgcaaggtggagctaatctcataaacccgatcgtagtccggattgcaggctgcaactcgcctgcatgaagtcggaatcgctagtaatcgcggatcagcatgtcgcggtgaatacgttcccgggtcttgtacacaccgcccgtcacaccatgggagtgggttttaccagaagtagttagcctaaccgcaaggggggcgattaccacggtaggattcatgactggggtgaagtcgtaacaaggtagccgtatcggaaggtgcggctggatcacctccttt

SEQ ID NO: 828 - DNA, 1521 bp, artificial sequence
  GCF_000155515.2_00718_[Lactobacillus]_paracasei
cgaagagtttgatcctggctcaggatgaacgctagcgacaggcctaacacatgcaagtcgaggggcagcatttccagcttgctggaagatggcgaccggcgcacgggtgagtaacgcgtatgcaacctaccttatactgggggatagcccagagaaatctggattaataccgcataacaatgttttatcgcatggtaagatatttaaaactccggtggtataagatgggcatgcgtagcattagttagttggtgaggtaacggctcaccaagacagtgatgcttagggggtctgagaggatagtcccccacactggtactgagacacggaccagactcctacgggaggcagcagtgaggaatattggtcaatggacgcaagtctgaaccagccatgtcgcgtgcaggatgacggccctatgggttgtaaactgcttttttacaggaataattgctttcacgtgtgagagtttgaatgtactgtatgaataaggatcggctaactccgtgccagcagccgcggtaatacggaggattcgagcgttatccggatttattgggtttaaagggtccgtaggcggtcttttaagtcagtggtgaaatcccagagcttaactctggaactgccattgaaactgaaggacttgaatatggttgaggtaggcggaatacgttatgtagcggtgaaatgcatagatataacgtagaacaccaattgcgaaggcagcttactaagccattattgacgctgatggacgaaagcgtggggagcgaacaggattagataccctggtagtccacgccgtaaacgatgattactcgttgtgcacaatacatcgtgcgtgactgagcgaaagcattaagtaatccacctggggagtacgttcgcaagaatgaaactcaaaggaattgacgggggcccgcacaagcggaggaacatgtggtttaattcgatgatacgcgaggaaccttacctggacttaaatgtagattgaccggcttagaaataggtctttccttcgggacaatttacaaggtgctgcatggttgtcgtcagctcgtgccgtgaggtgtcgggttaagtcccataacgagcgcaacccctatcgttagttgctagcaggtaatgctgaggactctagcgagactgccaccgtaaggtgagaggaaggtggggatgacgtcaaatcagcacggcccttacgtccagggctacacacgtgttacaatggccagtacaaagggcagctacctggtgacaggatgctaatctcaaaagctggtctcagttcggatcggagtctgcaactcgactccgtgaagttggattcgctagtaatcgtatatcagcaatgatacggtgaatacgttcccgggccttgtacacaccgcccgtcaagccatggaagccgagggtgcctgaagtacgttaccgcaaggagcgtcctagggtaaaattggtaactggggctaagtcgtaacaaggtagccgtaccggaaggtgtggctggaacacctcctt

SEQ ID NO: 829 - DNA, 1512 bp, artificial sequence
  GCF_000155515.2_00756_[Lactobacillus]_paracasei
ttggagagtttgatcctggctcaggacgaacgctggcggcgtgcttaacacatgcaagtcgagcggaaaggcccttcggggtactcgagcggcgaacgggtgagtaacacgtgagcaacctgccccaagctttgggataaccctcggaaacgggggctaataccgaatattactgctggtcgcatggctggtggtggaaagtttttcggcttgggatgggctcgcggcctatcagcttgttggtggggtgatggcctaccaaggcgacgacgggtagccggcctgagagggcgaccggccacactgggactgagacacggcccagactcctacgggaggcagcagtggggaatattgcacaatgggcggaagcctgatgcagcgacgccgcgtgagggatgacggccttcgggttgtaaacctctttcagcagggacgaagcgagagtgacggtacctgcagaagaagcaccggccaactacgtgccagcagccgcggtaagacgtagggtgcgagcgttgtccggatttattgggcgtaaagagctcgtaggcggcttgtcgcgtcgaccgtgaaaacttggggctcaaccccaagcctgcggtcgatacgggcaggctagagttcggtaggggagactggaattcctggtgtagcggtgaaatgcgcagatatcaggaggaacaccggtggcgaaggcgggtctctgggccgatactgacgctgaggagcgaaagcgtggggagcgaacaggattagataccctggtagtccacgctgtaaacgttgggcgctaggtgtggggggcctctccggttccctgtgccgcagctaacgcattaagcgccccgcctggggagtacggccgcaaggctaaaactcaaaggaattgacgggggcccgcacaagcggcggagcatgcggattaattcgatgcaacgcgaagaaccttacctgggtttgacatggccgcaaaacctccagagatggggggtccttcgggggcggtcacaggtggtgcatggctgtcgtcagctcgtgtcgtgagatgttgggttaagtcccgcaacgagcgcaaccctcgttcgatgttgccagcgcgttatggcggggactcatcgaagactgccggggtcaactcggaggaaggtggggatgacgtcaagtcatcatgccccttatgtccagggcttcacgcatgctacaatggccggtacaatgggctgcgataccgtgaggtggagcgaatcccaaaaagccggtctcagttcggatcggggtctgcaactcgaccccgtgaagtcggagtcgctagtaatcgcagatcagcaacgctgcggtgaatacgttcccgggccttgtacacaccgcccgtcacgtcacgaaagtcggcaacacccgaagccggtggcccaacccttgtggagggagccgtcgaaggtggggctggcgattgggacgaagtcgtaacaaggtagccgtaccggaaggtgcggctggatcacctccttt

SEQ ID NO: 830 - DNA, 1512 bp, artificial sequence
  GCF_000155515.2_01864_[Lactobacillus]_paracasei
ttggagagtttgatcctggctcaggacgaacgctggcggcgtgcttaacacatgcaagtcgagcggaaaggcccttcggggtactcgagcggcgaacgggtgagtaacacgtgagcaacctgccccaagctttgggataaccctcggaaacgggggctaataccgaatattactgctggtcgcatggctggtggtggaaagtttttcggcttgggatgggctcgcggcctatcagcttgttggtggggtgatggcctaccaaggcgacgacgggtagccggcctgagagggcgaccggccacactgggactgagacacggcccagactcctacgggaggcagcagtggggaatattgcacaatgggcggaagcctgatgcagcgacgccgcgtgagggatgacggccttcgggttgtaaacctctttcagcagggacgaagcgagagtgacggtacctgcagaagaagcaccggccaactacgtgccagcagccgcggtaagacgtagggtgcgagcgttgtccggatttattgggcgtaaagagctcgtaggcggcttgtcgcgtcgaccgtgaaaacttggggctcaaccccaagcctgcggtcgatacgggcaggctagagttcggtaggggagactggaattcctggtgtagcggtgaaatgcgcagatatcaggaggaacaccggtggcgaaggcgggtctctgggccgatactgacgctgaggagcgaaagcgtggggagcgaacaggattagataccctggtagtccacgctgtaaacgttgggcgctaggtgtggggggcctctccggttccctgtgccgcagctaacgcattaagcgccccgcctggggagtacggccgcaaggctaaaactcaaaggaattgacgggggcccgcacaagcggcggagcatgcggattaattcgatgcaacgcgaagaaccttacctgggtttgacatggccgcaaaacctccagagatggggggtccttcgggggcggtcacaggtggtgcatggctgtcgtcagctcgtgtcgtgagatgttgggttaagtcccgcaacgagcgcaaccctcgttcgatgttgccagcgcgttatggcggggactcatcgaagactgccggggtcaactcggaggaaggtggggatgacgtcaagtcatcatgccccttatgtccagggcttcacgcatgctacaatggccggtacaatgggctgcgatgccgtgaggtggagcgaatcccaaaaagccggtctcagttcggatcggggtctgcaactcgaccccgtgaagtcggagtcgctagtaatcgcagatcagcaacgctgcggtgaatacgttcccgggccttgtacacaccgcccgtcacgtcacgaaagtcggcaacacccgaagccggtggcccaacccttgtggagggagccgtcgaaggtggggctggcgattgggacgaagtcgtaacaaggtagccgtaccggaaggtgcggctggatcacctccttt

SEQ ID NO: 831 - DNA, 1512 bp, artificial sequence; identical to SEQ ID NO: 829
  GCF_000155515.2_02467_[Lactobacillus]_paracasei

SEQ ID NO: 832 - DNA, 1538 bp, artificial sequence
  GCF_000194765.1_00253_[Lactobacillus]_paracasei
tgaagagtttgatcctggctcagattgaacgctggcggcatgcctaacacatgcaagtcgaacggcagcacggtccagtttactggatgggtggcgagtggcgaacgggtgagtaacgcgtaggaatataccctgaagagggggataacctggggaaacccaggctaataccgcataatctctgaggagcaaagctggggaccttcgggcctggcgcttcaggaatagcctgcgtccgattagctagttggtggggtaagggcctaccaaggcgacgatcggtagctggtctgagaggatggtcagccacactgggactgagacacggcccagactcctacgggaggcagcagtggggaatattggacaatgggggcaaccctgatccagcaatgccgcgtgtgtgaagaaggcctgagggttgtaaagcactatcagtggggaggaggctttaatggttaagagctgttgaagtggacgttacccacagaagaagcaccggctaactccgtgccagcagccgcggtaatacggagggtgcgagcgttaatcggaattactgggcgtaaagggtgcgcaggtggttttgtaagttatctgtgaaagccccgggcttaacctgggaaagccagataaaactacgagactcgagtacgggagagggcagtggaatttccggtgtagcggtgaaatgcgtagagatcggaaggaacaccagtggcgaaggcggctgcctggcctgatactgacactgaggcacgaaagcgtggggagcaaacaggattagataccctggtagtccacgctgtaaacgatgtcaactggctgttggccttatgaatgaggttagtggcgtagctaacgcgataagttgaccgcctggggagtacggtcgcaagattaaaactcaaaggaattgacgggggcccgcacaagcggtggagcatgtggtttaattcgatgcaacgcgaagaaccttacctacccttgacatacagttaattgagcagagatgtttgagtgccttcgggcagactgatacaggtgctgcatggctgtcgtcagctcgtgtcgtgagatgttgggttaagtcccgtaacgagcgcaacccttgtcccttgttgccagcgattcggtcgggaactcgagggagactgccggtgacaaaccggaggaaggcggggacgacgtcaagtcatcatggcccttacgggtagggctacacacgtgctacaatggcaggtacagagggaagcgaagcggcgacgtggagcgaatcccaaaaagcctgtcgtagtccggattggagtctgcaactcgactccatgaagtcggaatcgctagtaatcgcgaatcagcatgtcgcggtgaatacgttcccgggccttgtacacaccgcccgtcacaccatgggagtgggctgcaccagaagtaaatagtctaaccttcggggggacgtttaccacggtgtggttcatgactggggtgaagtcgtaacaaggtagccgtaggggaacctgcggctggatcacctcctt

SEQ ID NO: 833 - DNA, 931 bp, artificial sequence
  GCF_000194765.1_00871_[Lactobacillus]_paracasei
acagtcgggggcatcagtattcaattgtcagaggtgaaattcttggatttattgaagactaactactgcgaaagcatttgccaaggatgttttcattaatcaggaacgaaagttaggggatcgaagacgatcagataccgtcgtagtcttaaccataaactatgccgactagggatcggacgatgttattttttgactcgttcggcaccttacgagaaatcaaagtgcttgggctccagggggagtatggtcgcaaggctgaaacttaaagaaattgacggaagggcaccaccaggggtggagcctgcggcttaatttgactcaacacggggaaactcaccaggtccagacacaatgaggattgacagattgagagctctttcttgattttgtgggtggtggtgcatggccgttcttagttggtggagtgatttgtctgcttaattgcgataacgaacgagaccttaacctgctaaatagcccgtattgctttggcagtacgccggcttcttagagggactatcggctcaagccgatggaagtttgaggcaataacaggtctgtgatgcccttagatgttctgggccgcacgcgcgctacactgacggagccagcgagtactcccttggccggaaggcccgggtaatcttgttaaactccgtcgtgctggggatagagcattgcaattattgctcttcaacgaggaatccctagtaagcgcaagtcatcagcttgcgttgattacgtccctgccctttgtacacaccgcccgtcgctactaccgattgaatggctcagtgaggcgtccggactggcccagagaggtgggcaactaccactcagggccggaaagctctccaaactcggtcatttagaggaagtaaaagtcgtaacaaggtctccgttggtgaaccagcggagggatcattac

SEQ ID NO: 834 - DNA, 1059 bp, artificial sequence
  GCF_000194765.1_00913_[Lactobacillus]_paracasei
atgacggtacctgaagaataagcaccggctaactacgtgccagcagccgcggtaatacgtagggtgcaagcgttaatcggaattactgggcgtaaagcgtgcgcaggcggttttgtaagactgtcgtgaaatccccgggctcaacctgggaattgcgatggtgactgcaaggctagagtttggcagaggggggtagaattccacgtgtagcagtgaaatgcgtagagatgtggaggaacaccgatggcgaaggcagccccctgggtcaaaactgacgctcatgcacgaaagcgtggggagcaaacaggattagataccctggtagtccacgccctaaacgatgtctactagttgtcgggtcttaattgacttggtaacgcagctaacgcgtgaagtagaccgcctggggagtacggtcgcaagattaaaactcaaaggaattgacggggacccgcacaagcggtggatgatgtggattaattcgatgcaacgcgaaaaaccttacctacccttgacatggtcggaatccctgagagattggggagtgctcgaaagagaaccgatacacaggtgctgcatggctgtcgtcagctcgtgtcgtgagatgttgggttaagtcccgcaacgagcgcaacccttgtcattagttgctacgaaagggcactctaatgagactgccggtgacaaaccggaggaaggtggggatgacgtcaagtcctcatggcccttatgggtagggcttcacacgtcatacaatggtgcatacagagggctgccaacccgcgagggggagctaatcccagaaagtgcatcgtagtccggattgtagtctgcaactcgactacatgaagttggaatcgctagtaatcgcggatcagcatgtcgcggtgaatacgttcccgggtcttgtacacaccgcccgtcacaccatgggagcgggttttaccagaagtaggtagcttaaccgcaaggagggcgcttaccacggtaggattcgtgactggggtgaagtcgtaacaaggtagccgtatcggaaggtgcggctggatcacctccttt

SEQ ID NO: 835 - DNA, 1457 bp, artificial sequence
  GCF_000194765.1_02021_[Lactobacillus]_paracasei
ctgagagtttgatcctggctcagagcgaacgctggcggcaggcctaacacatgcaagtcgaacgaactcttcggagttagtggcggacgggtgagtaacacgtgggaacgtgccttttggttcggaataactcagggaaacttgtgctaataccgaatgtgcccttcgggggaaagatttatcgccattagagcggcccgcgtctgattagctagttggtgaggtaaaggctcaccaaggcgacgatcagtagctggtctgagaggatgatcagccacattgggactgagacacggcccaaactcctacgggaggcagcagtggggaatcttgcgcaatgggcgaaagcctgacgcagccatgccgcgtgaatgatgaaggtcttaggattgtaaaattctttcaccggggacgataatgacggtacccggagaagaagccccggctaacttcgtgccagcagccgcggtaatacgaagggggctagcgttgctcggaattactgggcgtaaagggagcgtaggcggacatttaagtcaggggtgaaatcccggggctcaacctcggaattgcctttgatactgggtgtcttgagtatgagagaggtatgtggaactccgagtgtagaggtgaaattcgtagatattcggaagaacaccagtggcgaaggcgacatactggctcattactgacgctgaggctcgaaagcgtggggagcaaacaggattagataccctggtagtccacgccgtaaacgatgattgctagttgtcgggatgcatgcatttcggtgacgcagctaacgcattaagcaatccgcctggggagtacggtcgcaagattaaaactcaaaggaattgacgggggcccgcacaagcggtggagcatgtggtttaattcgaagcaacgcgcagaaccttaccaccttttgacatgcctggaccgccagagagatctggctttctcttcggagactaggacacaggtgctgcatggctgtcgtcagctcgtgtcgtgagatgttgggttaagtcccgcaacgagcgcaaccctcgccattagttgccatcatttagttgggaactctaatgggactgccggtgctaagccggaggaaggtggggatgacgtcaagtcctcatggcccttacagggtgggctacacacgtgctacaatggcgactacagagggttaatccttaaaagtcgtctcagttcggattgtcctctgcaactcgagggcatgaagttggaatcgctagtaatcgcggatcagcatgccgcggtgaatacgttcccgggccttgtacacaccgcccgtcacaccatgggagttggttctacccgaaggcgctgcgctgaccgcaagggggcaggcgaccacggtagggtcagcgactggggtgaagtcgtaacaaggtagccgtaggggaacctgcggctggatcacctccttt

SEQ ID NO: 836 - DNA, 1457 bp, artificial sequence; identical to SEQ ID NO: 835
  GCF_000194765.1_02646_[Lactobacillus]_paracasei

SEQ ID NO: 837 - DNA, 1494 bp, artificial sequence
  GCF_000309565.2_00271_[Lactobacillus]_paracasei
ttgagagtttgatcctggctcagaacgaacgctatcggtatgcttaacacatgcaagtcgaacggattaactagagctcgctttagttaattagtggcagacgggtgagtaacacgtgggaatctacccatcagtacggaataacttttagaaataaaagctaataccgtatattctctacggaggaaagatttatcgctgatggatgggcccgcgtcagattaggtagttggtgaggtaatggctcaccaagccgacgatctgtagctggtctgagaggatgatcagccacactgggactgagacacggcccagactcctacgggaggcagcagtggggaatattggacaatgggcgaaagcctgatccagcaataccgagtgagtgatgaaggccttagggttgtaaagctcttttagcaaggaagataatgacgttacttgcagaaaaagccccggctaactccgtgccagcagccgcggtaagacggagggggctagcgttgttcggaattactgggcgtaaagagtgcgtaggcggtttagtaagttggaagtgaaagcccggggcttaacctcggaattgctttcaaaactactaatctagagtgtagtaggggatgatggaattcctagtgtagaggtgaaattcttagatattaggaggaacaccggtggcgaaggcggtcatctgggctacaactgacgctgatgcacgaaagcgtggggagcaaacaggattagataccctggtagtccacgccgtaaacgatgagtgctagatatcggaggattctctttcggtttcgcagctaacgcattaagcactccgcctggggagtacggtcgcaagattaaaactcaaaggaattgacgggggctcgcacaagcggtggagcatgcggtttaattcgatgttacgcgaaaaaccttaccaacccttgacatggtggttacggattgcagagatgctttccttcagttcggctgggccacacacaggtgttgcatggctgtcgtcagctcgtgtcgtgagatgttgggttaagtcccgcaacgagcgcaacccttattcttatttgccagtgggtaatgccgggaactataagaaaactgccggtgataagccggaggaaggtggggacgacgtcaagtcatcatggcccttacgggttgggctacacgcgtgctacaatggtgtttacagagggaagcaatacggtgacgtggagcaaatccctaaaagacatctcagttcggattgttctctgcaactcgagagcatgaagttggaatcgctagtaatcgcggatcagcatgccgcggtgaatacgttctcgggccttgtacacactgcccgtcacgccatgggagttggttttacctgaaggtggtgagctaacgcaagaggcagccaaccacggtaaaattagcgactggggtgaagtcgtaacaaggtagccgtaggggaacctgcggctggattacctcctt

SEQ ID NO: 838 - DNA, 1494 bp, artificial sequence
  GCF_000309565.2_00719_[Lactobacillus]_paracasei
ttgagagtttgatcctggctcagaacgaacgctatcggtatgcttaacacatgcaagtcgaacggactaattggggcttgctccaattagttagtggcagacgggtgagtaacacgtgggaatctacccatcagtacggaataacttttagaaataaaagctaataccgtatattctctgcggaggaaagatttatcgctgatggatgagcccgcgtcagattaggtagttggtgaggtaatggctcaccaagccgacgatctgtagctggtctgagaggatgatcagccacactgggactgagacacggcccagactcctacgggaggcagcagtggggaatattggacaatgggcgaaagcctgatccagcaataccgagtgagtgatgaaggccttagggttgtaaagctcttttagcaaggaagataatgacgttacttgcagaaaaagccccggctaactccgtgccagcagccgcggtaagacggagggggctagcgttgttcggaattactgggcgtaaagagtgcgtaggcggtttagtaagttggaagtgaaagcccggggcttaacctcggaattgctttcaaaactactaatctagagtgtagtaggggatgatggaattcctagtgtagaggtgaaattcttagatattaggaggaacaccggtggcgaaggcggtcatctgggctaccactgacgctgatgcacgaaagcgtggggagcaaacaggattagataccctggtagtccacgccgtaaacgatgagtgctagatatcggaagattctctttcggtttcgcagctaacgcattaagcactccgcctggggagtacggtcgcaagattaaaactcaaaggaattgacgggggctcgcacaagcggtggagcatgcggtttaattcgatgttacgcgaaaaaccttaccaacccttgacatggtggttgcggatcgcagagatgcttttcttcagctcggctggaccacacacaggtgttgcatggctgtcgtcagctcgtgtcgtgagatgttgggttaagtcccgcaacgagcgcaaccctcattcttatttgccagcgggtaatgccgggaactataagaaaactgccggtgataagccggaggaaggtggggacgacgtcaagtcatcatggcccttacgggttgggctacacgcgtgctacaatggtgtttacagagggaagcaagacggcgacgtggagcaaatccctaaaagacatctcagttcggattgttctctgcaactcgagagcatgaagttggaatcgctagtaatcgcggatcagcatgccgcggtgaatacgttctcgggccttgtacacactgcccgtcacgccatgggagttagttttacctgaaggtggtgagctaacgcaagaggcagccaaccacggtaaaattagcgactggggtgaagtcgtaacaaggtagccgtaggggaacctgcggctggattacctcctt

SEQ ID NO: 839 - DNA, 1494 bp, artificial sequence; identical to SEQ ID NO: 838
  GCF_000309565.2_00757_[Lactobacillus]_paracasei

SEQ ID NO: 840 - DNA, 1494 bp, artificial sequence; identical to SEQ ID NO: 838
  GCF_000309565.2_01809_[Lactobacillus]_paracasei

SEQ ID NO: 841 - DNA, 1494 bp, artificial sequence; identical to SEQ ID NO: 838
  GCF_000309565.2_02403_[Lactobacillus]_paracasei

SEQ ID NO: 842 - DNA, 1549 bp, artificial sequence
  GCF_000309585.1_00337_[Lactobacillus]_paracasei
tctgagaatttgatcttggttcagattgaacgctggcggcgtggatgaggcatgcaagtcgaacggagcaattgtttcgacgattgtttagtggcggaagggttagtaatgcatagataatttgtccttaacttgggaataacggttggaaacggccgctaataccgaatgtggcgatatttgggcatccgagtaacgttaaagaaggggatcttaggacctttcggttaagggagagtctatgtgatatcagctagttggtggggtaaaggcctaccaaggctatgacgtctaggcggattgagagattggccgccaacactgggactgagacactgcccagactcctacgggaggctgcagtcgagaatctttcgcaatggacggaagtctgacgaagcgacgccgcgtgtgtgatgaaggctctagggttgtaaagcactttcgcttgggaataagagaagacggttaatacccgctggatttgagcgtaccaggtaaagaagcaccggctaactccgtgccagcagctgcggtaatacggagggtgctagcgttaatcggatttattgggcgtaaagggcgtgtaggcggaaaggtaagttagttgtcaaagatcggggctcaaccccgagtcggcatctaatactatttttctagaggatagatggagaaaagggaatttcacgtgtagcggtgaaatgcgtagatatgtggaagaacaccagtggcgaaggcgcttttctaatttatacctgacgctaaggcgcgaaagcaaggggagcaaacaggattagataccctggtagtccttgccgtaaacgatgcatacttgatgtggatggtctcaaccccatccgtgtcggagctaacgcgttaagtatgccgcctgaggagtacactcgcaagggtgaaactcaaaagaattgacgggggcccgcacaagcagtggagcatgtggtttaattcgatgcaacgcgaaggaccttacctgggtttgacatgtatatgaccgcggcagaaatgtcgttttccgcaaggacatatacacaggtgctgcatggctgtcgtcagctcgtgccgtgaggtgttgggttaagtcccgcaacgagcgcaacccttatcgttagttgccagcacttagggtgggaactctaacgagactgcctgggttaaccaggaggaaggcgaggatgacgtcaagtcagcatggcccttatgcccagggcgacacacgtgctacaatggccagtacagaaggtggcaagatcgcgagatggagcaaatcctcaaagctggccccagttcggattgtagtctgcaactcgactacatgaagtcggaattgctagtaatggcgtgtcagccataacgccgtgaatacgttcccgggccttgtacacaccgcccgtcacatcatgggagttggttttaccttaagtcgttgactcaacccgcaagggagagaggcgcccaaggtgaggctgatgactaggatgaagtcgtaacaaggtagccctaccggaaggtggggctggatcacctcctt

SEQ ID NO: 843 - DNA, 1549 bp, artificial sequence; identical to SEQ ID NO: 842
  GCF_000309625.1_02606_[Lactobacillus]_paracasei

SEQ ID NO: 844 - DNA, 1494 bp, artificial sequence
  GCF_000309645.1_02563_[Lactobacillus]_paracasei
ttgagagtttgatcctggctcagaacgaacgctatcggtatgcttaacacatgcaagtcgaacggattaattagagcttgctctagttaattagtggcagacgggtgagtaacacgtgggaatctacccatcagtacggaataacttttagaaataaaagctaataccgtatattctctacggaggaaagatttatcgctgatggatgggcccgcgtcagattaggtagttggtgtggtaatggctcaccaagccgacgatctgtagctggtctgagaggatgatcagccacactgggactgagacacggcccagactcctacgggaggcagcagtggggaatattggacaatgggcgaaagcctgatccagcaataccgagtgagtgatgaaggccttagggttgtaaagctcttttagcaaggaagataatgacgttacttgcagaaaaagccccggctaactccgtgccagcagccgcggtaagacggagggggctagcgttgttcggaattactgggcgtaaagagtgcgtaggtggtttagtaagttggaagtgaaagcccggggcttaacctcggaattgctttcaaaactactaatctagagtgtagtaggggatgatggaattcctagtgtagaggtgaaattcttagatattaggaggaacaccggtggcgaaggcggtcatctgggctacaactgacgctgatgcacgaaagcgtggggagcaaacaggattagataccctggtagtccacgccgtaaacgatgagtgctagatatcggaggattctctttcggtttcgcagctaacgcattaagcactccgcctggggagtacggtcgcaagattaaaactcaaaggaattgacgggggctcgcacaagcggtggagcatgcggtttaattcgatgttacgcgaaaaaccttaccaacccttgacatggtggttatggattgcagagatgctttccttcagttcggctgggccacacacaggtgttgcatggctgtcgtcagctcgtgtcgtgagatgttgggttaagtcccgcaacgagcgcaacccttattcttatttgccagcgggtaatgccgggaactataagaaaactgccggtgataagccggaggaaggtggggacgacgtcaagtcatcatggcccttacgggttgggctacacgcgtgctacaatggtgtttacagagggaagcaagacggtgacgtggagcaaatccctaaaagacatctcagttcggattgttctctgcaactcgagagcatgaagttggaatcgctagtaatcgcggatcagcatgccgcggtgaatacgttctcgggccttgtacacactgcccgtcacgccatgggagttggttttacctgaaggtggtgagctaacgcaagaggcagccaaccacggtaaaattagcgactggggtgaagtcgtaacaaggtagccgtaggggaacctgcggctggattacctcctt

SEQ ID NO: 845 - DNA, 1499 bp, artificial sequence
  GCF_000309705.1_01954_[Lactobacillus]_paracasei
ttaagagtttgatcctggctcagaacgaacgctggcggcatgcctaacacatgcaagtcgaacgaattaatgctgagcttgcttagcattaattagtggcaaacgggtgagtaacacgtgggaatctgcccatcagtacggaataacatttagaaataagtgctaataccgtatgccctctacaaagaggaaagatttatcgctgatggatgagcccgcggcagattaggtagttggtaaggtaatggcttaccaagcctgtgatctgtagctggtctgagaggacgaacagccacactgggactgagacacggcccagactcctacggggggcagcagtggggaatattggacaatgggcgaaagcctgatccagcaatgccgcgtgagtgatgaaggccttagggttgtaaagctcttttagtagggatgataatgacagtacctacagaaaaagccccggctaactccgtgccagcagccgcggtaagacggagggggctagcgttgttcggaattactgggcgtaaagggcgcgtaggcggtttaataagttaggagtgaaatcccggggcttaaccctggaactgcttctaaaactgttaggctagagtatggtagagggtgatggaatttctagtgtagaggtaaaattcttagatattagaaggaacaccagtggcgaaagctgtcatctgggccattactgacgctgaggcgcgaaagcgtggggagcaaacaggattagataccctggtagtccacgctgtaaacgatgagtgctagatattgggggatttttctttcagtttcgtagctaacgcattaagcactccgcctggggagtacggtcgcaagattaaaactcaaaggaattgacgggggcccgcacaagcggtggagcatgcggtttaattcgatgatccgcgaaaaaccttaccaactcttgacatggtagtcgcgaaaaatggagacatttttcttcagtttggctggactacacacaggtgttgcatggctgtcgtcagctcgtgtcgtgagatgttgggttaagtcccgcaacgagcgcaacccttattcttatttgccagcgggtaatgccgggaactataggaaaactgccggtgctaagccggaggaaggtggggatgaggtcaagtcatcatggcccttatgagttgggctacacgcgtgctacaatggtacctacagagtgatgcgatacggtgacgtggagctaatcattaaaaggtatctcagttcggattgcactctgcaactcgagtgcatgaagtcggaatcgctagtaatcgcggatcagcatgccgcggtgaatacgttctcgggccttgtacacactgcccgtcgcaccatgggagtcagtggtacctgaagttggtgagctaacgtaagaggcagctaaccacggtagaactggtgactggggtaaagtcgtaacaaggtagccgtaggggaacctgcggctggattacctcctt

SEQ ID NO: 846 - DNA, 1485 bp, artificial sequence
  GCF_000309745.1_00284_[Lactobacillus]_paracasei
atgagagtttgatcctggctcagaacgaacgctggcggcaggcttaacacatgcaagtcgagcgcactcttttagagtgagcggcaaacgggtgagtaacgcgtgggaatctacccatctctacggaataacacagagaaatttgtgctaataccgtatacgtccctctgggagaaagatttatcggaggtggatgagcccgcgttggattagctagttggtgaggtaagggctcaccaaggcgacgatccatagctggtctgagaggatgatcagccacactgggactgagacacggcccagactcctacgggaggcagcagtggggaatattggacaatgggggcaaccctgatccagccatgccgcgtgagtgatgaaggccctagggttgtaaagctctttcaccggtgaagataatgacgttaaccggagaagaagccccggctaacttcgtgccagcagccgcggtaatacgaagggggctagcgttgttcggatttactgggcgtaaagcgcatgtaggcggatatttaagtcagaggtgaaatcccagggctcaaccctggaactgcctttgatactggatgtctcgagtgtggaagaggtgagtggaattccgagtgtagaggtaaaattcgtagatattcggaggaacaccagtggcgaaggcggctcactggtccattactgacgctgaggtgcgaaagcgtggggagcaaacaggattagataccctggtagtccacgccgtaaacgatgaatgttagccgtcgggtggtttactactcggtggcgcagctaacgcgttaaacattccgcctggggagtacggtcgcaagattaaaactcaaaggaattgacgggggcccgcacaagcggtggagcatgtggtttaattcgaagcaacgcgcagaaccttaccagcccttgacatcccgatcgcggaaggtggagacaccctccttcagttaggctggatcggtgacaggtgctgcatggctgtcgtcagctcgtgtcgtgagatgttgggttaagtcccgcaacgagcgcaaccctcgcccttagttgccatcattaagttgggcactctagggggactgccggtgataagccgagaggaaggtggggatgacgtcaagtcctcatggcccttacgggctgggctacacacgtgctacaatggtggtgacagtgggcagcgagaccgcgaggtcgagctaatctccaaaagccatctcagttcggattgcactctgcaactcgagtgcatgaagttggaatcgctagtaatcgtggatcagcatgccacggtgaatacgttcccgggccttgtacacaccgcccgtcacaccatgggagttggttttacccgaaggtgctgtgctaaccgcaaggaggcaggcaaccacggtagggtcagcgactggggtgaagtcgtaacaaggtagccgtaggggaacctgtggctggatcacctccttt

SEQ ID NO: 847 - DNA, 1485 bp, artificial sequence; identical to SEQ ID NO: 846
  GCF_000309765.1_00748_[Lactobacillus]_paracasei

SEQ ID NO: 848 - DNA, 1508 bp, artificial sequence
  GCF_000388095.2_00256_[Lactobacillus]_paracasei
tatggagagtttgatcctggctcagagtgaacgctggcggcgtgcctaatacatgcaagtcgaacggacaagtaagagcttgctcttatgagttagtggcgcacgggtgagtaatgtatagttaatctgccctacactggaggacaacagttagaaatgactgctaatactccatactccttcttaacacaagttaagtcgggaaagtttttcggtgtaggatgagactatattgtatcagctagttggtgaggtaatggctcaccaaggctttgacgcataactggtctgagaggatgatcagtcacactggaactgagacacggtccagactcctacgggaggcagcagtagggaatattgctcaatgggggaaaccctgaagcagcaacgccgcgtggaggatgacacttttcggagcgtaaactccttttgttggggaagaaccatgacggtacccaacgaataagcaccggctaactccgtgccagcagccgcggtaatacggagggtgcaagcgttactcggaatcactgggcgtaaaggacgcgtaggcggattatcaagtcttttgtgaaatctaatggcttaaccattaaactgcttgagaaactgataatctagagtgagggagaggcagatggaattggtggtgtaggggtaaaatccgtagagatcaccaggaatacccattgcgaaggcgatctgctggaacttaactgacgctaatgcgtgaaagcgtggggagcaaacaggattagataccctggtagtccacgccctaaacgatgtatactagttgttgctgtgctagtcacggcagtaatgcacctaacggattaagtataccgcctggggagtacggtcgcaagattaaaactcaaaggaatagacggggacccgcacaagcggtggagcatgtggtttaattcgaagatacgcgaagaaccttacctgggcttgatatcctaataacatcttagagataagatagtgcttgtttacaagaaattagtgacaggtgctgcacggctgtcgtcagctcgtgtcgtgagatgttgggttaagtcccgcaacgagcgcaacccacgtatttagttgctaacagttcggctgagcactctaaatagactgccttcgtaaggaggaggaaggtgtggacgacgtcaagtcatcatggcccttatgcccagggcgacacacgtgctacaatggcatatacaatgagacgcaatatcgcgagatggagcaaatctataaaatatgtcccagttcggattgttctctgcaactcgagagcatgaagccggaatcgctagtaatcgtagatcagccatgctacggtgaatacgttcccgggtcttgtactcaccgcccgtcacaccatgggagttgatttcactcgaagtcggaatgctaaattagctaccgcccacagtggaatcagcgactggggtgaagtcgtaacaaggtaaccgtaggagaacctgcggttggatcacctcctt

SEQ ID NO: 849 - DNA, 1512 bp, artificial sequence
  GCF_000388095.2_00877_[Lactobacillus]_paracasei
tatggagagtttgatcctggctcagagtgaacgctggcggcgtgcctaatacatgcaagtcgaacggagtattaagagagcttgctcttttaatacttagtggcgcacgggtgagtaatgtatagttaatctgccctacactggaggacaacagttagaaatgactgctaatactccatactccttcttaacataagttaagtcgggaaagtttttcggtgtaggatgagactatattgtatcagctagttggtaaggtaatggcttaccaaggctttgacgcataactggtctgagaggatgatcagtcacactggaactgagacacggtccagactcctacgggaggcagcagtagggaatattgctcaatgggggaaaccctgaagcagcaacgccgcgtggaggatgacacttttcggagcgtaaactccttttgttagggaagaaccatgacggtacctaacgaataagcaccggctaactccgtgccagcagccgcggtaatacggagggtgcaagcgttactcggaatcactgggcgtaaaggacgcgtaggcggattatcaagtcttttgtgaaatctaacagcttaactgttaaactgcttgagaaactgataatctagagtgagggagaggcagatggaattggtggtgtaggggtaaaatccgtagagatcaccaggaatacccattgcgaaggcgatctgctggaactcaactgacgctaatgcgtgaaagcgtggggagcaaacaggattagataccctggtagtccacgccctaaacgatgtatactagttgttgctgtgctagtcacggcagtaatgcacctaacggattaagtataccgcctggggagtacggtcgcaagattaaaactcaaaggaatagacggggacccgcacaagcggtggagcatgtggtttaattcgaagatacgcgaagaaccttacctgggcttgatatccaactaatctcttagagataagagagtgctagcttgctagaaagttgagacaggtgctgcacggctgtcgtcagctcgtgtcgtgagatgttgggttaagtcccgcaacgagcgcaacccacgtatttagttgctaacagtttggctgagcactctaaatagactgccttcgtaaggaggaggaaggtgtggacgacgtcaagtcatcatggcccttatgcccagggcgacacacgtgctacaatggcatatacaatgagatgcaatatcgcgagatggagcaaatctataaaatatgtctcagttcggattgctctctgcaactcgagagcatgaagccggaatcgctagtaatcgtagatcagccatgctacggtgaatacgttcccgggtcttgtactcaccgcccgtcacaccatgggagttgatttcactcgaagtcggaatgctaaattagctaccgcccacagtggaatcagcgactggggtgaagtcgtaacaaggtaaccgtaggagaacctgcggttggatcacctcctt

SEQ ID NO: 850 - DNA, 1512 bp, artificial sequence
  GCF_000388095.2_00919_[Lactobacillus]_paracasei
tatggagagtttgatcctggctcagagtgaacgctggcggcgtgcctaatacatgcaagtcgaacggagtattaagagagcttgctcttttaatacttagtggcgcacgggtgagtaatgtatagttaatctgccctacactggaggacaacagttagaaatgactgctaatactccatactccttcttaacataagttaagtcgggaaagtttttcggtgtaggatgagactatattgtatcagctagttggtgaggtaatggctcaccaaggctttgacgcataactggtctgagaggatgatcagtcacactggaactgagacacggtccagactcctacgggaggcagcagtagggaatattgctcaatgggggaaaccctgaagcagcaacgccgcgtggaggatgacacttttcggagcgtaaactccttttgttagggaagaaccatgacggtacctaacgaataagcaccggctaactccgtgccagcagccgcggtaatacggagggtgcaagcgttactcggaatcactgggcgtaaaggacgcgtaggcggattatcaagtcttttgtgaaatctaacagcttaactgttaaactgcttgagaaactgataatctagagtgagggagaggcagatggaattggtggtgtaggggtaaaatccgtagagatcaccaggaatacccattgcgaaggcgatctgctggaactcaactgacgctaatgcgtgaaagcgtggggagcaaacaggattagataccctggtagtccacgccctaaacgatgtatactagttgttgctgtgctagtcacggcagtaatgcacctaacggattaagtataccgcctggggagtacggtcgcaagattaaaactcaaaggaatagacggggacccgcacaagcggtggagcatgtggtttaattcgaagatacgcgaagaaccttacctgggcttgatatccaactaatctcttagagataagagagtgctagcttgctagaaagttgagacaggtgctgcacggctgtcgtcagctcgtgtcgtgagatgttgggttaagtcccgcaacgagcgcaacccacgtatttagttgctaacagttcggctgagcactctaaatagactgccttcgcaaggaggaggaaggtgtggacgacgtcaagtcatcatggcccttatgcccagggcgacacacgtgctacaatggcatatacaatgagatgcaatatcgcgagatggagcaaatctataaaatatgtcccagttcggattggagtctgcaactcgactccatgaagccggaatcgctagtaatcgtagatcagccatgctacggtgaatacgttcccgggtcttgtactcaccgcccgtcacaccatgggagttgatttcactcgaagtcggaatgctaaactagctaccgcccacagtggaatcagcgactggggtgaagtcgtaacaaggtaaccgtaggagaacctgcggttggatcacctcctt

SEQ ID NO: 851 - DNA, 1512 bp, artificial sequence; identical to SEQ ID NO: 850
  GCF_000388095.2_01965_[Lactobacillus]_paracasei

SEQ ID NO: 852 - DNA, 1512 bp, artificial sequence
  GCF_000388095.2_02590_[Lactobacillus]_paracasei
tatggagagtttgatcctggctcagagtgaacgctggcggcgtgcctaatacatgcaagtcgaacggagtattaagagagcttgctcttttaatacttagtggcgcacgggtgagtaatgtatagttaatctgccctacactggaggacaacagttagaaatgactgctaatactccatactccttcttaacataagttaagtcgggaaagtttttcggtgtaggatgagactatattgtatcagctagttggtaaggtaatggcttaccaaggctttgacgcataactggtctgagaggatgatcagtcacactggaactgagacacggtccagactcctacgggaggcagcagtagggaatattgctcaatgggggaaaccctgaagcagcaacgccgcgtggaggatgacacttttcggagcgtaaactccttttgttagggaagaaccatgacggtacctaacgaataagcaccggctaactccgtgccagcagccgcggtaatacggagggtgcaagcgttactcggaatcactgggcgtaaaggacgcgtaggcggattatcaagtcttttgtgaaatctaacagcttaactgttaaactgcttgagaaactgataatctagagtgagggagaggcagatggaattggtggtgtaggggtaaaatccgtagagatcaccaggaatacccattgcgaaggcgatctgctggaactcaactgacgctaatgcgtgaaagcgtggggagcaaacaggattagataccctggtagtccacgccctaaacgatgtatactagttgttgctgtgctagtcacggcagtaatgcacctaacggattaagtataccgcctggggagtacggtcgcaagattaaaactcaaaggaatagacggggacccgcacaagcggtggagcatgtggtttaattcgaagatacgcgaagaaccttacctgggcttgatatccaactaatctcttagagataagagagtgctagcttgctagaaagttgagacaggtgctgcacggctgtcgtcagctcgtgtcgtgagatgttgggttaagtcccgcaacgagcgcaacccacgtatttagttgctaacagttcggctgagcactctaaatagactgccttcgcaaggaggaggaaggtgtggacgacgtcaagtcatcatggcccttatgcccagggcgacacacgtgctacaatggcatatacaatgagatgcaatatcgcgagatggagcaaatctataaaatatgtcccagttcggattggagtctgcaactcgactccatgaagccggaatcgctagtaatcgtagatcagccatgctacggtgaatacgttcccgggtcttgtactcaccgcccgtcacaccatgggagttgatttcactcgaagtcggaatgctaaactagctaccgcccacagtggaatcagcgactggggtgaagtcgtaacaaggtaaccgtaggagaacctgcggttggatcacctcctt

SEQ ID NO: 853 - DNA, 1487 bp, artificial sequence
  GCF_000409815.1_02809_[Lactobacillus]_paracasei
ttcggagagtttgatcctggctcagggtgaacgctggcggtatgcctaagacatgcaagtcgaacgggctgtttatgcagccagtggcggacgggtgagtaacacgtaggtgacctaccccaaagtctgggacaactaggagaaatcttagctaatcctggatgtggacatctactttggtggatgtttaaagcttcggcgctttgggatgggcctgcggcgcatcaggtagttggtggggtaatggcctaccaagccgacgacgcgtagctggtctgagaggacgatcagccacaggggtactgagacacggaccccactcctacgggaggcagcagttaggaatcttccgcaatgggcgaaagcctgacggagcgataccgcttgaaggacgaagcccttcggggtgtaaacttctgaactcgggacgataatgacggtaccgaggtaatagcaccggctaactccgtgccagcagccgcggtaatacggagggtgcgagcgttacccggatttactgggtgtaaagggcgtgtaggcggtctctcaagtccgatgctaaagaccgaagctcaacttcgggggtgcgttggatactgtgaggctagacggtcggagagggtagcggaatttccggagtagcggtgaaatgcgcagataccggaaggaacgccaatagcgaaagcagctacctggacgatttgtgacgctgaggcgcgaaagcgtggggagcaaaccggattagatacccgggtagtccacgccctaaacgatgagtgctgggtgtccgacacctgttgggtgccgtagctaacgcgttaagcactccacctgggaagtacggtcgcaagactgaaactcaaaggaattgacgggggcccgcacaagcggtggagcatgtggtttaattcgaagcaacgcgcagaaccttaccaggtcttgacatcctgggaaccctggtgaaagccgggggtgcccgcaagggagcccagagacaggtgctgcatggtcgtcgtcagctcgtgtcgtgagatgttgggttaagtcccgcaacgagcgcaacccctgttgctagttgccatcagttcggctgggcactctagcgagactgcctacgaaagtaggaggaaggcggggatgacgtctgatccgcatggcccttacgacctgggcgacacacgtgctacaatgcctgccacaaagcgctgcgacccggtaacgggaagccaatcgcacaaaagcaggctcagttcggattggggtctgcaactcgaccccatgaagccggaatcgctagtaatcgcggatcagccatgccgcggtgaatacgttcccgggccttgtacacaccgcccgtcaagccatgggagtgggttttgcctgaagtcgccgggagccacaggcaggcgcctagggtaaggctcatgactggggctaagtcgtaacaaggtagctgtaccggaaggtgcggctggatcacctccttt

SEQ ID NO: 854 - DNA, 1487 bp, artificial sequence; identical to SEQ ID NO: 853
  GCF_000409815.1_02810_[Lactobacillus]_paracasei

SEQ ID NO: 855 - DNA, 1487 bp, artificial sequence
  GCF_000409835.1_03003_[Lactobacillus]_paracasei
ttcggagagtttgatcctggctcagggtgaacgctggcggtatgcctaagacatgcaagtcgaacgggctgtttatgcagccagtggcggacgggtgagtaacacgtaggtgacctaccccaaagtctgggacaactaggagaaatcttagctaatcctggatgtggacatctactttggtggatgtttaaagcttcggcgctttgggatgggcctgcggcgcatcaggtagttggtggggtaatggcctaccaagccgacgacgcgtagctggtctgagaggacgatcagccacaggggtactgagacacggaccccactcctacgggaggcagcagttaggaatcttccgcaatgggcgaaagcctgacggagcgataccgcttgaaggacgaagcccttcggggtgtaaacttctgaactcgggacgataatgacggtaccgaggtaatagcaccggctaactccgtgccagcagccgcggtaatacggagggtgcgagcgttacccggatttactgggtgtaaagggcgtgtaggcggtctctcaagtccgatgctaaagaccgaagctcaacttcgggggtgcgttggatactgtgaggctagacggtcggagagggtagcggaatttccggagtagcggtgaaatgcgcagataccggaaggaacgccaatagcgaaagcagctacctggacgatttgtgacgctgaggcgcgaaagcgtggggagcaaaccggattagatacccgggtagtccacgccctaaacgatgagtgctgggtgtccgacatctgttgggtgccgtagctaacgcgttaagcactccacctgggaagtacggtcgcaagactgaaactcaaaggaattgacgggggcccgcacaagcggtggagcatgtggtttaattcgaagcaacgcgcagaaccttaccaggtcttgacatccacggaaccctggtgaaagccgggggtgcccgcaagggagccgtgagacaggtgctgcatggtcgtcgtcagctcgtgtcgtgagatgttgggttaagtcccgcaacgagcgcaacccctgttgctagttgccatcagttcggctgggcactctagcgagactgcctacgaaagtaggaggaaggcggggatgacgtctgatccgcatggcccttacgacctgggcgacacacgtgctacaatgcctgccacaaagcgctgcgacccggtaacgggaagccaatcgcacaaaagcaggctcagttcggattggggtctgcaactcgaccccatgaagccggaatcgctagtaatcgcggatcagccatgccgcggtgaatacgttcccgggccttgtacacaccgcccgtcaagccatgggagtgggttttgcctgaagtcgccgggagccacaggcaggcgcctagggtaaggctcatgactggggctaagtcgtaacaaggtagctgtaccggaaggtgcggctggatcacctccttt

SEQ ID NO: 856 - DNA, 1487 bp, artificial sequence; identical to SEQ ID NO: 855
  GCF_000409835.1_03017_[Lactobacillus]_paracasei

SEQ ID NO: 857 - DNA, 1532 bp, artificial sequence
  GCF_000409935.1_02741_[Lactobacillus]_paracasei
tgaagagtttgatcatggctcagattgaacgctggcggcaggcctaacacatgcaagtcgagcggtagagagaagcttgcttctcttgagagcggcggacgggtgagtaatgcctaggaatctgcctggtagtgggggataacgttcggaaacggacgctaataccgcatacgtcctacgggagaaagcaggggaccttcgggccttgcgctatcagatgagcctaggtcggattagctagttggtgaggtaatggctcaccaaggcgacgatccgtaactggtctgagaggatgatcagtcacactggaactgagacacggtccagactcctacgggaggcagcagtggggaatattggacaatgggcgaaagcctgatccagccatgccgcgtgtgtgaagaaggtcttcggattgtaaagcactttaagttgggaggaagggttgtagattaatactctgcaattttgacgttaccgacagaataagcaccggctaactctgtgccagcagccgcggtaatacagagggtgcaagcgttaatcggaattactgggcgtaaagcgcgcgtaggtggtttgttaagttggatgtgaaatccccgggctcaacctgggaactgcattcaaaactgactgactagagtatggtagagggtggtggaatttcctgtgtagcggtgaaatgcgtagatataggaaggaacaccagtggcgaaggcgaccacctggactaatactgacactgaggtgcgaaagcgtggggagcaaacaggattagataccctggtagtccacgccgtaaacgatgtcaactagccgttggaagccttgagcttttagtggcgcagctaacgcattaagttgaccgcctggggagtacggccgcaaggttaaaactcaaatgaattgacgggggcccgcacaagcggtggagcatgtggtttaattcgaagcaacgcgaagaaccttaccaggccttgacatccaatgaactttctagagatagattggtgccttcgggaacattgagacaggtgctgcatggctgtcgtcagctcgtgtcgtgagatgttgggttaagtcccgtaacgagcgcaacccttgtccttagttaccagcacgtaatggtgggcactctaaggagactgccggtgacaaaccggaggaaggtggggatgacgtcaagtcatcatggcccttacggcctgggctacacacgtgctacaatggtcggtacagagggttgccaagccgcgaggtggagctaatcccataaaaccgatcgtagtccggatcgcagtctgcaactcgactgcgtgaagtcggaatcgctagtaatcgcgaatcagaatgtcgcggtgaatacgttcccgggccttgtacacaccgcccgtcacaccatgggagtgggttgcaccagaagtagctagtctaaccttcgggaggacggttaccacggtgtgattcatgactggggtgaagtcgtaacaaggtagccgtaggggaacctgcggctggatcacctcctt

SEQ ID NO: 858 - DNA, 1529 bp, artificial sequence
  GCF_000409955.1_02945_[Lactobacillus]_paracasei
tatagagtttgatcctggctcagattgaacgctggcggcatgctttacacatgcaagtcgaacggtaacaggtcttcggatgctgacgagtggcgaacgggtgagtaatacatcggaacgtgcctagtagtgggggataactactcgaaagagtagctaataccgcatgagatctacggatgaaagcaggggaccttcgggccttgtgctactagagcggctgatggcagattaggtagttggtggggtaaaggcttaccaagcctgcgatctgtagctggtctgagaggacgaccagccacactggggctgagacacggcccagactcctacgggaggcagcagtggggaattttggacaatgggcgaaagcctgatccagcaatgccgcgtgcaggatgaaggccctcgggttgtaaactgcttttgtacggaacgaaaagcctggggctaatatccccgggtcatgacggtaccgtaagaataagcaccggctaactacgtgccagcagccgcggtaatacgtagggtgcaagcgttaatcggaattactgggcgtaaagcgtgcgcaggcggttttgtaagacagtggtgaaatccccgggctcaacctgggaactgccattgtgactgcaaagctagagtgcggcagagggggatggaattccgcgtgtagcagtgaaatgcgtagatatgcggaggaacaccgatggcgaaggcaatcccctgggcctgcactgacgctcatgcacgaaagcgtggggagcaaacaggattagataccctggtagtccacgccctaaacgatgtcaactggttgttgggtcttaactgactcagtaacgaagctaacgcgtgaagttgaccgcctggggagtacggccgcaaggttgaaactcaaaggaattgacggggacccgcacaagcggtggatgatgtggtttaattcgatgcaacgcgaaaaaccttacccacctttgacatggcaggaacttaccagagatggtttggtgctcgaaagagaacctgcacacaggtgctgcatggctgtcgtcagctcgtgtcgtgagatgttgggttaagtcccgcaacgagcgcaacccttgccattagttgctacattcagttgagcactctaatgggactgccggtgacaaaccggaggaaggtggggatgacgtcaagtcctcatggcccttataggtggggctacacacgtcatacaatggctggtacaaagggttgccaacccgcgagggggagctaatcccataaagccagtcgtagtccggatcgcagtctgcaactcgactgcgtgaagtcggaatcgctagtaatcgtggatcagaatgtcacggtgaatacgttcccgggtcttgtacacaccgcccgtcacaccatgggagcgggtctcgccagaagtaggtagcctaaccgcaaggagggcgcttaccacggcggggttcgtgactggggtgaagtcgtaacaaggtagccgtatcggaaggtgcggctggatcacctccttt

SEQ ID NO: 859 - DNA, 1529 bp, artificial sequence
  GCF_000409955.1_03037_[Lactobacillus]_paracasei
tatagagtttgatcctggctcagattgaacgctggcggcatgctttacacatgcaagtcgaacggtaacaggtcttcggatgctgacgagtggcgaacgggtgagtaatacatcggaacgtgcctagtagtgggggataactactcgaaagagtagctaataccgcatgagatctacggatgaaagcaggggaccttcgggccttgtgctactagagcggctgatggcagattaggtagttggtggggtaaaggcttaccaagcctgcgatctgtagctggtctgagaggacgaccagccacactgggactgagacacggcccagactcctacgggaggcagcagtggggaattttggacaatgggcgaaagcctgatccagcaatgccgcgtgcaggatgaaggccctcgggttgtaaactgcttttgtacggaacgaaaagcctggggctaatatccccgggtcatgacggtaccgtaagaataagcaccggctaactacgtgccagcagccgcggtaatacgtagggtgcaagcgttaatcggaattactgggcgtaaagcgtgcgcaggcggttttgtaagacagtggtgaaatccccgggctcaacctgggaactgccattgtgactgcaaagctagagtgcggcagagggggatggaattccgcgtgtagcagtgaaatgcgtagatatgcggaggaacaccgatggcgaaggcaatcccctgggcctgcactgacgctcatgcacgaaagcgtggggagcaaacaggattagataccctggtagtccacgccctaaacgatgtcaactggttgttgggtcttaactgactcagtaacgaagctaacgcgtgaagttgaccgcctggggagtacggccgcaaggttgaaactcaaaggaattgacggggacccgcacaagcggtggatgatgtggtttaattcgatgcaacgcgaaaaaccttacccacctttgacatggcaggaacttaccagagatggtttggtgctcgaaagagaacctgcacacaggtgctgcatggctgtcgtcagctcgtgtcgtgagatgttgggttaagtcccgcaacgagcgcaacccttgccattagttgctacattcagttgagcactctaatgggactgccggtgacaaaccggaggaaggtggggatgacgtcaagtcctcatggcccttataggtggggctacacacgtcatacaatggctggtacaaagggttgccaacccgcgagggggagctaatcccataaagccagtcgtagtccggatcgcagtctgcaactcgactgcgtgaagtcggaatcgctagtaatcgtggatcagaatgtcacggtgaatacgttcccgggtcttgtacacaccgcccgtcacaccatgggagcgggtctcgccagaagtaggtagcctaaccgcaaggagggcgcttaccacggcggggttcgtgactggggtgaagtcgtaacaaggtagccgtatcggaaggtgcggctggatcacctccttt

SEQ ID NO: 860 - DNA, 1529 bp, artificial sequence; identical to SEQ ID NO: 859
  GCF_000410015.1_02925_[Lactobacillus]_paracasei

SEQ ID NO: 861 - DNA, 1529 bp, artificial sequence; identical to SEQ ID NO: 859
  GCF_000410095.1_02128_[Lactobacillus]_paracasei

SEQ ID NO: 862 - DNA, 1529 bp, artificial sequence
  GCF_000410135.1_00056_[Lactobacillus]_paracasei
tatagagtttgatcctggctcagattgaacgctggcggcatgctttacacatgcaagtcgaacggtaacaggtctttggatgctgacgagtggcgaacgggtgagtaatacatcggaacgtgcctagtagtgggggataactactcgaaagagtagctaataccgcatgagatctacggatgaaagcaggggaccttcgggccttgtgctactagagcggctgatggcagattaggtagttggtggggtaaaggcttaccaagcctgcgatctgtagctggtctgagaggacgaccagccacactgggactgagacacggcccagactcctacgggaggcagcagtggggaattttggacaatgggcgaaagcctgatccagcaatgccgcgtgcaggatgaaggccctcgggttgtaaactgcttttgtacggaacgaaaagcctggggctaatatccccgggtcatgacggtaccgtaagaataagcaccggctaactacgtgccagcagccgcggtaatacgtagggtgcaagcgttaatcggaattactgggcgtaaagcgtgcgcaggcggttttgtaagacagtggtgaaatccccgggctcaacctgggaactgccattgtgactgcaaagctagagtgcggcagagggggatggaattccgcgtgtagcagtgaaatgcgtagatatgcggaggaacaccgatggcgaaggcaatcccctgggcctgcactgacgctcatgcacgaaagcgtggggagcaaacaggattagataccctggtagtccacgccctaaacgatgtcaactggttgttgggtcttaactgactcagtaacgaagctaacgcgtgaagttgaccgcctggggagtacggccgcaaggttgaaactcaaaggaattgacggggacccgcacaagcggtggatgatgtggtttaattcgatgcaacgcgaaaaaccttacccacctttgacatggcaggaacttaccagagatggtttggtgctcgaaagagaacctgcacacaggtgctgcatggctgtcgtcagctcgtgtcgtgagatgttgggttaagtcccgcaacgagcgcaacccttgccattagttgctacattcagttgagcactctaatgggactgccggtgacaaaccggaggaaggtggggatgacgtcaagtcctcatggcccttataggtggggctacacacgtcatacaatggctggtacaaagggttgccaacccgcgagggggagctaatcccataaagccagtcgtagtccggatcgcagtctgcaactcgactgcgtgaagtcggaatcgctagtaatcgtggatcagaatgtcacggtgaatacgttcccgggtcttgtacacaccgcccgtcacaccatgggagcgggtctcgccagaagtaggtagcctaaccgcaaggagggcgcttaccacggcggggttcgtgactggggtgaagtcgtaacaaggtagccgtatcggaaggtgcggctggatcacctccttt

SEQ ID NO: 863 - DNA, 1529 bp, artificial sequence
  GCF_000410135.1_02899_[Lactobacillus]_paracasei
tatagagtttgatcctggctcagattgaacgctggcggcatgctttacacatgcaagtcgaacggtaacaggtcttcggatgctgacgagtggcgaacgggtgagtaatacatcggaacgtgcctagtagtgggggataactactcgaaagagtagctaataccgcatgagatctacggatgaaagcaggggaccttcgggccttgtgctactagagcggctgatggcagattaggtagttggtggggtaaaggcttaccaagcctgcgatctgtagctggtctgagaggacgaccagccacactgggactgagacacggcccagactcctacgggaggcagcagtggggaattttggacaatgggcgaaagcctgatccagcaatgccgcgtgcaggatgaaggccctcgggttgtaaactgcttttgtacggaacgaaaagcctggggctaatatccccgggtcatgacggtaccgtaagaataagcaccggctaactacgtgccagcagccgcggtaatacgtagggtgcaagcgttaatcggaattactgggcgtaaagcgtgcgcaggcggttttgtaagacagtggtgaaatccccgggctcaacctgggaactgccattgtgactgcaaagctagagtgcggctgagggggatggaattccgcgtgtagcagtgaaatgcgtagatatgcggaggaacaccgatggcgaaggcaatcccctgggcctgcactgacgctcatgcacgaaagcgtggggagcaaacaggattagataccctggtagtccacgccctaaacgatgtcaactggttgttgggtcttaactgactcagtaacgaagctaacgcgtgaagttgaccgcctggggagtacggccgcaaggttgaaactcaaaggaattgacggggacccgcacaagcggtggatgatgtggtttaattcgatgcaacgcgaaaaaccttacccacctttgacatggcaggaacttaccagagatggtttggtgctcgaaagagaacctgcacacaggtgctgcatggctgtcgtcagctcgtgtcgtgagatgttgggttaagtcccgcaacgagcgcaacccttgccattagttgctacattcagttgagcactctaatgggactgccggtgacaaaccggaggaaggtggggatgacgtcaagtcctcatggcccttataggtggggctacacacgtcatacaatggctggtacaaagggttgccaacccgcgagggggagctaatcccataaagccagtcgtagtccggatcgcagtctgcaactcgactgcgtgaagtcggaatcgctagtaatcgtggatcagaatgtcacggtgaatacgttcccgggtcttgtacacaccgcccgtcacaccatgggagcgggtctcgccagaagtaggtagcctaaccgcaaggagggcgcttaccacggcggggttcgtgactggggtgaagtcgtaacaaggtagccgtatcggaaggtgcggctggatcacctccttt

SEQ ID NO: 864 - DNA, 1529 bp, artificial sequence; identical to SEQ ID NO: 859
  GCF_000410155.1_02725_[Lactobacillus]_paracasei

SEQ ID NO: 865 - DNA, 1529 bp, artificial sequence; identical to SEQ ID NO: 859
  GCF_000410175.1_03034_[Lactobacillus]_paracasei

SEQ ID NO: 866 - DNA, 1529 bp, artificial sequence; identical to SEQ ID NO: 859
  GCF_000410275.1_02490_[Lactobacillus]_paracasei

SEQ ID NO: 867 - DNA, 1529 bp, artificial sequence
  GCF_000410315.1_00002_[Lactobacillus]_paracasei
tatagagtttgatcctggctcagattgaacgctggcggcatgctttacacatgcaagtcgaacggtaacaggtcttcggatgctgacgagtggcgaacgggtgagtaatacatcggaacgtgcctagtagtgggggataactactcgaaagagtagctaataccgcatgagatctacggatgaaagcaggggaccttcgggccttgtgctactagagcggctgatggcagattaggtagttggtggggtaaaggcttaccaagcctgcgatctgtagctggtctgagaggacgaccagccacactgggactgagacacggcccagactcctacgggaggcagcagtggggaattttggacaatgggcgaaagcctgatccagcaatgccgcgtgcaggatgaaggccctcgggttgtaaactgcttttgtacggaacgaaaagcctggggctaatatccccgggtcatgacggtaccgtaagaataagcaccggctaactacgtgccagcagccgcggtaatacgtagggtgcaagcgttaatcggaattactgggcgtaaagcgtgcgcaggcggttttgtaagacagtggtgaaatccccgggctcaacctgggaactgccattgtgactgcaaggctagagtgcggcagagggggatggaattccgcgtgtagcagtgaaatgcgtagatatgcggaggaacaccgatggcgaaggcaatcccctgggcctgcactgacgctcatgcacgaaagcgtggggagcaaacaggattagataccctggtagtccacgccctaaacgatgtcaactggttgttgggtcttaactgactcagtaacgaagctaacgcgtgaagttgaccgcctggggagtacggccgcaaggttgaaactcaaaggaattgacggggacccgcacaagcggtggatgatgtggtttaattcgatgcaacgcgaaaaaccttacccacctttgacatggcaggaacttaccagagatggtttggtgctcgaaagagaacctgcacacaggtgctgcatggctgtcgtcagctcgtgtcgtgagatgttgggttaagtcccgcaacgagcgcaacccttgccattagttgctacattcagttgagcactctaatgggactgccggtgacaaaccggaggaaggtggggatgacgtcaagtcctcatggcccttataggtggggctacacacgtcatacaatggctggtacaaagggttgccaacccgcgagggggagctaatcccataaagccagtcgtagtccggatcgcagtctgcaactcgactgcgtgaagtcggaatcgctagtaatcgtggatcagaatgtcacggtgaatacgttcccgggtcttgtacacaccgcccgtcacaccatgggagcgggtctcgccagaagtaggtagcctaaccgcaaggagggcgcttaccacggcggggttcgtgactggggtgaagtcgtaacaaggtagccgtatcggaaggtgcggctggatcacctccttt

SEQ ID NO: 868 - DNA, 1531 bp, artificial sequence
  GCF_000410455.1_03049_[Lactobacillus]_paracasei
tgaagagtttgatcatggctcagattgaacgctggcggcaggcctaacacatgcaagtcgagcggatgaagggagcttgctcctggattcagcggcggacgggtgagtaatgcctaggaatctgcctggtagtgggggataacgtccggaaacgggcgctaataccgcatacgtcctgagggagaaagtgggggatcttcggacctcacgctatcagatgagcctaggtcggattagctagttggtggggtaaaggcctaccaaggcgacgatccgtaactggtctgagaggatgatcagtcacactggaactgagacacggtccagactcctacgggaggcagcagtggggaatattggacaatgggcgaaagcctgatccagccatgccgcgtgtgtgaagaaggtcttcggattgtaaagcactttaagttgggaggaagggcagtaagttaataccttgctgttttgacgttaccaacagaataagcaccggctaacttcgtgccagcagccgcggtaatacgaagggtgcaagcgttaatcggaattactgggcgtaaagcgcgcgtaggtggttcagcaagttggatgtgaaatccccgggctcaacctgggaactgcatccaaaactactgagctagagtacggtagagggtggtggaatttcctgtgtagcggtgaaatgcgtagatataggaaggaacaccagtggcgaaggcgaccacctggactgatactgacactgaggtgcgaaagcgtggggagcaaacaggattagataccctggtagtccacgccgtaaacgatgtcgactagccgttgggatccttgagatcttagtggcgcagctaacgcgataagtcgaccgcctggggagtacggccgcaaggttaaaactcaaatgaattgacgggggcccgcacaagcggtggagcatgtggtttaattcgaagcaacgcgaagaaccttacctggccttgacatgctgagaactttccagagatggattggtgccttcgggaactcagacacaggtgctgcatggctgtcgtcagctcgtgtcgtgagatgttgggttaagtcccgtaacgagcgcaacccttgtccttagttaccagcacctcgggtgggcactctaaggagactgccggtgacaaaccggaggaaggtggggatgacgtcaagtcatcatggcccttacggccagggctacacacgtgctacaatggtcggtacaaagggttgccaagccgcgaggtggagctaatcccataaaaccgatcgtagtccggatcgcagtctgcaactcgactgcgtgaagtcggaatcgctagtaatcgtgaatcagaatgtcacggtgaatacgttcccgggccttgtacacaccgcccgtcacaccatgggagtgggttgctccagaagtagctagtctaaccgcaagggggacggttaccacggagtgattcatgactggggtgaagtcgtaacaaggtagccgtaggggaacctgcggctggatcacctcctt

SEQ ID NO: 869 - DNA, 1531 bp, artificial sequence; identical to SEQ ID NO: 868
  GCF_000410495.1_02553_[Lactobacillus]_paracasei

SEQ ID NO: 870 - DNA, 1484 bp, artificial sequence
  GCF_000472345.1_02776_[Lactobacillus]_paracasei
cttgagagtttgatcctggctcagaacgaacgctggcggcatgcctaatacatgcaagtcgaacgagatcttcggatctagtggcgcacgggtgcgtaacgcgtgggaatctgcccttgggttcggaataacttctggaaacggaagctaataccggatgatgacgtaagtccaaagatttatcgcccaaggatgagcccgcgtaggattagctagttggtggggtaaaggcccaccaaggcgacgatccttagctggtctgagaggatgatcagccacactgggactgagacacggcccagactcctacgggaggcagcagtagggaatattggacaatgggggaaaccctgatccagcaatgccgcgtgagtgatgaaggccttagggttgtaaagctcttttacccgggatgataatgacagtaccgggagaataagctccggctaactccgtgccagcagccgcggtaatacggagggagctagcgttgttcggaattactgggcgtaaagcgcacgtaggcggctattcaagtcagaggtgaaagcccggggctcaaccccggaactgcctttgaaactagatagcttgaatccaggagaggtgagtggaattccgagtgtagaggtgaaattcgtagatattcggaagaacaccagtggcgaaggcggctcactggactggtattgacgctgaggtgcgaaagcgtggggagcaaacaggattagataccctggtagtccacgccgtaaacgatgataactagctgtcagggcacatggtgttttggtggcgcagctaacgcattaagttatccgcctggggagtacggtcgcaagattaaaactcaaaggaattgacgggggcctgcacaagcggtggagcatgtggtttaattcgaagcaacgcgcagaaccttaccaacgtttgacatccctatcgcggatcgtggagacactttccttcagttcggctggataggtgacaggtgctgcatggctgtcgtcagctcgtgtcgtgagatgttgggttaagtcccgcaacgagcgcaaccctcgcctttagttgccagcatttagttgggtactctaaaggaaccgccggtgataagccggaggaaggtggggatgacgtcaagtcctcatggcccttacgcgttgggctacacacgtgctacaatggcgactacagtgggcagccacctcgcgagagggagctaatctccaaaagtcgtctcagttcggatcgttctctgcaactcgagagcgtgaaggcggaatcgctagtaatcgcggatcagcatgccgcggtgaatacgttcccaggccttgtacacaccgcccgtcacaccatgggagttggattcactcgaaggcgttgagctaaccgtaaggaggcaggcgaccacagtgggtttagcgactggggtgaagtcgtaacaaggtagccgtaggggaacctgcggctggatcacctccttt

SEQ ID NO: 871 - DNA, 1477 bp, artificial sequence
  GCF_000582665.1_00119_[Lactobacillus]_paracasei
atgagagtttgatcctggctcagaacgaacgctggcggcaggcttaacacatgcaagtcgagcgccccgcaaggggagcggcagacgggtgagtaacgcgtgggaatctaccttttgctacggaataacgcagggaaacttgtgctaataccgtatgtgtccttcgggagaaagatttatcggcaagagatgagcccgcgttggattagctagttggtggggtaaaggcctaccaaggcgacgatccatagctggtctgagaggatgatcagccacattgggactgagacacggcccaaactcctacgggaggcagcagtggggaatattggacaatgggcgcaagcctgatccagccatgccgcgtgagtgatgaaggccctagggttgtaaagctctttcaccggagaagataatgacggtatccggagaagaagccccggctaacttcgtgccagcagccgcggtaatacgaagggggctagcgttgttcggaattactgggcgtaaagcgcacgtaggcggatcgatcagtcaggggtgaaatcccagggctcaaccctggaactgcctttgatactgtcgatctggagtatggaagaggtgagtggaattccgagtgtagaggtgaaattcgtagatattcggaggaacaccagtggcgaaggcggctcactggtccattactgacgctgaggtgcgaaagcgtggggagcaaacaggattagataccctggtagtccacgccgtaaacgatgaatgttagccgtcgggcagtatactgttcggtggcgcagctaacgcattaaacattccgcctggggagtacggtcgcaagattaaaactcaaaggaattgacgggggcccgcacaagcggtggagcatgtggtttaattcgaagcaacgcgcagaaccttaccagcccttgacatcctgtgttacccgtagagatatggggtccacttcggtggcgcagagacaggtgctgcatggctgtcgtcagctcgtgtcgtgagatgttgggttaagtcccgcaacgagcgcaaccctcgcccttagttgccagcattaagttgggcactctaaggggactgccggtgataagccgagaggaaggtggggatgacgtcaagtcctcatggcccttacgggctgggctacacacgtgctacaatggtggtgacagtgggcagcgagcacgcgagtgtgagctaatctccaaaagccatctcagttcggattgcactctgcaactcgagtgcatgaagttggaatcgctagtaatcgcggatcagcatgccgcggtgaatacgttcccgggccttgtacacaccgcccgtcacaccatgggagttggttttacccgaaggtagtgcgctaaccgcaaggaggcagctaaccacggtagggtcagcgactggggtgaagtcgtaacaaggtagccgtaggggaacctgcggctggatcacctccttt

SEQ ID NO: 872 - DNA, 1477 bp, artificial sequence; identical to SEQ ID NO: 871
  GCF_000582665.1_00930_[Lactobacillus]_paracasei

SEQ ID NO: 873 - DNA, 1477 bp, artificial sequence; identical to SEQ ID NO: 871
  GCF_000582665.1_01932_[Lactobacillus]_paracasei

SEQ ID NO: 874 - DNA, 1540 bp, artificial sequence
  GCF_000582665.1_01977_[Lactobacillus]_paracasei
tgaagagtttgatcctggctcagattgaacgctggcggcatgcttaacacatgcaagtcgaacggcagcattgtctagcttgctagacagatggcgagtggcgaacgggtgagtaacgcgtaggaatatgccttgaagagggggacaacttggggaaactcaagctaataccgcataatgtctgaggacgaaagctggggaccttcgggcctggcgctttaagattagcctgcgtccgattagctagttggtggggtaagggcctaccaaggcgacgatcggtagctggtctgagaggatgaccagccacactggaactgagacacggtccagactcctacgggaggcagcagtggggaatattggacaatgggggcaaccctgatccagcaatgccgcgtgtgtgaagaaggcctgagggttgtaaagcactttcagtggggaggagggttgataggttaagagctgattaactggacgttacccacagaagaagcaccggctaactccgtgccagcagccgcggtaatacggagggtgcaagcgttaatcggaattactgggcgtaaagggtgcgtaggtggttgattaagttatctgtgaaattcctgggcttaacctgggacggtcagataatactggttgactcgagtatgggagagggtagtggaatttccggtgtagcggtgaaatgcgtagagatcggaaggaacaccagtggcgaaggcggctacctggcctaatactgacactgaggcacgaaagcgtggggagcaaacaggattagataccctggtagtccacgctgtaaacgatgtcaactagctgttggttatatgaaaataattagtggcgcagcaaacgcgataagttgaccgcctggggagtacggtcgcaagattaaaactcaaaggaattgacgggggcccgcacaagcggtggagcatgtggtttaattcgatgcaacgcgaagaaccttacctacccttgacatacagtgaattttgcagagatgcattagtgccttcgggaacactgatacaggtgctgcatggctgtcgtcagctcgtgtcgtgagatgttgggttaagtcccgtaacgagcgcaacccttatccttagttgccagcatgtgatggtggggactctaaggagactgccggtgacaaaccggaggaaggcggggatgacgtcaagtcatcatggcccttacgggtagggctacacacgtgctacaatggccgatacagagggcggcgaaggggcgacctggagcaaatccttaaaagtcggtcgtagtccggattggagtctgcaactcgactccatgaagtcggaatcgctagtaatcgcgaatcagcatgtcgcggtgaatacgttcccgggccttgtacacaccgcccgtcacaccatgggagtgggttgcaccagaagtagatagtctaaccttcgggggggacgtttaccacggtgtggttcatgactggggtgaagtcgtaacaaggtagccgtaggggaacctgcggctggatcacctcctt

SEQ ID NO: 875 - DNA, 1477 bp, artificial sequence
  GCF_000582665.1_02465_[Lactobacillus]_paracasei
atgagagtttgatcctggctcagaacgaacgctggcggcaggcttaacacatgcaagtcgagcgccccgcaaggggagcggcagacgggtgagtaacgcgtgggaacgtaccctttactacggaataacgcagggaaacttgtgctaataccgtatgtgcccttcgggggaaagatttatcggtaaaggatcggcccgcgttggattagctagttggtggggtaaaggcctaccaaggcgacgatccatagctggtctgagaggatgatcagccacattgggactgagacacggcccaaactcctacgggaggcagcagtggggaatattggacaatgggcgcaagcctgatccagccatgccgcgtgagtgatgaaggccctagggttgtaaagctctttcaccggagaagataatgacggtatccggagaagaagccccggctaacttcgtgccagcagccgcggtaatacgaagggggctagcgttgttcggaattactgggcgtaaagcgcacgtaggcggatcgatcagtcaggggtgaaatcccagggctcaaccctggaactgcctttgatactgtcgatctggagtatggaagaggtgagtggaattccgagtgtagaggtgaaattcgtagatattcggaggaacaccagtggcgaaggcggctcactggtccattactgacgctgaggtgcgaaagcgtggggagcaaacaggattagataccctggtagtccacgccgtaaacgatgaatgttagccgtcgggcagtatactgttcggtggcgcagctaacgcattaaacattccgcctggggagtacggtcgcaagattaaaactcaaaggaattgacgggggcccgcacaagcggtggagcatgtggtttaattcgaagcaacgcgcagaaccttaccagcccttgacatgcccggctacttgcagagatgcaaggttcccttcggggaccgggacacaggtgctgcatggctgtcgtcagctcgtgtcgtgagatgttgggttaagtcccgcaacgagcgcaaccctcgcccttagttgccagcatttggttgggcactctaaggggactgccggtgataagccgagaggaaggtggggatgacgtcaagtcctcatggcccttacgggctgggctacacacgtgctacaatggtggtgacagtgggcagcgagcacgcgagtgtgagctaatctccaaaagccatctcagttcggattgcactctgcaactcgagtgcatgaagttggaatcgctagtaatcgcggatcagcatgccgcggtgaatacgttcccgggccttgtacacaccgcccgtcacaccatgggagttggttttacccgaaggtagtgcgctaaccgcaaggaggcagctaaccacggtagggtcagcgactggggtgaagtcgtaacaaggtagccgtaggggaacctgcggctggatcacctccttt

SEQ ID NO: 876 - DNA, 1538 bp, artificial sequence
  GCF_000829035.1_00261_[Lactobacillus]_paracasei
ttgaagagtttgatcatggctcagattgaacgctggcggcaggcctaacacatgcaagtcgaacggtagcacagaggagcttgctccttgggtgacgagtggcggacgggtgagtaatgtctgggaaactgcccgatggagggggataactactggaaacggtagctaataccgcataacgtcgcaagaccaaagagggggaccttcgggcctcttgccatcggatgtgcccagatgggattagctagtaggtggggtaacggctcacctaggcgacgatccctagctggtctgagaggatgaccagccacactggaactgagacacggtccagactcctacgggaggcagcagtggggaatattgcacaatgggcgcaagcctgatgcagccatgccgcgtgtatgaagaaggccttcgggttgtaaagtactttcagcgaggaggaaggcgttgtggttaataaccgcagcgattgacgttactcgcagaagaagcaccggctaactccgtgccagcagccgcggtaatacggagggtgcaagcgttaatcggaattactgggcgtaaagcgcacgcaggcggtctgtcaagtcggatgtgaaatccccgggctcaacctgggaactgcatccgaaactggcaggctagagtcttgtagaggggggtagaattccaggtgtagcggtgaaatgcgtagagatctggaggaataccggtggcgaaggcggccccctggacaaagactgacgctcaggtgcgaaagcgtggggagcaaacaggattagataccctggtagtccacgccgtaaacgatgtcgacttggaggttgtgcccttgaggcgtggcttccggagctaacgcgttaagtcgaccgcctggggagtacggccgcaaggttaaaactcaaatgaattgacgggggcccgcacaagcggtggagcatgtggtttaattcgatgcaacgcgaagaaccttacctactcttgacatccagagaactttccagagatggattggtgccttcgggaactctgagacaggtgctgcatggctgtcgtcagctcgtgttgtgaaatgttgggttaagtcccgcaacgagcgcaacccttatcctttgttgccagcggttcggccgggaactcaaaggagactgccagtgataaactggaggaaggtggggatgacgtcaagtcatcatggcccttacgagtagggctacacacgtgctacaatggcgcatacaaagagaagcgacctcgcgagagcaagcggacctcataaagtgcgtcgtagtccggattggagtctgcaactcgactccatgaagtcggaatcgctagtaatcgtggatcagaatgccacggtgaatacgttcccgggccttgtacacaccgcccgtcacaccatgggagtgggttgcaaaagaagtaggtagcttaaccttcgggagggcgcttaccactttgtgattcatgactggggtgaagtcgtaacaaggtaaccgtaggggaacctgcggttggatcacctcctt

SEQ ID NO: 877 - DNA, 1536 bp, artificial sequence
  GCF_000829035.1_00782_[Lactobacillus]_paracasei
ttgaagagtttgatcatggctcagattgaacgctggcggcaggcctaacacatgcaagtcgaacggtagcacagagagcttgctctcgggtgacgagtggcggacgggtgagtaatgtctgggaaactgcccgatggagggggataactactggaaacggtagctaataccgcataacgtcgcaagaccaaagagggggaccttcgggcctcttgccatcggatgtgcccagatgggattagctagtaggtggggtaacggctcacctaggcgacgatccctagctggtctgagaggatgaccagccacactggaactgagacacggtccagactcctacgggaggcagcagtggggaatattgcacaatgggcgcaagcctgatgtagccatgccgcgtgtatgaagaaggccttcgggttgtaaagtactttcagcgaggaggaaggcattaaggttaataaccttagtgattgacgttactcgcagaagaagcaccggctaactccgtgccagcagccgcggtaatacggagggtgcaagcgttaatcggaattactgggcgtaaagcgcacgcaggcggtctgtcaagtcggatgtgaaatccccgggctcaacctgggaactgcatccgaaactggcaggctagagtcttgtagaggggggtagaattccaggtgtagcggtgaaatgcgtagagatctggaggaataccggtggcgaaggcggccccctggacaaagactgacgctcaggtgcgaaagcgtggggagcaaacaggattagataccctggtagtccacgccgtaaacgatgtcgacttggaggttgtgcccttgaggcgtggcttccggagctaacgcgttaagtcgaccgcctggggagtacggccgcaaggttaaaactcaaatgaattgacgggggcccgcacaagcggtggagcatgtggtttaattcgatgcaacgcgaagaaccttacctactcttgacatccagagaacttggcagagatgccttggtgccttcgggaactctgagacaggtgctgcatggctgtcgtcagctcgtgttgtgaaatgttgggttaagtcccgcaacgagcgcaacccttatcctttgttgccagcgattcggtcgggaactcaaaggagactgccagtgataaactggaggaaggtggggatgacgtcaagtcatcatggcccttacgagtagggctacacacgtgctacaatggcgcatacaaagagaagcgacctcgcgagagcaagcggacctcataaagtgcgtcgtagtccggattggagtctgcaactcgactccatgaagtcggaatcgctagtaatcgtggatcagaatgccacggtgaatacgttcccgggccttgtacacaccgcccgtcacaccatgggagtgggttgcaaaagaagtaggtagcttaaccttcgggagggcgcttaccactttgtgattcatgactggggtgaagtcgtaacaaggtaaccgtaggggaacctgcggttggatcacctcctt

SEQ ID NO: 878 - DNA, 1538 bp, artificial sequence
  GCF_000829035.1_00821_[Lactobacillus]_paracasei
ttgaagagtttgatcatggctcagattgaacgctggcggcaggcctaacacatgcaagtcgaacggtagcacagaggagcttgctccttgggtgacgagtggcggacgggtgagtaatgtctgggaaactgcccgatggagggggataactactggaaacggtagctaataccgcataacgtcgcaagaccaaagagggggaccttcgggcctcttgccatcggatgtgcccagatgggattagctagtaggtggggtaacggctcacctaggcgacgatccctagctggtctgagaggatgaccagccacactggaactgagacacggtccagactcctacgggaggcagcagtggggaatattgcacaatgggcgcaagcctgatgcagccatgccgcgtgtatgaagaaggccttcgggttgtaaagtactttcagcgaggaggaaggcgttgtggttaataaccgcagcgattgacgttactcgcagaagaagcaccggctaactccgtgccagcagccgcggtaatacggagggtgcaagcgttaatcggaattactgggcgtaaagcgcacgcaggcggtctgtcaagtcggatgtgaaatccccgggctcaacctgggaactgcatccgaaactggcaggctagagtcttgtagaggggggtagaattccaggtgtagcggtgaaatgcgtagagatctggaggaataccggtggcgaaggcggccccctggacaaagactgacgctcaggtgcgaaagcgtggggagcaaacaggattagataccctggtagtccacgccgtaaacgatgtcgacttggaggttgtgcccttgaggcgtggcttccggagctaacgcgttaagtcgaccgcctggggagtacggccgcaaggttaaaactcaaatgaattgacgggggcccgcacaagcggtggagcatgtggtttaattcgatgcaacgcgaagaaccttacctactcttgacatccagagaacttggcagagatgccttggtgccttcgggaactctgagacaggtgctgcatggctgtcgtcagctcgtgttgtgaaatgttgggttaagtcccgcaacgagcgcaacccttatcctttgttgccagcgattcggtcgggaactcaaaggagactgccagtgataaactggaggaaggtggggatgacgtcaagtcatcatggcccttacgagtagggctacacacgtgctacaatggcgcatacaaagagaagcgacctcgcgagagcaagcggacctcataaagtgcgtcgtagtccggattggagtctgcaactcgactccatgaagtcggaatcgctagtaatcgtggatcagaatgccacggtgaatacgttcccgggccttgtacacaccgcccgtcacaccatgggagtgggttgcaaaagaagtaggtagcttaaccttcgggagggcgcttaccactttgtgattcatgactggggtgaagtcgtaacaaggtaaccgtaggggaacctgcggttggatcacctcctt

SEQ ID NO: 879 - DNA, 1538 bp, artificial sequence; identical to SEQ ID NO: 878
  GCF_000829035.1_01903_[Lactobacillus]_paracasei

SEQ ID NO: 880 - DNA, 1538 bp, artificial sequence
  GCF_000829035.1_02631_[Lactobacillus]_paracasei
ttgaagagtttgatcatggctcagattgaacgctggcggcaggcctaacacatgcaagtcgaacggtagcacagaggagcttgctccttgggtgacgagtggcggacgggtgagtaatgtctgggaaactgcccgatggagggggataactactggaaacggtagctaataccgcataacgtcgcaagaccaaagagggggaccttcgggcctcttgccatcggatgtgcccagatgggattagctagtaggtggggtaacggctcacctaggcgacgatccctagctggtctgagaggatgaccagccacactggaactgagacacggtccagactcctacgggaggcagcagtggggaatattgcacaatgggcgcaagcctgatgcagccatgccgcgtgtatgaagaaggccttcgggttgtaaagtactttcagcgaggaggaaggcactaaggttaataaccttagtgattgacgttactcgcagaagaagcaccggctaactccgtgccagcagccgcggtaatacggagggtgcaagcgttaatcggaattactgggcgtaaagcgcacgcaggcggtctgtcaagtcggatgtgaaatccccgggctcaacctgggaactgcatccgaaactggcaggctagagtcttgtagaggggggtagaattccaggtgtagcggtgaaatgcgtagagatctggaggaataccggtggcgaaggcggccccctggacaaagactgacgctcaggtgcgaaagcgtggggagcaaacaggattagataccctggtagtccacgccgtaaacgatgtcgacttggaggttgtgcccttgaggcgtggcttccggagctaacgcgttaagtcgaccgcctggggagtacggccgcaaggttaaaactcaaatgaattgacgggggcccgcacaagcggtggagcatgtggtttaattcgatgcaacgcgaagaaccttacctactcttgacatccagagaacttggcagagatgccttggtgccttcgggaactctgagacaggtgctgcatggctgtcgtcagctcgtgttgtgaaatgttgggttaagtcccgcaacgagcgcaacccttatcctttgttgccagcgattcggtcgggaactcaaaggagactgccagtgataaactggaggaaggtggggatgacgtcaagtcatcatggcccttacgagtagggctacacacgtgctacaatggcgcatacaaagagaagcgacctcgcgagagcaagcggacctcataaagtgcgtcgtagtccggattggagtctgcaactcgactccatgaagtcggaatcgctagtaatcgtggatcagaatgccacggtgaatacgttcccgggccttgtacacaccgcccgtcacaccatgggagtgggttgcaaaagaagtaggtagcttaaccttcgggagggcgcttaccactttgtgattcatgactggggtgaagtcgtaacaaggtaaccgtaggggaacctgcggttggatcacctcctt

SEQ ID NO: 881 - DNA, 1514 bp, artificial sequence
  GCF_000949485.1_02978_[Lactobacillus]_paracasei
atgaagagtttgatcctggctcaggatgaacgctagcggcaggcctaacacatgcaagtcgaggggtaacggggtgcttgcaccgccgacgaccggcgcacgggtgcgtaacgcgtatgcaatctaccttatactggagtatagcccagagaaatttggattaatccttcatagtctatatatgtggcatcacatttatagtaaaggttacggtataagatgagcatgcgtcctattagtttgttggtgaggtaacggctcaccaagactacgataggtaggggccctgagagggggatcccccacactggtactgagacacggaccagactcctacgggaggcagcagtgaggaatattggacaatgggcgagagcctgatccagccatgccgcgtgcaggaagactgccctatgggttgtaaactgcttttatacgggaagaaacaccccctcgtgagggggcttgacggtaccgtaagaataaggatcggctaactccgtgccagcagccgcggtaatacggaggatccaagcgttatccggaatcattgggtttaaagggtccgtaggcgggcagctaagtcagtggtgaaagtctgcagctcaactgtagaattgccattgatactggttgtcttgaattagtgtgaagtggttagaatatgtagtgtagcggtgaaatgcatagatattacatagaataccaattgcgaaggcagatcactaacactatattgacgctgatggacgaaagcgtggggagcgaacaggattagataccctggtagtccacgccgtaaacgatggatactagctgttcggacttcggtctgagtggctaagcgaaagtgataagtatcccacctggggagtacgttcgcaagaatgaaactcaaaggaattgacgggggcccgcacaagcggtggagcatgtggtttaattcgatgatacgcgaggaaccttaccagggcttaaatgtagtctgacaggggtggaaacacctcctccttcgggcagattacaaggtgctgcatggttgtcgtcagctcgtgccgtgaggtgtcaggttaagtcctataacgagcgcaacccctgttgttagttgccatcgagtaatgtcgggaactctaacaagactgccggtgcaaaccgtgaggaaggtggggatgacgtcaaatcatcacggcccttacgtcctgggctacacacgtgctacaatggtaggtacagagagcagccactgcgtgagcaggagcgaatctataaaacctatctcagttcggatcggagtctgcaactcgactccgtgaagctggaatcgctagtaatcgcatatcagccatgatgcggtgaatacgttcccgggccttgtacacaccgcccgtcaagccatggaagctgggagtacctgaagtcggtgaccgcaaggagctgcctagggtaaaactagtaactggggctaagtcgtaacaaggtagccgtaccggaaggtgcggctggaacacctcctt

SEQ ID NO: 882 - DNA, 1513 bp, artificial sequence
  GCF_000958505.1_02759_[Lactobacillus]_paracasei
atggagagtttgatcctggctcaggatgaacgctagcgggaggcctaacacatgcaagccgagcggtagagattcttcggaatcttgagagcggcgtacgggtgcggaacacgtgtgcaacctgcctttatctgggggatagcctttcgaaaggaagattaataccccataatatattgaatggcatcatttgatattgaaaactccggtggatagagatgggcacgcgcaagattagatagttggtgaggtaacggctcaccaagtctacgatctttagggggcctgagagggtgatcccccacactggtactgagacacggaccagactcctacgggaggcagcagtgaggaatattggacaatgggtgagagcctgatccagccatcccgcgtgaaggacgacggccctatgggttgtaaacttcttttgtatagggataaacctactctcgtgagagtagctgaaggtactatacgaataagcaccggctaactccgtgccagcagccgcggtaatacggagggtgcaagcgttatccggatttattgggtttaaagggtccgtaggcggatctgtaagtcagtggtgaaatctcacagcttaactgtgaaactgccattgatactgcaggtcttgagtgttgttgaagtagctggaataagtagtgtagcggtgaaatgcatagatattacttagaacaccaattgcgaaggcaggttactaagcaacaactgacgctgatggacgaaagcgtggggagcgaacaggattagataccctggtagtccacgccgtaaacgatgctaactcgtttttgggctttcgggttcagagactaagcgaaagtgataagttagccacctggggagtacgttcgcaagaatgaaactcaaaggaattgacgggggcccgcacaagcggtggattatgtggtttaattcgatgatacgcgaggaaccttaccaaggcttaaatgggaaatgacaggtttagaaatagacttttcttcggacatttttcaaggtgctgcatggttgtcgtcagctcgtgccgtgaggtgttaggttaagtcctgcaacgagcgcaacccctgtcactagttgccatcattaagttggggactctagtgagactgcctacgcaagtagagaggaaggtggggatgacgtcaaatcatcacggcccttacgccttgggccacacacgtaatacaatggccagtacagagggcagctacacagcgatgtgatgcaaatctcgaaagctggtctcagttcggattggagtctgcaactcgactctatgaagctggaatcgctagtaatcgcgcatcagccatggcgcggtgaatacgttcccgggccttgtacacaccgcccgtcaagccatggaagtctggggtacctgaagtcggtgaccgtaataggagctgcctagggtaaaacaggtaactagggctaagtcgtaacaaggtagccgtaccggaaggtgcggctggaacatctcatt

SEQ ID NO: 883 - DNA, 1345 bp, artificial sequence
  GCF_001062695.1_01541_[Lactobacillus]_paracasei
gaaaggcggcttttagctgtcacttacagatgggcccgcggcgcattagctagttggtgaggtaacggctcaccaaggcgacgatgcgtagccgacctgagagggtgatcggccacactgggactgagacacggcccagactcctacgggaggcagcagtagggaatcttccgcaatggacgaaagtctgacggagcaacgccgcgtgagtgatgaaggttttcggatcgtaaaactctgttgtcagggaagaacaagtgcgagagtaactgctcgcaccttgacggtacctgaccagaaagccacggctaactacgtgccagcagccgcggtaatacgtaggtggcaagcgttgtccggaattattgggcgtaaagcgctcgcaggcggtcttttaagtctgatgtgaaagcccacggcttaaccgtggagggtcattggaaactggaggacttgagtacagaagaggagagtggaattccacgtgtagcggtgaaatgcgtagagatgtggaggaacaccagtggcgaaggcgactctctggtctgtaactgacgctgaggagcgaaagcgtggggagcgaacaggattagataccctggtagtccacgccgtaaacgatgagtgctaggtgttagggggtttccgccccttagtgctgaagttaacgcattaagcactccgcctggggagtacggccgcaaggctgaaactcaaaagaattgacgggggcccgcacaagcggtggagcatgtggtttaattcgaagcaacgcgaagaaccttaccaggtcttgacatcctctgaccaccctagagatagggatttcccttcggggacagagtgacaggtggtgcatggttgtcgtcagctcgtgtcgtgagatgttgggttaagtcccgcaacgagcgcaacccttgatcttagttgccagcattcagttgggcactctaaggtgactgccggtgacaaaccggaggaaggtggggatgacgtcaaatcatcatgccccttatgacctgggctacacacgtgctacaatggatggaacaaagggaagcgaaaaccgcgaggtcaagcaaatcccataaaaccattctcagttcggattgcaggctgcaactcgcctgcatgaagccggaatcgctagtaatcgcggatcagcatgccgcggtgaatacgttcccgggccttgtacacaccgcccgtcacaccacgagagttggtaacacccgaagtcggtgaggtaaccttttggagccagccgccgaaggtgggactaatgattggggtgaagtcgtaacaaggtagccgtatcggaaggtgcggctggatcacctccttt

SEQ ID NO: 884 - DNA, 1519 bp, artificial sequence
  GCF_001636215.1_02660_[Lactobacillus]_paracasei
atggagagtttgatcctggctcaggatgaacgctagcggcaggcctaatacatgcaagtcggacgggatttgggagcttgctcctgatgagagtggcgcacgggtgcgtaacacgtatgtaacctaccttaaccagggggatagcctctcgaaagagagattaagaccgcataatattatcgaatagcattgtttgataatcaaatatttatagggttaagatgggcatgcggaacattagctagttggtaaggtaatggcttaccaaggctacgatgtttaggggatctgagaggatggccccccacactggtactgagacacggaccagactcctacgggaggcagcagtaaggaatattggtcaatgggcggaagcctgaaccagccatgccgcgtgcaggaagacggccctatgggttgtaaactgcttttgtaccggaataaacctttggtcgtgaccgaagctgaatgtacggtaagaataaggatcggctaactccgtgccagcagccgcggtaatacggaggatccgagcgttatccggatttattgggtttaaagggtgcgtaggcggcctattaagtcaggggtgaaagacggtagcttaactatcgcagtgcctttgatactgatgggcttgaatgtagttgaggtaggcggaatgtggcaagtagcggtgaaatgcatagatatgccacagaacaccaattgcgaaggcagcttactaagctaagattgacgctgaggcacgaaagcgtggggatcaaacaggattagataccctggtagtccacgccctaaacgatgaatactcgatgttggcgatatacggccagcgtctaagcgaaagcgttaagtattccacctggggagtacgcccgcaagggtgaaactcaaaggaattgacgggggcccgcacaagcggaggagcatgtggtttaattcgatgatacgcgaggaaccttacccgggcttgaaagttagcgaatggagcagagacgctccagtccttcgggacgcgaaactaggtgctgcatggctgtcgtcagctcgtgccgtgaggtgttgggttaagtcccgcaacgagcgcaacccctatgtttagttgccagcatgtaatgatggggactctaaacagactgcctatgcaaatagagaggaaggaggggacgacgtcaagtcatcatggcccttacgtccggggctacacacgtgctacaatgggcagtacagagggcagctacctggcaacaggatgccaatctcataaagctgttcacagttcggatcggggtctgcaactcgaccccgtgaagttggattcgctagtaatcgcgtatcagcaatgacgcggtgaatacgttcccgggccttgtacacaccgcccgtcaagccatggaagctgggggtgcctgaagccggtaaccgcaaggagccgtctagggtaaaaccggtaactggggctaagtcgtaacaaggtagccgtaccggaaggtgtggctggaatacctccttt

SEQ ID NO: 885 - DNA, 1533 bp, artificial sequence
  GCF_001816065.1_00596_[Lactobacillus]_paracasei
tcaagagtttgatcctggctcagattgaacgctggcggaatgctttacacatgcaagtcgagcggcagcgcgggggcaaccctggcggcgagcggcgaacgggtgagtaatacatcggaacatgtccagttgtgggggatagcccggcgaaagccggattaataccgcatgagctcgagagaggaaagcgggggaccgtaaggcctcgcgcgactgggttggccgatgtccgattagctagttggcggggtaatggcccaccaaggcgatgatcggtagctggtctgagaggatgatcagccacactgggactgagacacggcccagactcctacgggaggcagcagtggggaattttggacaatgggggaaaccctgatccagccattccgcgtgagtgaagaaggccttcgggttgtaaagctcttttgtccggagcgaaacggttacggtgaatatccgtgactactgacggtaccggaagaataagcaccggctaactacgtgccagcagccgcggtaatacgtagggtgcgagcgttaatcggaattactgggcgtaaagcgtgcgcaggcgggcttttaagccagacgtgaaatccccgggcttaacctgggaatggcgtttgggactggaagtctggagtacggcagaggagactggaattcctggtgtagcagtgaaatgcgtagatatcaggaggaacaccgatggcgaaggcaggtctctgggctgatactgacgctcatgcacgaaagcgtggggagcaaacaggattagataccctggtagtccacgccctaaacgatgtcgactggttgttgggggtttgacactctcagtaacgaagctaacgcgtgaagtcgaccgcctggggagtacggccgcaaggttaaaactcaaaggaattgacggggacccgcacaagcggtggattatgtggattaattcgatgcaacgcgaaaaaccttacctacccttgacatgtccggaagcctgaagagattcaggtgtgcccgaaagggaactggaacacaggtgctgcatggctgtcgtcagctcgtgtcgtgagatgttgggttaagtcccgcaacgagcgcaacccttgtcattagttgctacatttagttgggcactctaatgagactgccggtgacaaaccggaggaaggtggggatgacgtcaagtcctcatggcccttatgggtagggcttcacacgtaatacaatggcgcgtacagagggttgctaagccgcgaggtggagccaatccctagaaagcgcgtcgtagtccggattgcagtctgcaactcgactgcatgaagtcggaatcgctagtaatcgcggatcagcatgtcgcggtgaatacgttcccgggtcttgtacacaccgcccgtcacaccatgggagtgggtttcaccagaagccggtcgcttaaccgcaaggatggcgccgaccacggtgagattcatgactggggtgaagtcgtaacaaggtagccgtatcggaaggtgcggctggatcacctccttt

SEQ ID NO: 886 - DNA, 808 bp, artificial sequence
  GCF_001885295.1_02519_[Lactobacillus]_paracasei
ttatgagagtttgatcctggctcaggacgaacgctggcggcgtgcctaatacatgcaagtcgaacgcatttccttccaccgtagcttgctacaccggaagaaaatgagtggcgaacgggtgagtaacacgtgggtaacctgcccatcagcgggggataacacttggaaacaggtgctaataccgcataattccatttaccgcatggtaaatggatgaaaggcgcttttgcgtcactgatggatggacccgcggtgcattagctagttggtggggtaacggcctaccaaggctgcgatgcatagccgacctgagagggtgatcggccacactgggactgagacacggcccagactcctacgggaggcagcagtagggaatcttcggcaatggacgcaagtctgaccgagcaacgccgcgtgagtgaagaaggttttcggatcgtaaaactctgttgttagagaagaacaaggatgagagtggaaagttcatcccttgacggtatctaaccagaaagccacggctaactacgtgccagcagccgcggtaatacgtaggtggcaagcgttgtccggatttattgggcgtaaagcgagcgcaggcggtcttttaagtctgatgtgaaagcccccggcttaaccggggagggtcattggaaactgggagacttgagtgcagaagaggaaagcggaattccatgtgtagcggtgaaatgcgtagatatatggaggaacaccagtggcgaaggcggctttctggtctgtaactgacgctgaggctcgaaagcgtggggagcaaacaggattagat

SEQ ID NO: 887 - DNA, 1310 bp, artificial sequence
  GCF_001982085.1_02782_[Lactobacillus]_paracasei
gaacatggatggacctgcggcacattagctagttggtgaggtaacggcccaccaaggcgatgatgcgtagccggcctgagagggtaaacggccacattgggactgagacacggcccaaactcctacgggaggcagcagtagggaattttcgtcaatgggggaaaccctgaacgagcaatgccgcgtgagtgaagaaggtcttcggatcgtaaagctctgttgtaagtgaagaacggctcatagaggaaatgctatgggagtgacggtagcttaccagaaagccacggctaactacgtgccagcagccgcggtaatacgtaggtggcaagcgttatccggaatcattgggcgtaaagggtgcgtaggtggcgtactaagtctgtagtaaaaggcaatggctcaaccattgtaagctatggaaactggtatgctggagtgcagaagagggcgatggaattccatgtgtagcggtaaaatgcgtagatatatggaggaacaccagtggcgaaggcggtcgcctggtctgtaactgacactgaggcacgaaagcgtggggagcaaataggattagataccctagtagtccacgccgtaaacgatgagaactaagtgttggaggaattcagtgctgcagttaacgcaataagttctccgcctggggagtatgcacgcaagtgtgaaactcaaaggaattgacgggggcccgcacaagcggtggagtatgtggtttaattcgaagcaacgcgaagaaccttaccaggccttgacatggaaacaaataccctagagatagggggataattatggatcacacaggtggtgcatggttgtcgtcagctcgtgtcgtgagatgttgggttaagtcccgcaacgagcgcaacccttgtcgcatgttaccagcatcaagttggggactcatgcgagactgccggtgacaaaccggaggaaggtggggatgacgtcaaatcatcatgccccttatggcctgggctacacacgtactacaatggcggccacaaagagcagcgacacagtgatgtgaagcgaatctcataaaggtcgtctcagttcggattgaagtctgcaactcgacttcatgaagtcggaatcgctagtaatcgcagatcagcatgctgcggtgaatacgttctcgggccttgtacacaccgcccgtcaaaccatgggagtcagtaatacccgaagccggtggcataaccgtaaggagtgagccgtcgaaggtaggaccgatgactggggttaagtcgtaacaaggtatccctacgggaacgtggggatggatcacctccttt

SEQ ID NO: 888 - DNA, 1526 bp, artificial sequence
  GCF_002091995.1_01433_[Lactobacillus]_paracasei
acggagagtttgatcctggctcaggacgaacgctggcggcgtgcttaacacatgcaagtcgaacgatgaaccaccttcgggtggggattagtggcgaacgggtgagtaacacgtgggcaatctgcccttcactctgggacaagccctggaaacggggtctaataccggatactgacctgccaaggcatcttggcgggtcgaaagctccggcggtgaaggatgagcccgcggcctatcagcttgttggtgaggtaatggctcaccaaggcgacgacgggtagccggcctgagagggcgaccggccacactgggactgagacacggcccagactcctacgggaggcagcagtggggaatattgcacaatgggcgaaagcctgatgcagcgacgccgcgtgagggatgacggccttcgggttgtaaacctctttcagcagggaagaagcgaaagtgacggtacctgcagaagaagcgccggctaactacgtgccagcagccgcggtaatacgtagggcgcaagcgttgtccggaattattgggcgtaaagagctcgtaggcggcttgtcacgtcggttgtgaaagcccggggcttaaccccgggtctgcagtcgatacgggcaggctagagttcggtaggggagatcggaattcctggtgtagcggtgaaatgcgcagatatcaggaggaacaccggtggcgaaggcggatctctgggccgatactgacgctgaggagcgaaagcgtggggagcgaacaggattagataccctggtagtccacgccgtaaacggtgggcactaggtgtgggcaacattccacgttgtccgtgccgcagctaacgcattaagtgccccgcctggggagtacggccgcaaggctaaaactcaaaggaattgacgggggcccgcacaagcggcggagcatgtggcttaattcgacgcaacgcgaagaaccttaccaaggcttgacatacaccggaaagcatcagagatggtgccccccttgtggtcggtgtacaggtggtgcatggctgtcgtcagctcgtgtcgtgagatgttgggttaagtcccgcaacgagcgcaacccttgtcccgtgttgccagcaagcccttcggggtgttggggactcacgggagaccgccggggtcaactcggaggaaggtggggacgacgtcaagtcatcatgccccttatgtcttgggctgcacacgtgctacaatggccggtacaatgagctgcgataccgcaaggtggagcgaatctcaaaaagccggtctcagttcggattggggtctgcaactcgaccccatgaagtcggagtcgctagtaatcgcagatcagcattgctgcggtgaatacgttcccgggccttgtacacaccgcccgtcacgtcacgaaagtcggtaacacccgaagccggtggcccaaccccttgtgggagggagctgtcgaaggtgggactggcgattgggacgaagtcgtaacaaggtagccgtaccggaaggtgcggctggatcacctccttt

SEQ ID NO: 889 - DNA, 1531 bp, artificial sequence
  GCF_002091995.1_01480_[Lactobacillus]_paracasei
tgaagagtttgatcatggctcagattgaacgctggcggcaggcctaacacatgcaagtcgagcggaaacgatgggagcttgctcccaggcgtcgagcggcggacgggtgagtaatgcatgggaatctgcccggtagtgggggataactcggggaaactcgagctaataccgcgtacgtcctacgggagaaagtggggtttcggcctcacgctatcggatgagcccatgtcggattagctagttggtgaagtaatggtttaccaaggcgacgatccgtagctggtctgagaggatgatcagccacaccggaactgagacacggtccggactcctacgggaggcagcagtggggaatattggacaatgggggcaaccctgatccagccatgccgcgtgtgtgaagaaggccctcgggttgtaaagcactttcagtagggaggaaagctgcgtcgttaataccggcgtagtgtgacgttacctacagaagaagcaccggcaaactccgtgccagcagccgcggtaatacggagggtgcgagcgttaatcggaattactgggcgtaaagcgcgcgtaggcggtttattaagccagatgtgaaagccccgggcttaacctgggaactgcatctggaactggtaagctagagtacagtagaggaaggtagaattccacgtgtagcggtgaaatgcgtagatatgtggaggaataccagtggcgaaggcggccttctggactgatactgacgctgaggtgcgaaagcgtggggagcaaacaggattagataccctggtagtccacgccgtaaacgatgtcgactagccgttgggaaccttgagttcttagtggcgcagttaacgcactaagtcgaccgcctggggagtacggccgcaaggttaaaactcaaatgaattgacgggggcccgcacaagcggtggagcatgtggtttaattcgatgcaacgcgaagaaccttacctactcttgacatccagagaactttccagagatggattggtgccttcgggaactctgtgacaggtgctgcatggctgtcgtcagctcgtgttgtgaaatgttgggttaagtcccgtaacgagcgcaacccctatccttatttgccagcgattcggtcgggaactctaaggagactgccggtgacaaaccggaggaaggtggggacgacgtcaagtcatcatggcccttacgagtagggctacacacgtgctacaatggccggtacaacaggttgctaacccgcgagggggagctaatccgcaaaaaccggtcgtagtccggattggagtctgcaactcgactccatgaagtcggaatcgctagtaatcgcgaatcagaatgtcgcggtgaatacgttcccgggccttgtacacaccgcccgtcacaccatgggagttgattgcaccagaagtagctagcttaaccttcgggagggcggttaccacggtgtggttaatgactggggtgaagtcgtaacaaggtagccgtaggggaacctgcggctggatcacctcctt

SEQ ID NO: 890 - DNA, 1522 bp, artificial sequence
  GCF_002091995.1_01499_[Lactobacillus]_paracasei
atgaagagtttgatcctggctcaggatgaacgctagcggcaggcctaacacatgcaagtcgaacggtaacagggaaaagcttgcttttccgctgacgagtggcgcacgggtgcgtaacgcgtatggaacctaccctttacagggggatagcccggagaaatccggattaataccccgtagtattatgatttggcatcggattataattaaagtttcggcggtagaggatggccatgcgtcctattagttagatggtgaggtaacggctcaccatggcatcgataggtaggggccctgagagggggatcccccacactggtactgagacacggaccagactcctacgggaggcagcagtgaggaatattggacaatggtcgagagactgatccagccatgccgcgtgcaggaagacggccctacgggttgtaaactgcttttgtacgggaagaataatgcccacgtgtgggcagatgacggtaccgtacgaataaggaccggctaactccgtgccagcagccgcggtaatacggagggtccgagcgttatccggaatcattgggtttaaagggtccgcaggcggatcagtaagtcagaggtgaaagtttgcagctcaactgtaaaattgcctttgatactgctggtcttgagttacgatgaagtggctggaatatgtggtgtagcggtgaaatgcatagatatcacatagaacaccgattgcgaaggcaggtcactaatcgccaactgacgctgatggacgaaagcgtggggagcgaacgggattagataccccggtagtccacgccgtaaacgatggacactagctgttgggcctctggttcagtggctaagcgaaagtgataagtgtcccacctggggagtacgtcggcaacgatgaaactcaaaggaattgacgggggcccgcacaagcggtggagcatgtggtttaattcgatgatacgcgaggaaccttaccagggcttaaatgtaatgggacaggcttagagataggcttttcttcggactcattacaaggtgctgcatggttgtcgtcagctcgtgccgtgaggtgtcaggttaagtcctataacgagcgcaacccctatcgttagttgccagcgggtaaagccggggactctaacgaaactgccggtgcaaaccgtgaggaaggtggggatgacgtcaaatcatcacggcccttacgtcctgggctacacacgtgctacaatggccggtacaatgagcagccactgcgcgagcaggagcgaatctataaaaccggtcacagttcggatcggggtctgcaacccgaccccgtgaagctggaatcgctagtaatcggatatcagccatgatccggtgaatacgttcccgggccttgtacacaccgcccgtcaagccatggaagccgggagtgcctgaagtccgtcaccgcaaggagcggcctagggcaagatcggtaactagggctaagtcgtaacaaggtagccgtaccggaaggtgcggctggaacacctccttt

SEQ ID NO: 891 - DNA, 1541 bp, artificial sequence
  GCF_002091995.1_02128_[Lactobacillus]_paracasei
ttgaagagtttgatcatggctcagattgaacgctggcggcaggcctaacacatgcaagtcgagcggcagcacagaggaacttgttccttgggtggcgagcggcggacgggtgagtaatgcctaggaaattgccctgatgtgggggataaccattggaaacgatggctaataccgcatgatgcctacgggccaaagagggggaccttcgggcctctcgcgtcaggatatgcctaggtgggattagctagttggtgaggtaatggctcaccaaggcgacgatccctagctggtctgagaggatgatcagccacactggaactgagacacggtccagactcctacgggaggcagcagtggggaatattgcacaatgggcgcaagcctgatgcagccatgccgcgtgtatgaagaaggccttcgggttgtaaagtactttcagtcgtgaggaaggtggtgttgttaatagcagcatcatttgacgttagcgacagaagaagcaccggctaactccgtgccagcagccgcggtaatacggagggtgcgagcgttaatcggaattactgggcgtaaagcgcatgcaggtggtggattaagtcagatgtgaaagcccggggctcaacctcggaaccgcatttgaaactggttcactagagtactgtagaggggggtagaatttcaggtgtagcggtgaaatgcgtagagatctgaaggaataccggtggcgaaggcggccccctggacagatactgacactcagatgcgaaagcgtggggagcaaacaggattagataccctggtagtccacgccgtaaacgatgtctacttggaggttgtggccttgagccgtggctttcggagctaacgcgttaagtagaccgcctggggagtacggtcgcaagattaaaactcaaatgaattgacgggggcccgcacaagcggtggagcatgtggtttaattcgatgcaacgcgaagaaccttacctactcttgacatccagagaagccagcggagacgcaggtgtgccttcgggaactctgagacaggtgctgcatggctgtcgtcagctcgtgttgtgaaatgttgggttaagtcccgcaacgagcgcaacccttatccttgtttgccagcgagtcatgtcgggaactccagggagactgccggtgataaaccggaggaaggtggggacgacgtcaagtcatcatggcccttacgagtagggctacacacgtgctacaatggcgcatacagagggcagcaagctagcgatagtgagcgaatcccaaaaagtgcgtcgtagtccggattggagtctgcaactcgactccatgaagtcggaatcgctagtaatcgtagatcagaatgctacggtgaatacgttcccgggccttgtacacaccgcccgtcacaccatgggagtgggctgcaaaagaagtgggtagtttaacctttcggggaggacgctcaccactttgtggttcatgactggggtgaagtcgtaacaaggtagcgctaggggaacctggcgctggatcacctcctt

SEQ ID NO: 892 - DNA, 1285 bp, artificial sequence
  GCF_002091995.1_02521_[Lactobacillus]_paracasei
  misc_feature (347)..(347): n is a, c, g, or t
tattagctagtaggtatggtaacggcatacctaggcgacgataggtaggggtcctgagagggagatcccccacactggtactgagacacggaccagactcctacgggaggcagcagtgaggaatattggacaatggaggcaactctgatccagccatgccgcgtgcaggaagactgccctatgggttgtaaactgcttttatataggaagaaaaagaatcacgtgtgatttgttgacggtactatatgaataaggatcggctaactccgtgccagcagccgcggtaatacggaggatccgagcgttatccggaattattgggtttaaagggtccgtaggcgggatantaagtcagcggtgaaagtttgtggctcaaccacgaaattgccgttgatactgttgttcttgagttattgtgaagtggttagaatgtgtagtgtagcggtgaaatgcatagatattacacagaataccgattgcgaaggcagatcactaacaatacactgacgctgatggacgaaagcgtaggtagcgaacaggattagataccctggtagtctacgcagtaaacgatggttactagctgttcggtctaattgaggattgagtggttaagcgaaagtgataagtaacccacctggggagtacgttcgcaagaatgaaactcaaaggaattgacgggggcccgcacaagcggtggagcatgtggtttaattcgatgatacgcgaggaaccttaccagggcttaaatgcagtttgacagggttggaaacaactttttcttcggacaaattgcaaggtgctgcatggttgtcgtcagctcgtgccgtgaggtgtcaggttaagtcctataacgagcgcaacccctttggttagttgccagcgagtcatgtcgggaactctagccatactgccagtgtaaactgtgaggaaggtggggatgacgtcaaatcatcacggcccttacgtcctgggctacacacgtgctacaatggtagggacagagagcagccactgggtgaccaggagcgaatctacaaaccctatcacagttcggatcggagtctgcaactcgactccgtgaagctggaatcgctagtaatcgcatatcagccatgatgcggtgaatacgttcccgggccttgtacacaccgcccgtcaagccatggaagctgggggtacctgaagtcggtcgccgtgaggagccgcctagggtaaaactggtaactggggctaagtcgtaacaaggtagccgtaccggaaggtgcggctggaatacctcctt

SEQ ID NO: 893 - DNA, 1536 bp, artificial sequence
  GCF_002148875.1_00541_[Lactobacillus]_paracasei
ttgaagagtttgatcatggctcagattgaacgctggcggcaggcctaacacatgcaagtcgagcggtagcacagagagcttgctctcgggtgacgagcggcggacgggtgagtaatgtctgggaaactgcctgatggagggggataactactggaaacggtagctaataccgcataacgtcgcaagaccaaagtgggggaccttcgggcctcatgccatcagatgtgcccagatgggattagctagtaggtggggtaatggctcacctaggcgacgatccctagctggtctgagaggatgaccagccacactggaactgagacacggtccagactcctacgggaggcagcagtggggaatattgcacaatgggcgcaagcctgatgcagccatgccgcgtgtatgaagaaggccttcgggttgtaaagtactttcagcgaggaggaaggcattaaggttaataaccttagtgattgacgttactcgcagaagaagcaccggctaactccgtgccagcagccgcggtaatacggagggtgcaagcgttaatcggaattactgggcgtaaagcgcacgcaggcggtctgttaagtcagatgtgaaatccccgggctcaacctgggaactgcatttgaaactggcaggcttgagtcttgtagaggggggtagaattccaggtgtagcggtgaaatgcgtagagatctggaggaataccggtggcgaaggcggccccctggacaaagactgacgctcaggtgcgaaagcgtggggagcaaacaggattagataccctggtagtccacgctgtaaacgatgtcgacttggaggttgttcccttgaggagtggcttccggagctaacgcgttaagtcgaccgcctggggagtacggccgcaaggttaaaactcaaatgaattgacgggggcccgcacaagcggtggagcatgtggtttaattcgatgcaacgcgaagaaccttacctactcttgacatccagagaacttagcagagatgctttggtgccttcgggaactctgagacaggtgctgcatggctgtcgtcagctcgtgttgtgaaatgttgggttaagtcccgcaacgagcgcaacccttatcctttgttgccagcgattcggtcgggaactcaaaggagactgccagtgataaactggaggaaggtggggatgacgtcaagtcatcatggcccttacgagtagggctacacacgtgctacaatggcatatacaaagagaagcgacctcgcgagagcaagcggacctcataaagtatgtcgtagtccggattggagtctgcaactcgactccatgaagtcggaatcgctagtaatcgtagatcagaatgctacggtgaatacgttcccgggccttgtacacaccgcccgtcacaccatgggagtgggttgcaaaagaagtaggtagcttaaccttcgggagagcgcttaccactttgtgattcatgactggggtgaagtcgtaacaaggtaaccgtaggggaacctgcggttggatcacctcctt

SEQ ID NO: 894 - DNA, 1524 bp, artificial sequence
  GCF_002148875.1_00632_[Lactobacillus]_paracasei
acggagagtttgatcctggctcaggacgaacgctggcggcgtgcttaacacatgcaagtcgaacgatgaaccacttcggtggggattagtggcgaacgggtgagtaacacgtgggcaatctgccctgcactctgggacaagccctggaaacggggtctaataccggatactgaccgtcacgggcatccgtgaaggtcgaaagctccggcggtgcaggatgagcccgcggcctatcagcttgttggtgaggtaacggctcaccaaggcgacgacgggtagccggcctgagagggcgaccggccacactgggactgagacacggcccagactcctacgggaggcagcagtggggaatattgcacaatgggcgaaagcctgatgcagcgacgccgcgtgagggatgacggccttcgggttgtaaacctctttcagcagggaagaagcgaaagtgacggtacctgcagaagaagcgccggctaactacgtgccagcagccgcggtaatacgtagggcgcgagcgttgtccggaattattgggcgtaaagagctcgtaggcggcttgtcacgtcggttgtgaaagcccggggcttaaccccgggtctgcagtcgatacgggcaggctagagttcggtaggggagatcggaattcctggtgtagcggtgaaatgcgcagatatcaggaggaacaccggtggcgaaggcggatctctgggccgatactgacgctgaggagcgaaagcgtggggagcgaacaggattagataccctggtagtccacgccgtaaacggtgggcactaggtgtgggcgacattccacgtcgtccgtgccgcagctaacgcattaagtgccccgcctggggagtacggccgcaaggctaaaactcaaaggaattgacgggggcccgcacaagcggcggagcatgtggcttaattcgacgcaacgcgaagaaccttaccaaggcttgacatacaccggaaagcatcagagatggtgccccccttgtggtcggtgtacaggtggtgcatggctgtcgtcagctcgtgtcgtgagatgttgggttaagtcccgcaacgagcgcaacccttgtcccgtgttgccagcaagcccttcggggtgttggggactcacgggagaccgccggggtcaactcggaggaaggtggggacgacgtcaagtcatcatgccccttatgtcttgggctgcacacgtgctacaatggccggtacaatgagctgcgataccgcgaggtggagcgaatctcaaaaagccggtctcagttcggattggggtctgcaactcgaccccatgaagtcggagtcgctagtaatcgcagatcagcattgctgcggtgaatacgttcccgggccttgtacacaccgcccgtcacgtcacgaaagtcggtaacacccgaagccggtggcccaaccccttgtgggagggagctgtcgaaggtgggactggcgattgggacgaagtcgtaacaaggtagccgtaccggaaggtgcggctggatcacctccttt

SEQ ID NO: 895 - DNA, 1521 bp, Artificial Sequence
  GCF_002442835.1_00397_[Lactobacillus]_paracasei
tacggagagtttgatcctggctcaggacgaacgctggcggcgtgcttaacacatgcaagtcgaacgatgaagcccagcttgctgggtggattagtggcgaacgggtgagtaacacgtgagtaacctgcccttgactctgggataagcgctggaaacggcgtctaataccggatacgacctgccccggcatcgggtgcgggtggaaagtttttcggtcaaggatggactcgcggcctatcagctagttggtgaggtaatggctcaccaaggcgacgacgggtagccggcctgagagggtgaccggccacactgggactgagacacggcccagactcctacgggaggcagcagtggggaatattgcacaatgggcgaaagcctgatgcagcaacgccgcgtgggggatgacggccttcgggttgtaaacctcttttagtagggaagaagggcttcggcttgacggtacctgcagaaaaagcaccggctaactacgtgccagcagccgcggtaatacgtagggtgcaagcgttgtccggaattattgggcgtaaagagctcgtaggcggtttgtcgcgtctgctgtgaaaacccgaggctcaacctcgggcctgcagtgggtacgggcagactagagtgcggtaggggagaatggaattcctggtgtagcggtggaatgcgcagatatcaggaggaacaccgatggcgaaggcagttctctgggccgttactgacgctgaggagcgaaagcgtggggagcgaacaggattagataccctggtagtccacgccgtaaacgttgggaactagatgtggggacctttccacggtctccgtgtcgcagctaacgcattaagttccccgcctggggagtacggccgcaaggctaaaactcaaaggaattgacgggggcccgcacaagcggcggagcatgcggattaattcgatgcaacgcgaagaaccttaccaaggcttgacatataccggaaacttccagaaatggttgccccgcaaggtcggtatacaggtggtgcatggttgtcgtcagctcgtgtcgtgagatgttgggttaagtcccgcaacgagcgcaaccctcgttctatgttgccagcacgtcatggtgggaactcataggagactgccggggtcaactcggaggaaggtggggatgacgtcaaatcatcatgccccttatgtcttgggcttcacgcatgctacaatggccggtacaaagggctgcgataccgtaaggtggagcgaatcccaaaaagccggtctcagttcggattgaggtctgcaactcgacctcatgaagtcggagtcgctagtaatcgcagatcagcaacgctgcggtgaatacgttcccgggccttgtacacaccgcccgtcaagtcatgaaagtcggtaacacccgaagccagtggcctaaccgcaaggagggagctgtcgaaggtgggatcggtgattaggactaagtcgtaacaaggtagccgtaccggaaggtgcggctggatcacctccttt

SEQ ID NO: 896 - DNA, 1458 bp, Artificial Sequence
  GCF_002442835.1_00439_[Lactobacillus]_paracasei
cttgagagtttgatcctggctcagaacgaacgctggcggcaggcttaacacatgcaagtcgagcgagatcttcggatctagcggcggacgggtgagtaacgcgtgggaacgtgccctttgctacggaatagtcccgggaaactgggtttaataccgtatacgcccttcgggggaaagatttatcggcaaaggatcggcccgcgttggattaggtagttggtggggtaacggcctaccaagccgacgatccatagctggtttgagaggatgatcagccacactgggactgagacacggcccagactcctacgggaggcagcagtggggaatcttagacaatgggggcaaccctgatctagccatgccgcgtgagtgatgaaggccttagggttgtaaagctctttcagctgggaagataatgacggtaccagcagaagaagccccggctaactccgtgccagcagccgcggtaatacggagggggctagcgttgttcggaattactgggcgtaaagcgcacgtaggcggatcggaaagttgggggtgaaatcccggggctcaacctcggaactgcctccaaaactatcggtcttgagttcgagagaggtgagtggaattccgagtgtagaggtgaaattcgtagatattcggaggaacaccagtggcgaaggcggctcactggctcgatactgacgctgaggtgcgaaagcgtggggagcaaacaggattagataccctggtagtccacgccgtaaacgatgaatgccagtcgtcgggttgcatgcaattcggtgacacacctaacggattaagcattccgcctggggagtacggtcgcaagattaaaactcaaaggaattgacgggggcccgcacaagcggtggagcatgtggtttaattcgaagcaacgcgcagaaccttaccaacccttgacatggcaggaccgtcggagagatccgtctttctcgtaagagacctgcacacaggtgctgcatggctgtcgtcagctcgtgtcgtgagatgttcggttaagtccggcaacgagcgcaacccacgtccctagttgccagcattcagttgggcactctatggaaactgccgatgataagtcggaggaaggtgtggatgacgtcaagtcctcatggcccttacgggttgggctacacacgtgctacaatggtggtgacagtgggttaatccccaaaagccatctcagttcggattgtcctctgcaactcgagggcatgaagttggaatcgctagtaatcgcggaacagcatgccgcggtgaatacgttcccgggccttgtacacaccgcccgtcacaccatgggagttggttctacccgacgacgctgcgctaaccttcggggggcaggcggccacggtaggatcagcgactggggtgaagtcgtaacaaggtagccgtaggggaacctgcggctggatcacctccttt

SEQ ID NO: 897 - DNA, 1532 bp, artificial sequence
  GCF_002442835.1_01507_[Lactobacillus]_paracasei
tgaagagtttgatcatggctcagattgaacgctggcggcaggcctaacacatgcaagtcgagcggatgaagggagcttgctcctggattcagcggcggacgggtgagtaatgcctaggaatctgcctggtagtgggggacaacgtttcgaaaggaacgctaataccgcatacgtcctacgggagaaagcaggggaccttcgggccttgcgctatcagatgagcctaggtcggattagcttgttggtgaggtaatggctcaccaaggcgacgatccgtaactggtctgagaggatgatcagtcacactggaactgagacacggtccagactcctacgggaggcagcagtggggaatattggacaatgggcgcaagcctgatccagccatgccgcgtgtgtgaagaaggtcttcggattgtaaagcactttaagttgggaggaagggcagtagattaatactctgctgttttgacgttaccaacagaataagcaccggctaactctgtgccagcagccgcggtaatacagagggtgcaagcgttaatcggaattactgggcgtaaagcgcgcgtaggcggctaggtaagatgggtgtgaaatccccgggctcaacctgggaactgcatccataactgcctggctagagtacagtagagggtggtggaatttcctgtgtagcggtgaaatgcgtagatataggaaggaacaccagtggcgaaggcgaccacctggactgatactgacgctgaggtgcgaaagcgtggggagcaaacaggattagataccctggtagtccacgccgtaaacgatgtcaactagccgttggaatccttgagattttagtggcgcagctaacgcactaagttgaccgcctggggagtacggccgcaaggttaaaactcaaatgaattgacgggggcccgcacaagcggtggagcatgtggtttaattcgaagcaacgcgaagaaccttacctggccttgacatgctgagaactttccagagatggattggtgccttcgggaactcagacacaggtgctgcatggctgtcgtcagctcgtgtcgtgagatgttgggttaagtcccgtaacgagcgcaacccttgtccttagttaccagcacgttatggtgggcactctaaggagactgccggtgacaaaccggaggaaggtggggatgacgtcaagtcatcatggcccttacggccagggctacacacgtgctacaatgggcggtacagagggttgccaagccgcgaggtggagctaatcccttaaaaccgttcgtagtccggattggagtctgcaactcgactccatgaagtcggaatcgctagtaatcgcgaatcagaatgtcgcggtgaatacgttcccgggccttgtacacaccgcccgtcacaccatgggagtgggttgcaccagaagtagctagtctaaccttcgggaggacggttaccacggtgtgattcatgactggggtgaagtcgtaacaaggtagccgtaggggaacctgcggctggatcacctcctt

SEQ ID NO: 898 - DNA, 1538 bp, artificial sequence
  GCF_002442835.1_02154_[Lactobacillus]_paracasei
ttgaagagtttgatcatggctcagattgaacgctggcggcaggcctaacacatgcaagtcgaacggtaacaggaagcagcttgctgcttcgctgacgagtggcggacgggtgagtaatgtctgggaaactgcctgatggagggggataactactggaaacggtagctaataccgcataacgtcgcaagaccaaagagggggaccttcgggcctcttgccatcggatgtgcccagatgggattagctagtaggtggggtaacggctcacctaggcgacgatccctagctggtctgagaggatgaccagccacactggaactgagacacggtccagactcctacgggaggcagcagtggggaatattgcacaatgggcgcaagcctgatgcagccatgccgcgtgtatgaagaaggccttcgggttgtaaagtactttcagcggggaggaaggcgacagggttaataaccctgtcgattgacgttacccgcagaagaagcaccggctaactccgtgccagcagccgcggtaatacggagggtgcaagcgttaatcggaattactgggcgtaaagcgcacgcaggcggtctgtcaagtcggatgtgaaatccccgggctcaacctgggaactgcattcgaaactggcaggctagagtcttgtagaggggggtagaattccaggtgtagcggtgaaatgcgtagagatctggaggaataccggtggcgaaggcggccccctggacaaagactgacgctcaggtgcgaaagcgtggggagcaaacaggattagataccctggtagtccacgccgtaaacgatgtcgacttggaggttgtgcccttgaggcgtggcttccggagctaacgcgttaagtcgaccgcctggggagtacggccgcaaggttaaaactcaaatgaattgacgggggcccgcacaagcggtggagcatgtggtttaattcgatgcaacgcgaagaaccttacctactcttgacatccagagaacttagcagagatgctttggtgccttcgggaactctgagacaggtgctgcatggctgtcgtcagctcgtgttgtgaaatgttgggttaagtcccgcaacgagcgcaacccttatcctttgttgccagcggttaggccgggaactcaaaggagactgccagtgataaactggaggaaggtggggatgacgtcaagtcatcatggcccttacgagtagggctacacacgtgctacaatggcgcatacaaagagaagcgacctcgcgagagcaagcggacctcataaagtgcgtcgtagtccggattggagtctgcaactcgactccatgaagtcggaatcgctagtaatcgtggatcagaatgccacggtgaatacgttcccgggccttgtacacaccgcccgtcacaccatgggagtgggttgcaaaagaagtaggtagcttaaccttcgggagggcgcttaccactttgtgattcatgactggggtgaagtcgtaacaaggtaaccgtaggggaacctgcggttggatcacctcctt

SEQ ID NO: 899 - DNA, 1505 bp, artificial sequence
  GCF_002442835.1_02686_[Lactobacillus]_paracasei
tatggagagtttgatcctggctcagggtgaacgctggcggcgtgcttaagacatgcaagtcgaacgatcgtcttcggacggtagtggcgcacgggtgagtaacgcgtaactgacctgcccccaagttcggaataacttcccgaaagggaagctaataccggatgtgctgtcccctcctgtggggccagtaaaggcttgaccgcttggggatggggttgcgttccatcagctagatggtggggtaaaggcctaccatggcgacgacggataaccggcctgagagggtggccggtcacaggggcactgagacacgggtcccactcctacgggaggcagcagttaggaatcttccccaatggacgaaagtctgagggagcgacgccgcgtgagggatgaaggttttcggatcgtaaacctctgaatcagggacgaaagacgctttatgcgggatgacggtacctgagtaatagcaccggctaactccgtgccagcagccgcggtaatacggagggtgcaagcgttacccggaatcactgggcgtaaagggcgtgtaggcggaaggttaagtccgactttaaagaccgaggctcaacctcggaagtgggttggatactggcattcttgacctctggagagagaaccggaattcctggtgtagcggtggaatgcgtagataccaggaggaacaccgatggcgaaggcaggttcttggacagaaggtgacgctgaggcgcgaaagtgtggggagcgaaccggattagatacccgggtagtccacaccctaaacgatgtacgttggcttatggcgggatgccgtcatgggcgaagctaacgcgataaacgtaccgcctgggaagtacggccgcaaggttgaaactcaaaggaattgacgggggcccgcacaagcggtggagcatgtggtttaattcgaagcaacgcgaagaaccttaccaggtcttgacatccacagaacccctgagagatcagggggtgcccttcggggaactgtgagacaggtgctgcatggctgtcgtcagctcgtgtcgtgagatgttgggttaagtcccgcaacgagcgcaacccttgccttgtgttgctaccggttcggccgagcactcacgagggactgcctgtgaaagcaggaggaaggcggggatgacgtctagtcagcatggtccttacgacctgggcgacacacgtgctacaatggatggtacaacgcgcagccaactcgtgagagtgagcgaatcgctgaaagccatccccagttcagatcggagtctgcaactcgactccgtgaagttggaatcgctagtaatcgcgggtcagcataccgcggtgaatacgttcccgggccttgtacacaccgcccgtcacaccatgggagtacgttgcagttgaaaccgccgggagccgcaaggcaggcgtctagactgtggcgcatgactggggtgaagtcgtaacaaggtaactgtaccggaaggtgcggttggatcacctccttt

SEQ ID NO: 900 - DNA, 1536 bp, artificial sequence
  GCF_002762235.1_00704_[Lactobacillus]_paracasei
ttgaagagtttgatcatggctcagattgaacgctggcggcaggcctaacacatgcaagtcgaacggtagcacagagagcttgctctcgggtgacgagtggcggacgggtgagtaatgtctgggaaactgcctgatggagggggataactactggaaacggtagctaataccgcataacgtcgcaagaccaaagagggggaccttcgggcctcttgccatcagatgtgcccagatgggattagctagtaggtggggtaatggctcacctaggcgacgatccctagctggtctgagaggatgaccagccacactggaactgagacacggtccagactcctacgggaggcagcagtggggaatattgcacaatgggcgcaagcctgatgcagccatgccgcgtgtatgaagaaggccttcgggttgtaaagtactttcagcggggaggaaggtgttgtggttaataaccgcagcaattgacgttacccgcagaagaagcaccggctaactccgtgccagcagccgcggtaatacggagggtgcaagcgttaatcggaattactgggcgtaaagcgcacgcaggcggtctgtcaagtcggatgtgaaatccccgggctcaacctgggaactgcattcgaaactggcaggctagagtcttgtagaggggggtagaattccaggtgtagcggtgaaatgcgtagagatctggaggaataccggtggcgaaggcggccccctggacaaagactgacgctcaggtgcgaaagcgtggggagcaaacaggattagataccctggtagtccacgccgtaaacgatgtcgacttggaggttgttcccttgaggagtggcttccggagctaacgcgttaagtcgaccgcctggggagtacggccgcaaggttaaaactcaaatgaattgacgggggcccgcacaagcggtggagcatgtggtttaattcgatgcaacgcgaagaaccttacctactcttgacatccagagaactttccagagatggattggtgccttcgggaactctgagacaggtgctgcatggctgtcgtcagctcgtgttgtgaaatgttgggttaagtcccgcaacgagcgcaacccttatcctttgttgccagcggttaggccgggaactcaaaggagactgccagtgataaactggaggaaggtggggatgacgtcaagtcatcatggcccttacgagtagggctacacacgtgctacaatggcgcatacaaagagaagcgacctcgcgagagcaagcggacctcataaagtgcgtcgtagtccggattggagtctgcaactcgactccatgaagtcggaatcgctagtaatcgtagatcagaatgctacggtgaatacgttcccgggccttgtacacaccgcccgtcacaccatgggagtgggttgcaaaagaagtaggtagcttaaccttcgggagggcgcttaccactttgtgattcatgactggggtgaagtcgtaacaaggtaaccgtaggggaacctgcggttggatcacctcctt

SEQ ID NO: 901 - DNA, 1536 bp, artificial sequence
  GCF_002762235.1_01341_[Lactobacillus]_paracasei
ttgaagagtttgatcatggctcagattgaacgctggcggcaggcctaacacatgcaagtcgaacggtagcacagagagcttgctctcgggtgacgagtggcggacgggtgagtaatgtctgggaaactgcctgatggagggggataactactggaaacggtagctaataccgcataacgtcgcaagaccaaagagggggaccttcgggcctcttgccatcagatgtgcccagatgggattagctagtaggtggggtaatggctcacctaggcgacgatccctagctggtctgagaggatgaccagccacactggaactgagacacggtccagactcctacgggaggcagcagtggggaatattgcacaatgggcgcaagcctgatgcagccatgccgcgtgtatgaagaaggccttcgggttgtaaagtactttcagcggggaggaaggtgttgtggttaataaccgcagcaattgacgttacccgcagaagaagcaccggctaactccgtgccagcagccgcggtaatacggagggtgcaagcgttaatcggaattactgggcgtaaagcgcacgcaggcggtctgtcaagtcggatgtgaaatccccgggctcaacctgggaactgcattcgaaactggcaggctagagtcttgtagaggggggtagaattccaggtgtagcggtgaaatgcgtagagatctggaggaataccggtggcgaaggcggccccctggacaaagactgacgctcaggtgcgaaagcgtggggagcaaacaggattagataccctggtagtccacgccgtaaacgatgtcgacttggaggttgttcccttgaggagtggcttccggagctaacgcgttaagtcgaccgcctggggagtacggccgcaaggttaaaactcaaatgaattgacgggggcccgcacaagcggtggagcatgtggtttaattcgatgcaacgcgaagaaccttacctactcttgacatccagagaacttagcagagatgctttggtgccttcgggaactctgagacaggtgctgcatggctgtcgtcagctcgtgttgtgaaatgttgggttaagtcccgcaacgagcgcaacccttatcctttgttgccagcggttaggccgggaactcaaaggagactgccagtgataaactggaggaaggtggggatgacgtcaagtcatcatggcccttacgagtagggctacacacgtgctacaatggcgcatacaaagagaagcgacctcgcgagagcaagcggacctcataaagtgcgtcgtagtccggattggagtctgcaactcgactccatgaagtcggaatcgctagtaatcgtagatcagaatgctacggtgaatacgttcccgggccttgtacacaccgcccgtcacaccatgggagtgggttgcaaaagaagtaggtagcttaaccttcgggagggcgcttaccactttgtgattcatgactggggtgaagtcgtaacaaggtaaccgtaggggaacctgcggttggatcacctcctt

SEQ ID NO: 902 - DNA, 1536 bp, artificial sequence; identical to SEQ ID NO: 901
  GCF_002762235.1_02007_[Lactobacillus]_paracasei

SEQ ID NO: 903 - DNA, 1531 bp, artificial sequence
  GCF_002762235.1_02637_[Lactobacillus]_paracasei
ttgaagagtttgatcatggctcagattgaacgctggcggcaggcctaacacatgcaagtcgaacggtagcacagagagcttgctctcgggtgacgatggcggacgggtgagtaatgtctgggaaactgcctgatggaggggataactactggaaacggtagctaataccgcataacgtcgcaagaccaaagagggggaccttcggcctcttgccatcagatgtgcccagatggattagctagtaggtggggtaacggctcacctaggcgacgatccctagctgtctgagaggatgaccagccacactggaactgagacacggtccagactcctacgggaggcagcagtggggaatattgcacaatgggcgcaagcctgatgcagccatgccgcgtgtatgaagaaggccttcgggttgtaaagtactttcagcggggaggaaggtgttgtggttaataaccacagcaattgacgttacccgcagaagaagcaccggctaactccgtgccagcagccgcggtaatacggagggtgcaagcgttaatcggaattactgggcgtaaagcgcacgcaggcggtctgtcaagtcggatgtgaaatccccgggctcaacctgggaactgcattcgaaactggcaggctagagtcttgtagaggggggtagaattccaggtgtagcggtgaaatgcgtagagatctggaggaataccggtggcgaaggcggccccctggacaaagactgacgctcaggtgcgaaagcgtggggagcaaacaggattagataccctggtagtccacgccgtaaacgatgtcgacttggaggttgttcccttgaggagtggcttccggagctaacgcgttaagtcgaccgcctggggagtacggccgcaaggttaaaactcaaatgaattgacgggggcccgcacaagcggtggagcatgtggtttaattcgatgcaacgcgaagaaccttacctactcttgacatccagagaactttccagagatggattggtgccttcgggaactctgagacaggtgctgcatggctgtcgtcagctcgtgttgtgaaatgttgggttaagtcccgcaacgagcgcaacccttatcctttgttgccagcggttaggccgggaactcaaaggagactgccagtgataaactggaggaaggtggggatgacgtcaagtcatcatggcccttacgagtagggctacacacgtgctacaatggcgcatacaaagagaagcgacctcgcgagagcaagcggacctcataaagtgcgtcgtagtccggattggagtctgcaactcgactccatgaagccggaatcgctagtaatcgtagatcagaatgctacggtgaatacgttcccgggccttgtacacaccgcccgtcacaccatgggagtgggttgcaaaagaagtaggtagcttaaccttcgggagggcgcttaccactttgtgattcatgactggggtgaagtcgtaacaaggtaaccgtaggggaacctgcggttggatcacctcctt

SEQ ID NO: 904 - DNA, 1536 bp, artificial sequence; identical to SEQ ID NO: 901
  GCF_002762235.1_02675_[Lactobacillus]_paracasei

SEQ ID NO: 905 - DNA, 1535 bp, artificial sequence
  GCF_002813615.1_00263_[Lactobacillus]_paracasei
tcggagagtttgatcctggctcaggacgaacgctggcggcgtgcttaacacatgcaagtcgaacggaccgcttgggcgctttgcgtttgggttggttagtggcgaacgggtgagtaacacgtgagtaacctgcccccttcttcgggataacgttcggaaacggatgctaataccgggtatttacctcatgtcgcatggtgtggggtggaaaggttttttctggtgggggatgggctcgcggcctatcagcttgttggtggggtgatggcctaccaaggctttgacgggtaaccggcctgagagggtgaccggtcacattgggactgagatacggcccagactcctacgggaggcagcagtggggaattttgcacaatgggcgaaagcctgatgcagcgacgccgcgtgagggatgacggccttcgggttgtaaacctctttcgctcatggtcaaggctagtttttgttctagttgagggtagtgggtaaagaagcgccggctaactacgtgccagcagccgcggtaatacgtagggcgcgagcgttgtccggaattattgggcgtaaagggcttgtaggcggcttgtcgcgtctgccgtgaaaacccacagcttaactgtgggcttgcggtgggtacgggctggcttgagtgcggtaggggagactggaattcctggtgtagcggtggaatgcgcagatatcaggaggaacaccggtggcgaaggcgggtctctgggccgttactgacgctgaggagcgaaagcgtggggagcgaacaggattagataccctggtagtccacgctgtaaacgttgggcactaggtgtgggggccgcccttggtttctgcgccgtagctaacgctttaagtgccccgcctggggagtacggccgcaaggctaaaactcaaaggaattgacgggggcccgcacaagcggcggagcatgcggattaattcgatgcaacgcgaagaaccttaccaaggcttgacatgcaccgcgacactgcagagatgtggtggccttcggggtggtgtgcaggtggtgcatggttgtcgtcagctcgtgtcgtgagatgttgggttaagtcccgcaacgagcgcaacccttgccctatgttgccagcacgttatggtggggactcgtgggggactgccggggttaactcggaggaaggtggggatgacgtcaaatcatcatgccccttatgtcttgggcttcacgcatgctacaatggctggtacagagggttgcgatgctgtgaggcggagcgaatcccttaaagccggtctcagttcggattggggtctgcaactcgaccccatgaaggtggagtcgctagtaatcgcagatcagcaacgctgcggtgaatacgttctcgggccttgtacacaccgcccgtcacgtcacgaaagttggtaacacccgaagcccatggcctaaccgtttggggggagtggtcgaaggtgggattggcgattgggacgaagtcgtaacaaggtagccgtaccggaaggtgcggctggatcacctcctt

SEQ ID NO: 906 - DNA, 1047 bp, artificial sequence
  GCF_002813615.1_00903_[Lactobacillus]_paracasei
ttgacggtactgtgagaataaggatcggctaactccgtgccagcagccgcggtaatacggaggatccaagcgttatccggaatcattgggtttaaagggtccgtaggcggccagataagtcagtggtgaaagcccatcgctcaacgatggaacggccattgatactgtttggcttgaattatttggaagtaactagaatatgtagtgtagcggtgaaatgcttagagattacatggaataccaattgcgaaggcaggttactacaaattgattgacgctgatggacgaaagcgtgggtagcgaacaggattagataccctggtagtccacgccgtaaacgatggatactagctgttgggagcaatctcagtggctaagcgaaagtgataagtatcccacctggggagtacgttcgcaagaatgaaactcaaaggaattgacgggggcccgcacaagcggtggagcatgtggtttaattcgatgatacgcgaggaaccttaccaaggcttaaatgtagattgaccggtttggaaacagacttttcgcaagacaatttacaaggtgctgcatggttgtcgtcagctcgtgccgtgaggtgtcaggttaagtcctataacgagcgcaacccctgttgttagttgccagcgagtcatgtcgggaactctagcaagactgccagtgtaaactgtgaggaaggtggggatgacgtcaaatcatcacggcccttacgccttgggctacacacgtgctacaatggccggtacagagagcagccactacgcaagtaggagcgaatctacaaaaccggtctcagttcggatcggagtctgcaactcgactccgtgaagctggaatcgctagtaatcggatatcagccatgatccggtgaatacgttcccgggccttgtacacaccgcccgtcaagccatggaagctgggggtgcctgaagtcggtgaccgcaaggagctgcctagggtaaaactggtaactagggctaagtcgtaacaaggtagccgtaccggaaggtgcggctggaacacctcctt

SEQ ID NO: 907 - DNA, 1574 bp, artificial sequence
  GCF_002813615.1_00942_[Lactobacillus]_paracasei
tatgagagtttgatcctggctcaggatgaacgccggcggtgtgcctaatacatgcaagtcgaacgcgttggcccaactgattgaacgtgcttgcacggacttgacgttggtttaccagcgagtggcggacgggtgagtaacacgtaggtaacctgccccaaagcgggggataacatttggaaacagatgctaataccgcataacaatttgaatcgcatgattcaaatttaaaaggtggtttcggctatcactttgggatggacctgcggcgcattagcttgttggtagggtaacggcctaccaaggctgtgatgcgtagccgagttgagagactgatcggccacaatggaactgagacacggtccatactcctacgggaggcagcagtagggaatcttccacaatgggcgcaagcctgatggagcaacaccgcgtgagtgaagaagggtttcggctcgtaaagctctgttgttagagaagaacgtgcgtgagagcaactgttcacgcagtgacggtatctaaccagaaagtcacggctaactacgtgccagcagccgcggtaatacgtaggtggcaagcgttatccggatttattgggcgtaaagcgagcgcaggcggtttgataagtctgatgtgaaagcctttggcttaaccaaagaagtgcatcggaaactgtcagacttgagtgcagaagaggacagtggaactccatgtgtagcggtggaatgcgtagatatatggaagaacaccagtggcgaaggcggctgtctggtctgcaactgacgctgaggctcgaaagcatgggtagcgaacaggattagataccctggtagtccatgccgtaaacgatgagtgctaggtgttggagggtttccgcccttcagtgccgcagctaacgcattaagcactccgcctggggagtacgaccgcaaggttgaaactcaaaggaattgacgggggcccgcacaagcggtggagcatgtggtttaattcgaagctacgcgaagaaccttaccaggtcttgacatcttgcgccaaccctagagatagggcgtttccttcgggaacgcaatgacaggtggtgcatggtcgtcgtcagctcgtgtcgtgagatgttgggttaagtcccgcaacgagcgcaacccttgttactagttgccagcattcagttgggcactctagtgagactgccggtgacaaaccggaggaaggtggggacgacgtcagatcatcatgccccttatgacctgggctacacacgtgctacaatggacggtacaacgagtcgcgaactcgcgagggcaagctaatctcttaaaaccgttctcagttcggactgcaggctgcaactcgcctgcacgaagtcggaatcgctagtaatcgcggatcagcatgccgcggtgaatacgttcccgggccttgtacacaccgcccgtcacaccatgagagtttgcaacacccaaagtcggtggggtaacccttcggggagctagccgcctaaggtggggcagatgattagggtgaagtcgtaacaaggtagccgtaggagaacctgcggctggatcacctccttt

SEQ ID NO: 908 - DNA, 1574 bp, artificial sequence
  GCF_002813615.1_01922_[Lactobacillus]_paracasei
tatgagagtttgatcctggctcaggatgaacgccggcggtgtgcctaatacatgcaagtcgaacgcgttggcccaactgattgaacgtgcttgcacggacttgacgttggtttaccaacgagtggcggacgggtgagtaacacgtaggtaacctgccccaaagcgggggataacatttggaaacagatgctaataccgcataacagcttgaatcgcatgattcaaatttaaaagatggtttcggctatcactttgggatggacctgcggcgcattagcttgttggtagggtaacggcctaccaaggctgtgatgcgtagccgagttgagagactgatcggccacaatggaactgagacacggtccatactcctacgggaggcagcagtagggaatcttccacaatgggcgcaagcctgatggagcaacaccgcgtgagtgaagaagggtttcggctcgtaaagctctgttgttagagaagaacgtgcgtgagagcaactgttcacgcagtgacggtatctaaccagaaagtcacggctaactacgtgccagcagccgcggtaatacgtaggtggcaagcgttatccggatttattgggcgtaaagcgagcgcaggcggtttgataagtctgatgtgaaagcctttggcttaaccaaagaagtgcatcggaaactgtcagacttgagtgcagaagaggacagtggaactccatgtgtagcggtggaatgcgtagatatatggaagaacaccagtggcgaaggcggctgtctggtctgcaactgacgctgaggctcgaaagcatgggtagcgaacaggattagataccctggtagtccatgccgtaaacgatgagtgctaggtgttggagggtttccgcccttcagtgccgcagctaacgcattaagcactccgcctggggagtacgaccgcaaggttgaaactcaaaggaattgacgggggcccgcacaagcggtggagcatgtggtttaattcgaagctacgcgaagaaccttaccaggtcttgacatcttgcgccaaccctagagatagggcgtttccttcgggaacgcaatgacaggtggtgcatggtcgtcgtcagctcgtgtcgtgagatgttgggttaagtcccgcaacgagcgcaacccttgttactagttgccagcattcagttgggcactctagtgagactgccggtgacaaaccggaggaaggtggggacgacgtcagatcatcatgccccttatgacctgggctacacacgtgctacaatggacggtacaacgagtcgcgaactcgcgagggcaagctaatctcttaaaaccgttctcagttcggactgcaggctgcaactcgcctgcacgaagtcggaatcgctagtaatcgcggatcagcatgccgcggtgaatacgttcccgggccttgtacacaccgcccgtcacaccatgagagtttgcaacacccaaagtcggtggggtaacccttcggggagctagccgcctaaggtggggcagatgattagggtgaagtcgtaacaaggtagccgtaggagaacctgcggctggatcacctccttt

SEQ ID NO: 909 - DNA, 1572 bp, artificial sequence
  GCF_002813615.1_02528_[Lactobacillus]_paracasei
tatgagagtttgatcctggctcaggatgaacgccggcggtgtgcctaatacatgcaagtcgaacgcgttggcccaactgattgaacgtgcttgcacggacttgacgttggtttaccagcgagtggcggacgggtgagtaacacgtaggtaacctgcccaaagcgggggataacatttggaaacagatgctaataccgcataacaatttgaatcgcatgattcaaatttaaaagatggcttcggctatcactttgggatggacctgcggcgcattagcttgttggtagggtaacggcctaccaaggctgtgatgcgtagccgagttgagagactgatcggccacaatggaactgagacacggtccatactcctacgggaggcagcagtagggaatcttccacaatgggcgcaagcctgatggagcaacaccgcgtgagtgaagaagggtttcggctcgtaaagctctgttgttagagaagaacgtgcgtgagagcaactgttcacgcagtgacggtatctaaccagaaagtcacggctaactacgtgccagcagccgcggtaatacgtaggtggcaagcgttatccggatttattgggcgtaaagcgagcgcaggcggtttgataagtctgatgtgaaagcctttggcttaaccaaagaagtgcatcggaaactgtcagacttgagtgcagaagaggacagtggaactccatgtgtagcggtggaatgcgtagatatatggaagaacaccagtggcgaaggcggctgtctggtctgcaactgacgctgaggctcgaaagcatgggtagcgaacaggattagataccctggtagtccatgccgtaaacgatgagtgctaggtgttggagggtttccgcccttcagtgccgcagctaacgcattaagcactccgcctggggagtacgaccgcaaggttgaaactcaaaggaattgacgggggcccgcacaagcggtggagcatgtggtttaattcgaagctacgcgaagaaccttaccaggtcttgacatcttgcgccaaccctagagatagggcgtttccttcgggaacgcaatgacaggtggtgcatggtcgtcgtcagctcgtgtcgtgagatgttgggttaagtcccgcaacgagcgcaacccttgttactagttgccagcattcagttgggcactctagtgagactgccggtgacaaaccggaggaaggtggggacgacgtcagatcatcatgccccttatgacctgggctacacacgtgctacaatggacggtacaacgagtcgcgaactcgcgagggcaagctaatctcttaaaaccgttctcagttcggactgcaggctgcaactcgcctgcacgaagtcggaatcgctagtaatcgcggatcagcatgccgcggtgaatacgttccgggccttgtacacaccgcccgtcacaccatgagagtttgcaacacccaaagtcggtggggtaacccttcggggagctagccgcctaaggtggggcagatgattagggtgaagtcgtaacaaggtagccgtaggagaacctgcggctggatcacctccttt

SEQ ID NO: 910 - DNA, 1529 bp, artificial sequence
  GCF_003053225.1_02958_[Lactobacillus]_paracasei
ttggagagtttgatcctggctcaggacgaacgctggcggcgtgcttaacacatgcaagtcgaacggaaaggtctcttcggagatactcgagtggcgaacgggtgagtaacacgtgggtgatctgccctgcacttcgggataagcctgggaaactgggtctaataccggataggaccacgggatgcatgtcttgtggtggaaagcgctttagcggtgtgggatgagcccgcggcctatcagcttgttggtggggtgacggcctaccaaggcgacgacgggtagccggcctgagagggtgtccggccacactgggactgagatacggcccagactcctacgggaggcagcagtggggaatattgcacaatgggcgcaagcctgatgcagcgacgccgcgtgggggatgacggccttcgggttgtaaacctctttcaccatcgacgaaggtccgggttctctcggattgacggtaggtggagaagaagcaccggccaactacgtgccagcagccgcggtaatacgtagggtgcgagcgttgtccggaattactgggcgtaaagagctcgtaggtggtttgtcgcgttgttcgtgaaatctcacggcttaactgtgagcgtgcgggcgatacgggcagactagagtactgcaggggagactggaattcctggtgtagcggtggaatgcgcagatatcaggaggaacaccggtggcgaaggcgggtctctgggcagtaactgacgctgaggagcgaaagcgtggggagcgaacaggattagataccctggtagtccacgccgtaaacggtgggtactaggtgtgggtttccttccttgggatccgtgccgtagctaacgcattaagtaccccgcctggggagtacggccgcaaggctaaaactcaaaggaattgacgggggcctgcacaagcggcggagcatgtggattaattcgatgcaacgcgaagaaccttacctgggtttgacatgcacaggacgcgtctagagataggcgttcccttgtggcctgtgtgcaggtggtgcatggctgtcgtcagctcgtgtcgtgagatgttgggttaagtcccgcaacgagcgcaacccttgtctcatgttgccagcacgtaatggtggggactcgtgagagactgccggggtcaactcggaggaaggtggggatgacgtcaagtcatcatgccccttatgtccagggcttcacacatgctacaatggccggtacaaagggctgcgatgccgcgaggttaagcgaatccttaaaagccggtctcagttcggatcggggtctgcaactcgaccccgtgaagtcggagtcgctagtaatcgcagatcagcaacgctgcggtgaatacgttcccgggccttgtacacaccgcccgtcacgtcatgaaagtcggtaacacccgaagccagtggcctaaccctcgggagggagctgtcgaaggtgggatcggcgattgggacgaagtcgtaacaaggtagccgtaccggaaggtgcggctggatcacctccttt

SEQ ID NO: 911 - DNA, 1529 bp, artificial sequence
  GCF_003053265.1_02644_[Lactobacillus]_paracasei
ttggagagtttgatcctggctcaggacgaacgctggcggcgtgcttaacacatgcaagtcgaacggaaaggtctcttcggagatactcgagtggcgaacgggtgagtaacacgtgggtgatctgccctgcacttcgggataagcctgggaaactgggtctaataccggataggaccacgggatgcatgtcttgtggtggaaagcgctttagcggtgtgggatgagcccgcggcctatcagcttgttggtggggtgacggcctaccaaggcgacgacgggtagccggcctgagagggtgtccggccacactgggactgagatacggcccagactcctacgggaggcagcagtggggaatattgcacaatgggcgcaagcctgatgcagcgacgccgcgtgggggatgacggccttcgggttgtaaacctctttcaccatcgacgaaggtccgggttctctcggattgacggtaggtggagaagaagcaccggccaactacgtgccagccgccgcggtaatacgtagggtgcgagcgttgtccggaattactgggcgtaaagagctcgtaggtggtttgtcgcgttgttcgtgaaatctcacggcttaactgtgagcgtgcgggcgatacgggcagactagagtactgcaggggagactggaattcctggtgtagcggtggaatgcgcagatatcaggaggaacaccggtggcgaaggcgggtctctgggcagtaactgacgctgaggagcgaaagcgtggggagcgaacaggattagataccctggtagtccacgccgtaaacggtgggtactaggtgtgggtttccttccttgggatccgtgccgtagctaacgcattaagtaccccgcctggggagtacggccgcaaggctaaaactcaaaggaattgacgggggcccgcacaagcggcggagcatgtggattaattcgatgcaacgcgaagaaccttacctgggtttgacatgcacaggacgcgtctagagataggcgttcccttgtggcctgtgtgcaggtggtgcatggctgtcgtcagctcgtgtcgtgagatgttgggttaagtcccgcaacgagcgcaacccttgtctcatgttgccagcacgtaatggtggggactcgtgagagactgccggggtcaactcggaggaaggtggggatgacgtcaagtcatcatgccccttatgtccagggcttcacacatgctacaatggccggtacaaagggctgcgatgccgcgaggttaagcgaatccttaaaagccggtctcagttcggatcggggtctgcaactcgaccccgtgaagtcggagtcgctagtaatcgcagatcagcaacgctgcggtgaatacgttcccgggccttgtacacaccgcccgtcgcgtcatgaaagtcggtaacacccgaagccagtggcctaaccctcgggagggagctgtcgaaggtgggatcggcgattgggacgaagtcgtaacaaggtagccgtaccggaaggtgcggctggatcacctccttt

SEQ ID NO: 912 - DNA, 1555 bp, artificial sequence
  GCF_003062065.1_02415_[Lactobacillus]_paracasei
attggagagtttgatcctggctcagaacgaacgctggcggcgtgcctaacacatgcaagtcgagcgagaaagcccgcaagggtgagtaaagcggcgcacgggtgcgtaacacgtgggtaatctgccctagagtccggaataactcgccgaaaggcgtgctaatgccggatgagaccacgggagcttcggctcctgcgggaaaaggtggcctctgtacacaagctatcgctctaggatgagcccgcggcccatcagctcgttggcggggtaatggcccaccaaggcaacgacgggtagctggtctgagaggacgatcagccacactggaactgagacacggtccagactcctacgggaggcagcagtggggaatcttgcgcaatgggcgaaagcctgacgcagcaacgccgcgtgtgtgatgaaggtcttcggatcgtaaagcactgtcgcgagggacgaataagggacgggcgaacagtccgtcacgatgacggtacctcgagaggaagcaccggctaactctgtgccagcagccgcggtaatacagagggtgcgagcgttgttcggaattattgggcgtaaagcgcgtgtaggcggcctagcaagtcggatgtgaaagccctcggcttaaccgaggaagtgcgttcgaaactactgggcttgagtaccggagagggtggcggaattcccggtgtagaggtgaaattcgtagatatcgggaggaacaccagtggcgaaggcggccacctggacggatactgacgctgagacgcgaaagcgtgggtagcaaacaggattagataccctggtagtccacgctgtaaacgatgagcgctaggtgttgcgggtgttgacccctgcagtgccgcagctaacgcattaagcgctccgcctgggaagtacggccgcaaggctaaaactcaaaggaattgacgggggcccgcacaagcggtggagcatgtggtttaattcgacgcaacgcgcagaaccttacctggtcttgacatcctcggaatccctcagagatgagggggtgcccgcaagggaaccgagagacaggtgctgcatggctgtcgtcagctcgtgtcgtgagatgttgggttaagtcccgcaacgagcgcaacccctgccgttagttgccatcattcagttgggcactctaacgggactgccggcgtcaagccggaggaaggtggggatgacgtcaagtcctcatggcctttatgaccagggctacacacgtgctacaatggccggtacagagggtcgccaagtcgcgagacggagctaatcccagaaaaccggtctcagttcggattggagtctgcaactcgactccatgaagtcggaatcgctagtaatcgcggatcagcacgccgcggtgaatacgttcccgggccttgtacacaccgcccgtcacaccatgggagtcagttgctccagaagtggccgcgccaacccgcaagggaggcaggtccctaaggagtggctggtaactggggtgaagtcgtaacaaggtagccgtaggggaacctgcggctggatcacctccttt

SEQ ID NO: 913 - DNA, 1501 bp, artificial sequence
  GCF_003062085.1_02646_[Lactobacillus]_paracasei
tttgagagtttgatcctagctcagaatgaacgctggcggcaggcctaacacatgcaagtcgaacggagttatattgtagcttgctatggtataacttagtggcagacgggtgagtaatgtataggaatctacctagtagtacggaataattgttggaaacggcaactaataccgtatacgccctacgggggaaaaatttattgctattagatgagcctatattagattagctagttggtggagtaatagcctaccaaggcaatgatctatagctgatctgagaggatgatcagccacactggaactgagatacggtccagactcctacgggaggcagcagtggggaatattggacaatgggcgaaagcctgatccagccatgccgcatgagtgaagaaggcctttgggttgtaaagctcttttagtgaggaagataatgacggtactcacagaagaagtcctggctaactccgtgccagcagccgcggtaatacggagagggctagcgttattcggaattattgggcgtaaagggcgcgtaggcggattagtaagttaaaagtgaaatcccaaggctcaaccttggaattgcttttaaaactgctaatctagagattgaaagaggatagaggaattcctagtgtagaggtgaaattcgtaaatattaggaggaacaccagtggcgaaggcgtctatctggttcaaatctgacgctgaggcgcgaaggcgtggggagcaaacaggattagataccctggtagtccacgctgtaaacgatgaatgttaaatatgggaagttttactttctgtattacagctaacgcgttaaacattccgcctggggactacggtcgcaagattaaaactcaaaggaattgacggggacccgcacaagcggtggagcatgtggtttaattcgatgcaacgcgaaaaaccttaccactccttgacatggaaattatacctattcgaagggatagggtcggttcgtccgggtttcacacaggtgttgcatggctgtcgtcagctcgtgtcgtgagatgttgggttaagtcccgcaacgagcgcaaccctcatccttagttaccatcaggtaatgctggggactttaaggaaactgccagtgataaactggaggaaggtggggatgatgtcaagtcatcatggcccttatggagtgggctacacacgtgctacaatggtggctacaatgggctgcaaagtcgcgaggctaagctaatcccttaaaagccatctcagttcggattgtactctgcaactcgagtgcatgaagttggaatcgctagtaatcgtggatcagcacgccacggtgaatacgttctcgggtcttgtacacactgcccgtcacgccatgggaattggtttcactcgaagctaacgacctaaccgcaaggagggagttatttaaagtgggatcggtgactggggtgaagtcgtaacaaggtagcagtaggggaatctgcagctggattacctcctt

SEQ ID NO: 914 - DNA, 1555 bp, artificial sequence
  GCF_003062105.1_02669_[Lactobacillus]_paracasei
attggagagtttgatcctggctcagaacgaacgctggcggcgtgcctaacacatgcaagtcgagcgagagagcccgcaagggtgagtaaagcggcgcacgggtgcgtaacacgtgggtaatctgccctagagtccggaataactcgccgaaaggcgtgctaatgccggatgagaccacgggagcttcggctcctgcgggaaaaggtggcctctgtacacaagctatcgctctaggatgagcccgcggcccatcagctcgttggcggggtaacggcccaccaaggcaacgacgggtagctggtctgagaggacgatcagccacactggaactgagacacggtccagactcctacgggaggcagcagtggggaatcttgcgcaatgggcgaaagcctgacgcagcaacgccgcgtgtgtgatgaaggtcttcggatcgtaaagcactgtcgcgagggacgaataagggacgggcgaacagtccgtttcgatgacggtacctcgagaggaagcaccggctaactctgtgccagcagccgcggtaatacagagggtgcgagcgttgttcggaattattgggcgtaaagcgcgtgtaggcggcctagcaagtcggatgtgaaagccctcggcttaaccgaggaagtgcgttcgaaactactgggcttgagtaccggagagggtggcggaattcccggtgtagaggtgaaattcgtagatatcgggaggaacaccagtggcgaaggcggccacctggacggatactgacgctgagacgcgaaagcgtgggtagcaaacaggattagataccctggtagtccacgctgtaaacgatgagcgctaggtgttgcgggtgttgacccctgcagtgccgcagctaacgcattaagcgctccgcctgggaagtacggccgcaaggctaaaactcaaaggaattgacgggggcccgcacaagcggtggagcatgtggtttaattcgacgcaacgcgcagaaccttacctggtcttgacatcctcggaacctctcagagatgagggggtgcccgcaagggaaccgagagacaggtgctgcatggctgtcgtcagctcgtgtcgtgagatgttgggttaagtcccgcaacgagcgcaacccctgccgttagttgccatcattcagttgggcactctaacgggactgccggcgtcaagccggaggaaggtggggatgacgtcaagtcctcatggcctttatgaccagggctacacacgtgctacaatggccggtacagagggtcgccaagtcgcgagacggagctaatcccagaaaaccggtctcagttcggattggagtctgcaactcgactccatgaagtcggaatcgctagtaatcgcggatcagcacgccgcggtgaatacgttcccgggccttgtacacaccgcccgtcacaccatgggagtcagttgctccagaagtggccgcgccaacccgcaagggaggcaggtccctaaggagtggctggtaactggggtgaagtcgtaacaaggtagccgtaggggaacctgcggctggatcacctccttt

SEQ ID NO: 915 - DNA, 1555 bp, artificial sequence
  GCF_003062125.1_02651_[Lactobacillus]_paracasei
attggagagtttgatcctggctcagaacgaacgctggcggcgtgcctaacacatgcaagtcgagcgagaaagcccgcaagggtgagtaaagcggcgcacgggtgcgtaacacgtgggtaatctgccctagagtccggaataactcgccgaaaggcgtgctaatgccggatgagaccacgggagcttcggctcctgcgggaaaaggtggcctctgtacacaagctatcgctctaggatgagcccgcggcccatcagctcgttggcggggtaacggcccaccaaggcaacgacgggtagctggtctgagaggacgatcagccacactggaactgagacacggtccagactcctacgggaggcagcagtggggaatcttgcgcaatgggcgaaagcctgacgcagcaacgccgcgtgtgtgatgaaggtcttcggatcgtaaagcactgtcgcgagggacgaataagggacgggcgaacagtccgtttcgatgacggtacctcgagaggaagcaccggctaactctgtgccagcagccgcggtaatacagagggtgcgagcgttgttcggaattattgggcgtaaagcgcgtgtaggcggcctagcaagtcggatgtgaaagccctcggcttaaccgaggaagtgcgttcgaaactactgggcttgagtaccggagagggtggcggaattcccggtgtagaggtgaaattcgtagatatcgggaggaacaccagtggcgaaggcggccacctggacggatactgacgctgagacgcgaaagcgtgggtagcaaacaggattagataccctggtagtccacgctgtaaacgatgagcgctaggtgttgcgggtgttgacccctgcagtgccgcagctaacgcattaagcgctccgcctgggaagtacggccgcaaggctaaaactcaaaggaattgacgggggcccgcacaagcggtggagcatgtggtttaattcgacgcaacgcgcagaaccttacctggtcttgacatcctcggaacctctcagagatgagggggtgcccgcaagggaaccgagagacaggtgctgcatggctgtcgtcagctcgtgtcgtgagatgttgggttaagtcccgcaacgagcgcaacccctgccgttagttgccatcattcagttgggcactctaacgggactgccggcgtcaagccggaggaaggtggggatgacgtcaagtcctcatggcctttatgaccagggctacacacgtgctacaatggccggtacagagggtcgccaagtcgcgagacggagctaatcccagaaaaccggtctcagttcggattggagtctgcaactcgactccatgaagtcggaatcgctagtaatcgcggatcagcacgccgcggtgaatacgttcccgggccttgtacacaccgcccgtcacaccatgggagtcagttgctccagaagtggccgcgccaacccgcaagggaggcaggtccctaaggagtggctggtaactggggtgaagtcgtaacaaggtagccgtaggggaacctgcggctggatcacctccttt

SEQ ID NO: 916 - DNA, 1529 bp, artificial sequence; identical to SEQ ID NO: 686
  GCF_003062145.1_02873_[Lactobacillus]_paracasei

SEQ ID NO: 917 - DNA, 1520 bp, artificial sequence
  GCF_003062185.1_02610_[Lactobacillus]_paracasei
tttggagagtttgatcctggctcaggacgaacgctggcggcgtgcttaacacatgcaagtcgagcggaaaggcccttcggggtactcgagcggcgaacgggtgagtaacacgtgagtaacctgcccctgactctgggataagcctgggaaactgggtctaataccggatatgactacttcgggcatccgatggtggtggaaagttttttcggttggggatggactcgcggcctatcagcttgttggtggggtagtggcctaccaaggcgacgacgggtagccggcctgagagggcgaccggccacactgggactgagacacggcccagactcctacgggaggcagcagtggggaatattgcgcaatgggcgaaagcctgacgcagcgacgccgcgtgggggatgacggccttcgggttgtaaacctctttcagcagggacgaagttgacgtgtacctgtagaagaagcgccggctaactacgtgccagcagccgcggtaatacgtagggcgcaagcgttgtccggaattattgggcgtaaagagctcgtaggtggcttgtcgcgtctgccgtgaaagcttagggcttaaccctaggtctgcggtggatacgggcaggctagaggctggtaggggcaagcggaattcctggtgtagcggtgaaatgcgcagatatcaggaggaacaccggtggcgaaggcggcttgctgggccagttctgacgctgaggagcgaaagcgtggggagcgaacaggattagataccctggtagtccacgctgtaaacgttgggcgctaggtgtggggaccttccacggtttccgcgccgtagctaacgcattaagcgccccgcctggggagtacggccgcaaggctaaaactcaaaggaattgacgggggcccgcacaagcggcggagcatgttgcttaattcgacgcaacgcgaagaaccttaccaaggtttgacatacaccggaaagcctcagagatggggccctcttcggactggtgtacaggtggtgcatggctgtcgtcagctcgtgtcgtgagatgttgggttaagtcccgcaacgagcgcaacccttgttccatgttgccagcacgccctttggggtggtggggactcatgggagactgccggggtcaactcggaggaaggtggggatgacgtcaagtcatcatgccccttatgtcttgggctgcaaacatgctacaatggccggtacagagggttgcgatgccgtgaggtggagcgaatccctaaaagccggtctcagttcggattggggtctgcaactcgaccccatgaagtcggagtcgctagtaatcgcagatcagcaacgctgcggtgaatacgttcccgggccttgtacacaccgcccgtcacgtcacgaaagtcggcaacacccgaagcccgtggcccaaccggtttaccggggggagcggtcgaaggtggggctggcgattgggacgaagtcgtaacaaggtagccgtaccggaaggtgcggctggatcacctccttt

SEQ ID NO: 918 - DNA, 1532 bp, artificial sequence
  GCF_003346265.1_00358_[Lactobacillus]_paracasei
acggagagtttgatcctggctcagaacgaacgctggcggcgcgttttaagcatgcaagtcgagcgggaaggggcttcggccctggagagcggcggacgggtgagtaacacgtggatgatctgcctcccagttggggacagcacctggaaacaggtgataataccggatacgaccgcaggggtagagccctgtggggaaaggggccacggccccgctgggagatgagtccgcggcccattagctagatgggggggtaacggcccaccatggcgacgatgggtagccggcctgagagggtggacggccacattggaactgagacacggtccagactcctacgggaggcagcagctaagaatcttccgcaatggggggaaccctgacggagcgacgccgcgtgaacgaagaaggccgtgaggttgtaaagttcttttcgggagggggaataagcctgccagggaatgggcgggtgatgacgtgaatcccggaataagccccggctaactacgtgccagcagccgcggtaacacgtagggggcgagcgttgttcggaattattgggcgtaaagggcgcgcaggcggtcatgcaagtccgatgtgaaagaccccggctcaaccgggggtatgcgtgggaaactgcatggcttgagtacagcagggggcagtggaattccaggtgtaggggtgaaatctgtagatatctggaagaacaccggaggcgaaggcgactgcctgggcatgtactgacgctgaggcgcgaaggtgcggggagcgaacaggtttagataccctggtagtccgcacagtaaacgatgcacaccaggtgtcggggggtagcccccggtaccggagctaacgcactgagtgtgccgcctggggagtatgcccgcaagggtgaaactcaaaggaattgacgggggcccgcacaagcggtggagcatgtggtttaattcgatgatacgcgaggaaccttaccagggcttgacatccgggggaaccatggggagacccatgggccgcttgcggccgccggacaggtgctgcatggctgtcgtcagctcgtgctgtgaagtgttgggttaagtcccgcaacgagcgcaacccctgccgtctgttaccagcatgtgaagatggggactcggacggaactgccggtgacaaaccggaggaaggtggggacgacgtcaagtcatcatggcccttatgccctgggccacacacgtgctacaatggccggtacagagcgaagcggacccgcgagggagagcgaaccgcgaaagccggtctcagtacggattggactctgcaacccgagtccatgaagttggaatcgctagtaatcgcgcatcagcatggcgcggtgaatacgttcccgggccttgtacacaccgcccgtcacaccatccgagtcgggggtacccgaagtcgctgtcccaaccgcgaggggggaggtgccgaaggtatgcctggtgaggagggtgaagtcgtaacaaggtagccgtaccggaaggtgcggctggatcacctccttt

SEQ ID NO: 919 - DNA, 1511 bp, artificial sequence
  GCF_003367655.1_02648_[Lactobacillus]_paracasei
ttggagagtttgatcctggctcaggacgaacgctggcggcgtgcttaacacatgcaagtcgagcggaaaggcccttcggggtactcgagcggcgaacgggtgagtaacacgtgagcaacctgccccaagctttgggataaccccgggaaaccggggctaataccgaatattacttctggccgcatggctgggggtggaaagtttttcggcttgggatgggctcgcggcctatcagcttgttggtggggtgatggcctaccaaggcgacgacgggtagccggcctgagagggcgaccggccacactgggactgagacacggcccagactcctacgggaggcagcagtggggaatattgcacaatgggcggaagcctgatgcagcgacgccgcgtgagggatgacggccttcgggttgtaaacctctttcagcagggacgaagcgagagtgacggtacctgcagaagaagcaccggccaactacgtgccagcagccgcggtaagacgtagggtgcgagcgttgtccggatttattgggcgtaaagagctcgtaggcggcttgtcgcgtcgaccgtgaaaacttggggctcaaccccaagcctgcggtcgatacgggcaggctagagttcggtaggggagactggaattcctggtgtagcggtgaaatgcgcagatatcaggaggaacaccggtggcgaaggcgggtctctgggccgatactgacgctgaggagcgaaagcgtggggagcgaacaggattagataccctggtagtccacgctgtaaacgttgggcgctaggtgtggggggcctctccggttccctgtgccgcagctaacgcattaagcgccccgcctggggagtacggccgcaaggctaaaactcaaaggaattgacgggggcccgcacaagcggcggagcatgcggattaattcgatgcaacgcgaagaaccttacctgggtttgacatggccgcaaaacctccagagatggggggtccttcgggggcggtcacaggtggtgcatggctgtcgtcagctcgtgtcgtgagatgttgggttaagtcccgcaacgagcgcaaccctcgttcgatgttgccagcgcgttatgcggggactcatcgaagactgccggggtcaactcggaggaaggtggggatgacgtcaagtcatcatgccccttatgtccagggctccacgcatgctacaatggccggtacaatgggctgcgataccgtgaggtggagcgaatcccaaaaagccggtctcagttcggatcggggtctgcaactcgaccccgtgaagtcggagtcgctagtaatcgcagatcagcaacgctgcggtgaatacgttcccgggccttgtacacaccgcccgtcacgtcacgaaagtcggcaacacccgaagccggtggcccaacccttgtggagggagccgtcgaaggtggggctggcgattgggacgaagtcgtaacaaggtagccgtaccggaaggtgcggctggatcacctccttt

SEQ ID NO: 920 - DNA, 901 bp, artificial sequence
  GCF_003712345.1_00221_[Lactobacillus]_paracasei
ttgaagagtttgatcatggctcagattgaacgctggcggcaggcctaacacatgcaagtcgagcggcagcgggaaagtagcttgctacttttgccggcgagcggcggacgggtgagtaatgcctggggatctgcccagtcgagggggataacagttggaaacgactgctaataccgcatacgccctacgggggaaaggaggggaccttcgggcctttcgcgattggatgaacccaggtgggattagctagttggtggggtaatggctcaccaaggcgacgatccctagctggtctgagaggatgatcagccacactggaactgagacacggtccagactcctacgggaggcagcagtggggaatattgcacaatgggggaaaccctgatgcagccatgccgcgtgtgtgaagaaggccttcgggttgtaaagcactttcagcgaggaggaaaggttggcagctaatatctgccagctgtgacgttactcgcagaagaagcaccggctaactccgtgccagcagccgcggtaatacggagggtgcaagcgttaatcggaattactgggcgtaaagcgcacgcaggcggttggataagttagatgtgaaagccccgggctcaacctgggaattgcatttaaaactgtccagctagagtcttgtagaggggggtagaattccaggtgtagcggtgaaatgcgtagagatctggaggaataccggtggcgaaggcggccccctggacaaagactgacgctcaggtgcgaaagcgtggggagcaaacaggattagataccctggtagtccacgccgtaaacgatgtcgatttggaggctgtgtccttgagacgtggcttccggagctaacgcgttaaatcgaccgcctggggagtacggccgcaag

SEQ ID NO: 921 - DNA, 1541 bp, artificial sequence
  GCF_003712345.1_00778_[Lactobacillus]_paracasei
  misc_feature (1010)..(1010): n is a, c, g, or t
  misc_feature (1017)..(1017): n is a, c, g, or t
ttgaagagtttgatcatggctcagattgaacgctggcggcaggcctaacacatgcaagtcgagcggcagcgggaaagtagcttgctacttttgccggcgagcggcggacgggtgagtaatgcctggggatctgcccagtcgagggggataacagttggaaacgactgctaataccgcatacgccctacgggggaaaggaggggaccttcgggcctttcgcgattggatgaacccaggtgggattagctagttggtggggtaatggctcaccaaggcgacgatccctagctggtctgagaggatgatcagccacactggaactgagacacggtccagactcctacgggaggcagcagtggggaatattgcacaatgggggaaaccctgatgcagccatgccgcgtgtgtgaagaaggccttcgggttgtaaagcactttcagcgaggaggaaaggttggcagctaatatctgtcagctgtgacgttactcgcagaagaagcaccggctaactccgtgccagcagccgcggtaatacggagggtgcaagcgttaatcggaattactgggcgtaaagcgcacgcaggcggttggataagttagatgtgaaagccccgggctcaacctgggaattgcatttaaaactgttcagctagagtcttgtagaggggggtagaattccaggtgtagcggtgaaatgcgtagagatctggaggaataccggtggcgaaggcggccccctggacaaagactgacgctcaggtgcgaaagcgtggggagcaaacaggattagataccctggtagtccacgccgtaaacgatgtcgatttggaggctgtgtccttgagacgtggcttccggagctaacgcgttaaatcgaccgcctggggagtacggccgcaaggttaaaactcaaatgaattgacgggggcccgcacaagcggtggagcatgtggtttaattcgatgcaacgcgaagaaccttacctggccttgacatgtctggaatcctgnagagatncgggagtgccttcgggaatcagaacacaggtgctgcatggctgtcgtcagctcgtgtcgtgagatgttgggttaagtcccgcaacgagcgcaacccctgtcctttgttgccagcacgtaatggtgggaactcaagggagactgccggtgataaaccggaggaaggtggggatgacgtcaagtcatcatggcccttacggccagggctacacacgtgctacaatggcgcgtacagagggctgcaagctagcgatagtgagcgaatcccaaaaagcgcgtcgtagtccggatcggagtctgcaactcgactccgtgaagtcggaatcgctagtaatcgcaaatcagaatgttgcggtgaatacgttcccgggccttgtacacaccgcccgtcacaccatgggagtgggttgcaccagaagtagatagcttaaccttcgggagggcgtttaccacggtgtgattcatgactggggtgaagtcgtaacaaggtaaccctaggggaacctggggttggatcacctcctt

SEQ ID NO: 922 - DNA, 1541 bp, artificial sequence
  GCF_003712345.1_00816_[Lactobacillus]_paracasei
ttgaagagtttgatcatggctcagattgaacgctggcggcaggcctaacacatgcaagtcgagcggcagcgggaaagtagcttgctacttttgccggcgagcggcggacgggtgagtaatgcctggggatctgcccagtcgagggggataactactggaaacggtagctaataccgcatacgccctacgggggaaagcaggggaccttcgggccttgcgcgattggatgaacccaggtgggattagctagttggtgaggtaatggctcaccaaggcgacgatccctagctggtctgagaggatgatcagccacactggaactgagacacggtccagactcctacgggaggcagcagtggggaatattgcacaatgggggaaaccctgatgcagccatgccgcgtgtgtgaagaaggccttcgggttgtaaagcactttcagcgaggaggaaaggttggtagctaataactgccagctgtgacgttactcgcagaagaagcaccggctaactccgtgccagcagccgcggtaatacggagggtgcaagcgttaatcggaattactgggcgtaaagcgcacgcaggcggttggataagttagatgtgaaagccccgggctcaacctgggaattgcatttaaaactgtccagctagagtcttgtagaggggggtagaattccaggtgtagcggtgaaatgcgtagagatctggaggaataccggtggcgaaggcggccccctggacaaagactgacgctcaggtgcgaaagcgtggggagcaaacaggattagataccctggtagtccacgccgtaaacgatgtcgatttggaggctgtgtccttgagacgtggcttccggagctaacgcgttaaatcgaccgcctggggagtacggccgcaaggttaaaactcaaatgaattgacgggggcccgcacaagcggtggagcatgtggtttaattcgatgcaacgcgaagaaccttacctggccttgacatgtctggaatcctgcagagatgcgggagtgccttcgggaatcagaacacaggtgctgcatggctgtcgtcagctcgtgtcgtgagatgttgggttaagtcccgcaacgagcgcaacccctgtcctttgttgccagcacgtaatggtgggaactcaagggagactgccggtgataaaccggaggaaggtggggatgacgtcaagtcatcatggcccttacggccagggctacacacgtgctacaatggcgcgtacagagggctgcaagctagcgatagtgagcgaatcccaaaaagcgcgtcgtagtccggatcggagtctgcaactcgactccgtgaagtcggaatcgctagtaatcgcaaatcagaatgttgcggtgaatacgttcccgggccttgtacacaccgcccgtcacaccatgggagtgggttgcaccagaagtagatagcttaaccttcgggagggcgtttaccacggtgtgattcatgactggggtgaagtcgtaacaaggtaaccctaggggaacctggggttggatcacctcctt

SEQ ID NO: 923 - DNA, 1450 bp, artificial sequence
  GCF_003712345.1_01806_[Lactobacillus]_paracasei
  misc_feature (512)..(512): n is a, c, g, or t
  misc_feature (578)..(578): n is a, c, g, or t
  misc_feature (598)..(598): n is a, c, g, or t
  misc_feature (609)..(609): n is a, c, g, or t
  misc_feature (613)..(613): n is a, c, g, or t
  misc_feature (625)..(625): n is a, c, g, or t
  misc_feature (630)..(630): n is a, c, g, or t
  misc_feature (704)..(704): n is a, c, g, or t
  misc_feature (716)..(716): n is a, c, g, or t
  misc_feature (720)..(720): n is a, c, g, or t
  misc_feature (775)..(775): n is a, c, g, or t
  misc_feature (1116)..(1116): n is a, c, g, or t
ttgaagagtttgatcatggctcagattgaacgctggcggcaggcctaacacatgcaagtcgagcggcagcgggaaagtagcttgctacttttgccggcgagcggcggacgggtgagtaatgcctgggaaattgcccagtcgagggggataacagttggaaacgactgctaataccgcatacgccctacgggggaaagcaggggaccttcgggccttgcgcgattggatatgcccaggtgggattagctagttggtgaggtaatggctcaccaaggcgacgatccctagctggtctgagaggatgatcagccacactggaactgagacacggtccagactcctacgggaggcagcagtggggaatattgcacaatgggggaaaccctgatgcagccatgccgcgtgtgtgaagaaggccttcgggttgtaaagcactttcagcgaggaggaaaggtcagtagctaatatctgctggctgtgacgttactcgcagaagaagcaccggctaactncgtgccagcagccgcggtaatacggagggtgcaagcgttaatcggaattactgggcgtaaagcgcncgcaggcggttggataagtnagatgtgaaancccngggctcaacctnggaantgcatttaaaactgtccagctagagtcttgtagaggggggtagaattccaggtgtagcggtgaaatgcgtaganatctggaggaanaccngtggcgaaggcggccccctggacaaagactgacgctcaggtgcgaaagcgtgggnagcaaacaggattagataccctggtagtccacgccgtaaacgatgtcgatttggaggctgtgtccttgagacgtggcttccggagctaacgcgttaaatcgaccgcctggggagtacggccgcaaggttaaaactcaaatgaattgacgggggcccgcacaagcggtggagcatgtggtttaattcgatgcaacgcgaagaaccttacctggccttgacatgtctggaatcctgcagagatgcgggagtgccttcgggaatcagaacacaggtgctgcatggctgtcgtcagctcgtgtcgtgagatgttgggttaagtcccgcaacgagcgcaacccctntcctttgttgccagcacgtaatggtgggaactcaagggagactgccggtgataaaccggaggaaggtggggatgacgtcaagtcatcatggcccttacggccagggctacacacgtgctacaatggcgcgtacagagggctgcaagctagcgatagtgagcgaatcccaaaaagcgcgtcgtagtccggattggagtctgcaactcgactccatgaagtcggaatcgctagtaatcgcaaatcagaatgttgcggtgaatacgttcccgggccttgtacacaccgcccgtcacaccatgggagtgggttgcaccagaagtagatagcttaacct

SEQ ID NO: 924 - DNA, 1541 bp, artificial sequence
  GCF_003712345.1_02522_[Lactobacillus]_paracasei
ttgaagagtttgatcatggctcagattgaacgctggcggcaggcctaacacatgcaagtcgagcggcagcgggaaagtagcttgctacttttgccggcgagcggcggacgggtgagtaatgcctgggaaattgcccagtcgagggggataacagttggaaacgactgctaataccgcatacgccctacgggggaaagcaggggaccttcgggccttgcgcgattggatatgcccaggtgggattagctagttggtgaggtaatggctcaccaaggcgacgatccctagctggtctgagaggatgatcagccacactggaactgagacacggtccagactcctacgggaggcagcagtggggaatattgcacaatgggggaaaccctgatgcagccatgccgcgtgtgtgaagaaggccttcgggttgtaaagcactttcagcgaggaggaaaggtcagtagctaatatctgctggctgtgacgttactcgcagaagaagcaccggctaactccgtgccagcagccgcggtaatacggagggtgcaagcgttaatcggaattactgggcgtaaagcgcacgcaggcggttggataagttagatgtgaaagccccgggctcaacctgggaattgcatttaaaactgtccagctagagtcttgtagaggggggtagaattccaggtgtagcggtgaaatgcgtagagatctggaggaataccggtggcgaaggcggccccctggacaaagactgacgctcaggtgcgaaagcgtggggagcaaacaggattagataccctggtagtccacgccgtaaacgatgtcgatttggaggctgtgtccttgagacgtggcttccggagctaacgcgttaaatcgaccgcctggggagtacggccgcaaggttaaaactcaaatgaattgacgggggcccgcacaagcggtggagcatgtggtttaattcgatgcaacgcgaagaaccttacctggccttgacatgtctggaatcctgtagagatacgggagtgccttcgggaatcagaacacaggtgctgcatggctgtcgtcagctcgtgtcgtgagatgttgggttaagtcccgcaacgagcgcaacccctgtcctttgttgccagcacgtaatggtgggaactcaagggagactgccggtgataaaccggaggaaggtggggatgacgtcaagtcatcatggcccttacggccagggctacacacgtgctacaatggcgcgtacagagggctgcaagctagcgatagtgagcgaatcccaaaaagcgcgtcgtagtccggattggagtctgcaactcgactccatgaagtcggaatcgctagtaatcgcaaatcagaatgttgcggtgaatacgttcccgggccttgtacacaccgcccgtcacaccatgggagtgggttgcaccagaagtagatagcttaaccttcgggagggcgtttaccacggtgtgattcatgactggggtgaagtcgtaacaaggtaaccctaggggaacctggggttggatcacctcctt

SEQ ID NO: 925 - DNA, 1541 bp, artificial sequence
  GCF_003712665.1_00709_[Lactobacillus]_paracasei
ttgaagagtttgatcatggctcagattgaacgctggcggcaggcctaacacatgcaagtcgagcggcagcgggaaagtagcttgctacttttgccggcgagcggcggacgggtgagtaatgcctgggaaattgcccagtcgagggggataacagttggaaacgactgctaataccgcatacgccctacgggggaaagcaggggaccttcgggccttgcgcgattggatatgcccaggtgggattagctagttggtgaggtaatggctcaccaaggcgacgatccctagctggtctgagaggatgatcagccacactggaactgagacacggtccagactcctacgggaggcagcagtggggaatattgcacaatgggggaaaccctgatgcagccatgccgcgtgtgtgaagaaggccttcgggttgtaaagcactttcagcgaggaggaaaggtcagtagctaatatctgctggctgtgacgttactcgcagaagaagcaccggctaactccgtgccagcagccgcggtaatacggagggtgcaagcgttaatcggaattactgggcgtaaagcgcacgcaggcggttggataagttagatgtgaaagccccgggctcaacctgggaattgcatttaaaactgtccagctagagtcttgtagaggggggtagaattccaggtgtagcggtgaaatgcgtagagatctggaggaataccggtggcgaaggcggccccctggacaaagactgacgctcaggtgcgaaagcgtggggagcaaacaggattagataccctggtagtccacgccgtaaacgatgtcgatttggaggctgtgtccttgaggcgtggcttccggagctaacgcgttaaatcgaccgcctggggagtacggccgcaaggttaaaactcaaatgaattgacgggggcccgcacaagcggtggagcatgtggtttaattcgatgcaacgcgaagaaccttacctggccttgacatgtctggaatcctgtagagatacgggagtgccttcgggaatcagaacacaggtgctgcatggctgtcgtcagctcgtgtcgtgagatgttgggttaagtcccgcaacgagcgcaacccctgtcctttgttgccagcacgtaatggtgggaactcaagggagactgccggtgataaaccggaggaaggtggggatgacgtcaagtcatcatggcccttacggccagggctacacacgtgctacaatggcgcgtacagagggctgcaagctagcgatagtgagcgaatcccaaaaagcgcgtcgtagtccggattggagtctgcaactcgactccatgaagtcggaatcgctagtaatcgcaaatcagaatgttgcggtgaatacgttcccgggccttgtacacaccgcccgtcacaccatgggagtgggttgcaccagaagtagatagcttaaccttcgggagggcgtttaccacggtgtgattcatgactggggtgaagtcgtaacaaggtaaccctaggggaacctggggttggatcacctcctt

SEQ ID NO: 926 - DNA, 1525 bp, artificial sequence
  GCF_004078555.1_00253_[Lactobacillus]_paracasei
tgaagagtttgatcatggctcagattgaacgctggcggcaggcttaacacatgcaagtcgaacgaagttaggaagcttgcttctgatacttagtggcggacgggtgagtaatgcttaggaatctgcctagtagtgggggataacttggggaaacccaagctaataccgcatacgacctacgggtgaaagggggcttttagctctcgctattagatgagcctaagtcggattagctagttggtggggtaaaggcctaccaaggcgacgatctgtagctggtctgagaggatgatcagccacactgggactgagacacggcccagactcctacgggaggcagcagtggggaatattggacaatgggcgaaagcctgatccagccatgccgcgtgtgtgaagaaggccttttggttgtaaagcactttaagtggggaggaaaagcttatggttaatacccataagccctgacgttacccacagaataagcaccggctaactctgtgccagcagccgcggtaatacagagggtgcaagcgttaatcggaattactgggcgtaaagcgcgcgtaggtggttatttaagtcagatgtgaaagccccgggcttaacctgggaactgcatctgatactggataactagagtaggtgagaggggagtagaattccaggtgtagcggtgaaatgcgtagagatctggaggaataccgatggcgaaggcagctccctggcatcatactgacactgaggtgcgaaagcgtgggtagcaaacaggattagataccctggtagtccacgccgtaaacgatgtctaccagtcgttgggtcttttaaagacttagtgacgcagttaacgcaataagtagaccgcctggggagtacggccgcaaggttaaaactcaaatgaattgacgggggcccgcacaagcggtggagcatgtggtttaattcgatgcaacgcgaagaaccttacctggtcttgacatatctagaatcctgcagagatgcgggagtgccttcgggaattagaatacaggtgctgcatggctgtcgtcagctcgtgtcgtgagatgttgggttaagtcccgcaacgagcgcaacccttttccttagttaccagcgactcggtcgggaactctaaggatactgccagtgacaaactggaggaaggcggggacgacgtcaagtcatcatggcccttacgaccagggctacacacgtgctacaatggttggtacaaagggttgctacacagcgatgtgatgctaatctcaaaaagccaatcgtagtccggattggagtctgcaactcgactccatgaagtcggaatcgctagtaatcgcagatcagaatgctgcggtgaatacgttcccgggccttgtacacaccgcccgtcacaccatgggagttgatctcaccagaagtggttagcctaacgcaagagggcgatcaccacggtggggtcgatgactggggtgaagtcgtaacaaggtagccgtaggggaacctgcggctggatcacctcctt

SEQ ID NO: 927 - DNA, 1536 bp, artificial sequence
  GCF_004078555.1_00713_[Lactobacillus]_paracasei
taagagtttgatcctggctcagattgaacgctggcggcatgctttacacatgcaagtcggacggcagcacagggaagcttgcttctcgggtggcgagtggcgaacgggtgagtaacatatcggaacgtaccgggtagcgggggataactgatcgaaagatcagctaataccgcatacgtcttgagagggaaagcaggggaccttcgggccttgcgctatccgagcggccgatatctgattagctggttggcggggtaaaggcccaccaaggcgacgatcagtagcgggtctgagaggatgatccgccacactgggactgagacacggcccagactcctacgggaggcagcagtggggaattttggacaatgggcgcaagcctgatccagccatgccgcgtgtctgaagaaggccttcgggttgtaaaggacttttgtcagggaagaaaaggccgttgccaatatcggcggccgatgacggtacctgaagaataagcaccggctaactacgtgccagcagccgcggtaatacgtagggtgcgagcgttaatcggaattactgggcgtaaagcgggcgcagacggttacttaagcaggatgtgaaatccccgggctcaacccgggaactgcgttctgaactgggtgactcgagtgtgtcagagggaggtggaattccacgtgtagcagtgaaatgcgtagagatgtggaggaataccgatggcgaaggcagcctcctgggataacactgacgttcatgtccgaaagcgtgggtagcaaacaggattagataccctggtagtccacgccctaaacgatgtcaattagctgttgggcaacttgattgcttggtagcgtagctaacgcgtgaaattgaccgcctggggagtacggtcgcaagattaaaactcaaaggaattgacggggacccgcacaagcggtggatgatgtggattaattcgatgcaacgcgaagaaccttacctggttttgacatgtgcggaatcctccggagacggaggagtgccttcgggagccgtaacacaggtgctgcatggctgtcgtcagctcgtgtcgtgagatgttgggttaagtcccgcaacgagcgcaacccttgtcattagttgccatcattcggttgggcactctaatgagactgccggtgacaagccggaggaaggtggggatgacgtcaagtcctcatggcccttatgaccagggcttcacacgtcatacaatggtcggtacagagggtagccaagccgcgaggcggagccaatctcacaaaaccgatcgtagtccggattgcactctgcaactcgagtgcatgaagtcggaatcgctagtaatcgcaggtcagcatactgcggtgaatacgttcccgggtcttgtacacaccgcccgtcacaccatgggagtgggggataccagaagtaggtagggtaaccgcaaggagtccgcttaccacggtatgcttcatgactggggtgaagtcgtaacaaggtagccgtaggggaacctgcggctggatcacctccttt

SEQ ID NO: 928 - DNA, 1525 bp, artificial sequence
  GCF_004078555.1_00816_[Lactobacillus]_paracasei
tgaagagtttgatcatggctcagattgaacgctggcggcaggcttaacacatgcaagtcgaacgaagttaggaagcttgcttctgatacttagtggcggacgggtgagtaatgcttaggaatctgcctagtagtgggggataacttggggaaacccaagctaataccgcatacgacctacgggtgaaagggggcttttagctctcgctattagatgagcctaagtcggattagctggttggtggggtaaaggcctaccaaggcgacgatctgtagctggtctgagaggatgatcagccacactgggactgagacacggcccagactcctacgggaggcagcagtggggaatattggacaatgggcgaaagcctgatccagccatgccgcgtgtgtgaagaaggccttttggttgtaaagcactttaagtggggaggaaaagcttatggttaatacccataagccctgacgttacccacagaataagcaccggctaactctgtgccagcagccgcggtaatacagagggtgcaagcgttaatcggaattactgggcgtaaagcgcgcgtaggtggttatttaagtcagatgtgaaagccccgggcttaacctgggaactgcatctgatactggataactagagtaggtgagaggggagtagaattccaggtgtagcggtgaaatgcgtagagatctggaggaataccgatggcgaaggcagctccctggcatcatactgacactgaggtgcgaaagcgtgggtagcaaacaggattagataccctggtagtccacgccgtaaacgatgtctaccagtcgttgggtcttttaaagacttagtgacgcagttaacgcaataagtagaccgcctggggagtacggccgcaaggttaaaactcaaatgaattgacgggggcccgcacaagcggtggagcatgtggtttaattcgatgcaacgcgaagaaccttacctggtcttgacatagtgagaatcttgcagagatgcgagagtgccttcgggaattcacatacaggtgctgcatggctgtcgtcagctcgtgtcgtgagatgttgggttaagtcccgcaacgagcgcaacccttttccttagttaccagcgactcggtcgggaactctaaggatactgccagtgacaaactggaggaaggcggggacgacgtcaagtcatcatggcccttacgaccagggctacacacgtgctacaatggttggtacaaagggttgctacacagcgatgtgatgctaatctcaaaaagccaatcgtagtccggattggagtctgcaactcgactccatgaagtcggaatcgctagtaatcgcagatcagaatgctgcggtgaatacgttcccgggccttgtacacaccgcccgtcacaccatgggagttgatctcaccagaagtggttagcctaacgcaagagggcgatcaccacggtggggtcgatgactggggtgaagtcgtaacaaggtagccgtaggggaacctgcggctggatcacctcctt

SEQ ID NO: 929 - DNA, 1536 bp, artificial sequence
  GCF_004078555.1_01787_[Lactobacillus]_paracasei
taagagtttgatcctggctcagattgaacgctggcggcatgctttacacatgcaagtcggacggcagcacagagaagcttgcttcttgggtggcgagtggcgaacgggtgagtaatatatcggaacgtaccgagtaatgggggataactaatcgaaagattagctaataccgcatattctctgaggaggaaagcaggggaccttcgggccttgcgttattcgagcggccgatatctgattagctggttggtggggtaaaggcctaccaaggcgacgatcagtagcgggtctgagaggatgatccgccacactgggactgagacacggcccagactcctacgggaggcagcagtggggaattttggacaatgggcgcaagcctgatccagccatgccgcgtgtctgaagaaggccttcgggttgtaaaggacttttgtcagggaagaaaaggctgttgctaatatcgacagctgatgacggtacctgaagaataagcaccggctaactacgtgccagcagccgcggtaatacgtagggtgcgagcgttaatcggaattactgggcgtaaagcgagcgcagacggttacttaagcaggatgtgaaatccccgggctcaacccgggaactgcgttctgaactgggtaactagagtgtgtcagagggaggtagaattccacgtgtagcagtgaaatgcgtagagatgtggaggaataccgatggcgaaggcagcctcctgggataacactgacgttcatgctcgaaagcgtgggtagcaaacaggattagataccctggtagtccacgccctaaacgatgtcaattagctgttgggcaacttgattgcttagtagcgtagctaacgcgtgaaattgaccgcctggggagtacggtcgcaagattaaaactcaaaggaattgacggggacccgcacaagcggtggatgatgtggattaattcgatgcaacgcgaagaaccttacctggtcttgacatgtacggaatcctccagagacggaggagtgccttcgggagccgtaacacaggtgctgcatggctgtcgtcagctcgtgtcgtgagatgttgggttaagtcccgcaacgagcgcaacccttgtcattagttgccatcatttagttgggcactctaatgagactgccggtgacaagccggaggaaggtggggatgacgtcaagtcctcatggcccttatgaccagggcttcacacgtcatacaatggtcggtacagagggtagccaagccgcgaggtggagccaatctcacaaaaccgatcgtagtccggattgcactctgcaactcgagtgcatgaagtcggaatcgctagtaatcgcaggtcagcatactgcggtgaatacgttcccgggtcttgtacacaccgcccgtcacaccatgggagtgggggataccagaagtaggtagggtaaccgcaaggagtccgcttaccacggtatgcttcatgactggggtgaagtcgtaacaaggtagccgtaggggaacctgcggctggatcacctccttt

SEQ ID NO: 930 - DNA, 1536 bp, artificial sequence
  GCF_004078555.1_02409_[Lactobacillus]_paracasei
taagagtttgatcctggctcagattgaacgctggcggcatgctttacacatgcaagtcggacggcagcacagggaagcttgcttctcgggtggcgagtggcgaacgggtgagtaacatatcggaacgtaccgggtagcgggggataactgatcgaaagatcagctaataccgcatacgtcttgagagggaaagcaggggaccttcgggccttgcgctatccgagcggccgatatctgattagctggttggcggggtaaaggcccaccaaggcgacgatcagtagcgggtctgagaggatgatccgccacactgggactgagacacggtccagactcctacgggaggcagcagtggggaattttggacaatgggcgcaagcctgatccagccatgccgcgtgtctgaagaaggccttcgggttgtaaaggacttttgtcagggaagaaaaggccgttgccaatatcggcggccgatgacggtacctgaagaataagcaccggctaactacgtgccagcagccgcggtaatacgtagggtgcgagcgttaatcggaattactgggcgtaaagcgggcgcagacggttacttaagcaggatgtgaaatccccgggctcaacccgggaactgcgttctgaactgggtgactcgagtgtgtcagagggaggtggaattccacgtgtagcagtgaaatgcgtagagatgtggaggaataccgatggcgaaggcagcctcctgggataacactgacgttcatgtccgaaagcgtgggtagcaaacaggattagataccctggtagtccacgccctaaacgatgtcaattagctgttgggcaacttgattgcttggtagcgtagctaacgcgtgaaattgaccgcctggggagtacggtcgcaagattaaaactcaaaggaattgacggggacccgcacaagcggtggatgatgtggattaattcgatgcaacgcgaagaaccttacctggttttgacatgtgcggaatcctccggagacggaggagtgccttcgggagccgtaacacaggtgctgcatggctgtcgtcagctcgtgtcgtgagatgttgggttaagtcccgcaacgagcgcaacccttgtcattagttgccatcattcggttgggcactctaatgagactgccggtgacaagccggaggaaggtggggatgacgtcaagtcctcatggcccttataaccagggcttcacacgtcatacaatggtcggtacagagggtagccaagccgcgaggcggagccaatctcacaaaaccgatcgtagtccggattgcactctgcaactcgagtgcatgaagtcggaatcgctagtaatcgcaggtcagcatactgcggtgaatacgttcccgggtcttgtacacaccgcccgtcacaccatgggagtgggggataccagaagtaggtagggtaaccgcaaggagtccgcttaccacggtatgcttcatgactggggtgaagtcgtaacaaggtagccgtaggggaacctgcggctggatcacctccttt

SEQ ID NO: 931 - DNA, 1472 bp, artificial sequence
  GCF_000010005.1_00155_[Lactobacillus]_reuteri
attccggttgatcctgccggaggccattgctatcggagtccgatttagccatgctagtcgcacgggcttagacccgtggcgtatagctcagtaacacgtggccaaactaccctatagaccatgataacctcgggaaactgaggctaatcgtggatatcgcattcacgcttgaactgccgaatgcgagaaacgttccggcgctataggatgtggctgcggccgattaggtagacggtggggtaacggcccaccgtgccagtaatcggtacgggtggtgacagccagaacccggagacggtatctgagacaagataccgggccctacggggcgcagcaggcgcgaaacctttacactgcacgacagtgcgatagggggactccgagtgcgagggcatatagccctcgcttttctcgaccgtaaggtggtcgacgaataaggactgggcaagaccggtgccagccgccgcggtaataccggcagtccgagtgatggccgctgttattgggcctaaagcgtccgtagcttgccgtgaaagtctatcgggaaatcgacgcgctcaacgcgtcggcttccggtggaaactgcacggcttggggccggaagactcagcgggtacgtctggggtaggagtgaaatcctgtaatcctggacggaccaccaatggcgaaagcacgctgagaagccggacccgacagtgagggacgaaagccagggtctcgaaccggattagatacccgggtagtcctggccgtaaacgatgctcgttaggtctgccgtgcactacgagtgcacggtgagccgaagtgaagacgataaacgagccgcctgggaagtacgtccgcaaggatgaaacttaaaggaattggcgggggagcaccacaaccggaggagcctgcggtttaattggactcaacgccggacatctcaccagtcccgacagtaataacgacggtcagcttgacgagcttacccgagttactgagaggaggtgcatggccgccgtcagctcgtaccgtgaggcatcctgttaagtcaggtaacgagcgagacccgcatccgtagttgccagcgataccccgaggtagtcgggtacactacggagaccgccgacgctaagtcggaggaaggaacgggcaacggtaggtcagtatgccccgaatggactgggcaacacgcgggctacaatggtcgagacaatgggtcgcgataccgagaggtagagctaatctcccaaactcggtcgtagttcggattgtgggctgaaactcgcccacatgaagctggattcggtagtaatcgcgtgtcagaagcgcgcggtgaatacgtccctgctccttgcacacaccgcccgtcaaagcacccgagtgaggtccggatgaggccatcatgcgatggtcaaatctgggcttcgcaagggggcttaagtcgtaacaaggtagccgtagaggaatctgcggctggatcacctcct

SEQ ID NO: 932 - DNA, 1473 bp, artificial sequence
  GCF_000010005.1_00291_[Lactobacillus]_reuteri
attccggttgatcctgccggaggccattgctatcggagtccgatttagccatgctagtcgcgcgggtttagacccgcggcagatagctcagtaacacgtggccaaactaccctatggacgggaataacctcgggaaactgaggctaatccccgatacagctctcagactggagtgtcgagagctggaaacgctccggcgccataggatgtggctgcggccgattaggtagacggtggggtaacggcccaccgtgcctataatcggtacgggttgtgagagcaagaacccggagacggtatctgagacaagataccgggccctacggggcgcagcaggcgcgaaacctttacactgcacgacagtgcgatagggggactccgagtgcgagggcatatagccctcgcttttctgtaccgtaaggtggtacaggaacaagtgctgggcaagaccggtgccagccgccgcggtaataccggcagcacgagtgatggccgctattattgggcctaaagcgttcgtagccggccggtcaagtctgttgggaaatcgacgcgctcaacgcgtcggcgtccagcggaaactgactggcttggggccggaagatctgaggggtacgtccggggtaggagtgaaatcccgtaatcctggacggaccaccggtagcgaaagcgcctcagaaagacggacccgacggtgaggaacgaaagctagggtctcgaaccggattagatacccgggtagtcctagctgtaaacgatgctcgctaggtgtgccgcaggctacgagcctgcgctgtgccgtagggaagccgagaagcgagccgcctgggaagtacgtctgcaaggatgaaacttaaaggaattggcgggggagcactacaaccggaggagcctgcggtttaattggactcaacgccggacatctcaccagtcccgacagcagtaatgacggtcaggttgacgactttacccgacgctgctgagaggaggtgcatggccgccgtcagctcgtaccgtgaggcgtcctgttaagtcaggcaacgagcgagacccgcactcctagttgccagcaatacccttgtggtagttgggtacactaggaggactgccaacgctaagttggaggaaggaacgggcaacggtaggtcagtatgccccgaatggactgggcaacacgcgggctacaatggtcgagacagtgggatgcggcaccgagaggtggagctaatcccctaaactcggtcgtagttcggattgtgggctgaaactcgcccacatgaagctggattcggtagtaatcgcgtgtcagaagcgcgcggtgaatacgtccctgctccttgcacacaccgcccgtcaaagcacccgagtgaggtccggatgaggccatcatgcgatggtcgaatctgggcttcgcaagggggcttaagtcgtaacaaggtagccgtaggggaatctgcggctggatcacctcct

SEQ ID NO: 933 - DNA, 1455 bp, artificial sequence
  GCF_000010005.1_00616_[Lactobacillus]_reuteri
attccggttgatcctgccggaggccattgctatcggagtccgatttagccatgctagtcgcacgggcttagacccgtggcatatagctcagtaacacgtggccaaactaccctacagaccgcaataacctcgggaaactgaggccaatagcggatataactctcatgctggagtgcagagagttagaaatgttccggcgctgtaggatgtggctgcggccgattaggtagatggtggggtaacggcccaccatgccgataatcggtacgggttgtgagagcaagaacccggagacggtatctgagacaagataccgggccctacggggcgcagcaggcgcgaaacctttacactgcacgacagtgcgatagggggactccgagtgcgagggcatatagccctcgcttttctgtaccgtaaggtggtacaggaacaaggactgggcaagaccggtgccagccgccgcggtaataccggcagtccgagtgatggccgatattattgggcctaaagcgtccgtagccggccggacaagtccgttgggaaatcgacgcgctcaacgcgtcggcgtccagcggaaactgtccggcttggggccggaagacctgaggggtacgtccggggtaggagtgaaatcctgtaatcctggacggaccaccaatggggaaaccacctcaggaagacggacccgacggtgagggacgaaagctagggtctcgaaccggattagatacccgggtagtcctagctgtaaacgatgctcgctaggtgtgccgtaggctacgagcctgcgctgcgccctagggaagccgagaagcgagccgcctgggaagtacgtctgcaaggatgaaacttaaaggaattggcgggggagcaccacaaccggaggagcctgcggtttaattggactcaacgccggacatctcaccggtcccgacagtagtaatgacagtcaggttgacgactttactcgacgctactgagaggaggtgcatggccgccgtcagctcgtaccgtgaggcgtcctgttaagtcaggcaacgagcgagacccgcacttctagttgccagcaatacccttgaggtagttgggtacactaggaggactgccgctgctaaagcggaggaaggaacgggcaacggtaggtcagtatgccccgaatggaccgggcaacacgcgggctacaatggctatgacagtgggacgcaacgccgagaggcgaagctaatctccaaacgtagtcgtagttcggattgcgggctgaaacccgcccgcatgaagctggattcggtagtaatcgcgtgtcagaagcgcgcggtgaatacgtccctgctccttgcacacaccgcccgtcaaagcacccgagtggggtccggatgaggccgtcatgcgacggtcgaatctgggctccgcaagggggcttaagtcgtaacaaggtagccgtagaggaatctg

SEQ ID NO: 934 - DNA, 965 bp, artificial sequence
  GCF_000010005.1_00648_[Lactobacillus]_reuteri
ttccggttgatcctgccggaggccattgctatcggagtccgatttagccatgctagttgcacgagtttagactcgtagcatatagctcagtaacacgtggccaaactaccctacagaccgcaataacctcgggaaactgaggccaatagcggatataactctcatgctggagtgcagagagttagaaacgttccggcgctgtaggatgtggctgcggccgattaggtagatggtggggtaacggcccaccatgccgataatcggtacaggttgtgagagcaagagcctggagacggtatctgagacaagataccgggccctacggggcgcagcaggcgcgaaacctttacactgcacgacagtgcgatagggggactccgagtgtgagggcatatagccctcgcttttctgtaccgtaaggtggttcaggaacaaggactgggcaagaccggtgccagccgccgcggtaataccggcagtccaagtgatggccgatattattgggcctaaagcgtccgtagcttgctgtgtaagtccattgggaaatcgaccagctcaactggtcggcgtccggtggaaactacacagcttggggccgagagactcaacgggtacgtccggggtaggagtgaaatcctgtaatcctggacggaccaccaatggggaaaccacgttgagagaccggacccgacagtgagggacgaaagccagggtctcgaaccggattagatacccgggtagtcctggctgtaaacaatgctcgctaggtatgtcacgcgccatgagcacgtgatgtgccgtagtgaagacgataagcgagccgcctgggaagtacgtccgcaaggatgaaacttaaaggaattggcgggggagcaccacaaccggaggagcctgcggtttaattggactcaacgccggacatctcaccggtcccgacagtagtaatgacagtcaggttgacgact

SEQ ID NO: 935 - DNA, 1471 bp, artificial sequence
  GCF_000010005.1_01145_[Lactobacillus]_reuteri
attccggttgatcctgccggaggccattgctatcggagtccgatttagccatgctagttgtacgagtttagactcgtagcatatagctcagtaacacgtggccaaactaccctatggacagcgacactctcgggaaactgaggctaatcgctgacacagcttctacgttggaattacaggaagctggaaacgctccggcgccataggatgtggctgcggccgattaggtagacggtggggtaacggcccaccgtgccaataatcggtacgggtgatgagagtcagagcccggagacggtatctgagacaagatgccgggccctacggggcgcagcaggcgcgaaacctttacactgcacgacagtgcgatagggggactccgagtgcgagggcatatagtcctcgcttttctgcaccgtaaggtggtacaggaacaagtgctgggcaagaccggtgccagccgccgcggtaataccggcagcacgagtgatggccgattttattgggcctaaagcgtccgtagccggccggacaagtttgttgggaaatccacgtgcttaacacgtgggcgtccagcgaaaactgtctggcttggggccggaagactcgaggggtacgtccggggtaggagtgaaatcccgtaatcctggacggaccgccggtggcgaaagcgcctcgagagaacggacccgacggtgagggacgaaagccagggtctcgaaccggattagatacccgggtagtcctggccgtaaacgatgtctgctaggtgtggcgcaggctacgagcctgcgctgtgccgtagggaagccgtgaagcagaccgcctgggaagtacgtccgcaaggatgaaacttaaaggaattggcgggggagcactacaaccggaggagcctgcggtttaattggactcaacgccggaaatctcaccagcaccgacaatgtgcagtgaaggtcaggttgatgaccttactggagccattgagaggaggtgcatggccgccgtcagctcgtaccgtgaggcgtcctgttaagtcaggcaacgagcgagacccgcatccttagttgccagcaacaccattggtggttgggtacactagggagactgccgctgccaaagcggaggaaggaacgggcaacggtaggtcagtatgccccgaatgtgctgggcaacacgcgggctacaatggccgagacagtgggatgcaatcccgagagggagcgctaatcccctaaactcggtcgtagttcggattgagggctgaaactcgccctcatgaagctggattcggtagtaatcgcgtgtcataagcgcgcggtgaatacgtccctgctccttgcacacaccgcccgtcaaagcacccgagtgaggtccggatgaggcctggatacccaggtcgaatctgggcttcgcaagggggcttaagtcgtaacaaggtagccgtaggggaatctgcggctggatcacctcc

SEQ ID NO: 936 - DNA, 1471 bp, artificial sequence
  GCF_000010005.1_01464_[Lactobacillus]_reuteri
attccggttgatcctgccggaggccattgctattggagtccgatttagccatgctagttgtacgagtttagactcgtagcatatagctcagtaacacgtggccaaactaccctacagaccgcaataacctcgggaaactgaggctaatagcggatacagcttccacgttggaattacaggaagctggaaacgctccggcgctgtaggatgtggctgcggccgattaggtagacggtggggtaacggcccaccgtgccaataatcggtacgggtcgtgagagcgagagcccggagacggtatctgagacaagataccgggccctacggggcgcagcaggcgcgaaacctttacactgcgcgacagcgcgatagggggactccaagtgcgagggcatatagtcctcgcttttgtacaccgtaaggtggtgtacgaataagaactgggcaagaccggtgccagccgccgcggtaataccggcagttcgagtgatggccgattttattgggcctaaagcgttcgtagctggccagtcaagtctgtcgggaaacctgctcgctcaacgagcagccgtccggcggaaactgattggcttgggaccggaagacctgaagagtacgtccggggtaggagtgaaatcctgtaatcctggacggactaccgatggcgaaagcacttcaggagcacggatccgacagtgaggaacgaaagctggggtctcgaaccggattagatacccgggtagtcccagccgtaaacgatgtctgctaggtatggcacaggctacgagcctgtgctatgccgcagcgaaggcgctaagcagaccgcctgggaagtacgttcgcaagaatgaaacttaaaggaattggcgggggagcactacaaccggaggagcctgcggtttaattggactcaacgccggaaatctcaccagcaccgacaatgtgcagtgaaggtcaggttgatgaccttactggagccattgagaggaggtgcatggccgccgtcagctcgtaccgtgaggcatcctgttaagtcaggcaacgagcgagacccgcgtccgtagttgccagcaacaccattggtggttgggtacactacggagactgccacggctaacgtggaggagggaacgggcaacggtaggtcagcatgccccgaatgtgctgggcaacacgcgggctacaatggccgggacaaagggtcgcaaccccgagagggagcgctaatcccctaaccccggtcgtagttcggattgagggctgaaactcgccctcatgaagctggattcggtagtaatcgcgtgtcataagcgcgcggtgaatacgtccctgctccttgcacacaccgcccgtcaaagcacccgagtggggtccggatgaggcctggatacccaggtcgaatctgggctccgcaagggggcttaagtcgtaacaaggtaggtctagaggaatctggacctggatcacctcc

SEQ ID NO: 937 - DNA, 1554 bp, artificial sequence
  GCF_000016825.1_00156_[Lactobacillus]_reuteri
tttggagagtttgatcctggctcaggacgaacgctggcggcgtgcctaatacatgcaagtcgagcggaccaaatcggagcttgctctgatttggtcagcggcggacgggtgagtaacacgtgggcaacctgcccgcaagaccgggataactccgggaaaccggagctaataccggataacaccgaagaccgcatggtctttggttgaaaggcggcctttggctgtcacttgcggatgggcccgcggcgcattagctagttggtgaggtaacggctcaccaaggcgacgatgcgtagccggcctgagagggtgaccggccacactgggactgagacacggcccagactcctacgggaggcagcagtagggaatcttccgcaatgggcgaaagcctgacggagcgacgccgcgtgagcgaagaaggccttcgggtcgtaaagctctgttgtgagggacgaaggggcgccgttcgaagagggcggcgcggtgacggtacctcacgagaaagccccggctaactacgtgccagcagccgcggtaatacgtagggggcgagcgttgtccggaattattgggcgtaaagcgcgcgcaggcggtcccttaagtctgatgtgaaagcccacggctcaaccgtggagggtcattggaaactggggacttgagtgcaggagaggagagcggaattccacgtgtagcggtgaaatgcgtagagatgtggaggaacaccagtggcgaaggcggctctctggcctgcaactgacgctgaggcgcgaaagcgtggggagcaaacaggattagataccctggtagtccacgccgtaaacgatgagtgctaagtgttagaggggtcacaccctttagtgctgcagctaacgcgataagcactccgcctggggagtacggccgcaaggctgaaactcaaaggaattgacgggggcccgcacaagcggtggagcatgtggtttaattcgaagcaacgcgaagaaccttaccaggtcttgacatcccctgacaacccaagagattgggcgttcccccttcgggggacagggtgacaggtggtgcatggttgtcgtcagctcgtgtcgtgagatgttgggttaagtcccgcaacgagcgcaaccctcgcctctagttgccagcattcagttgggcactctagagggactgccggcgacaagtcggaggaaggtggggatgacgtcaaatcatcatgccccttatgacctgggctacacacgtgctacaatgggcggtacaaagggctgcgaacccgcgagggggagcgaatcccaaaaagccgctctcagttcggattgcaggctgcaactcgcctgcatgaagccggaatcgctagtaatcgcggatcagcatgccgcggtgaatacgttcccgggccttgtacacaccgcccgtcacaccacgagagcttgcaacacccgaagtcggtgaggcaacccgcaagggagccagccgccgaaggtggggcaagtgattggggtgaagtcgtaacaaggtagccgtaccggaaggtgcggctggatcacctccttt

SEQ ID NO: 938 - DNA, 1553 bp, artificial sequence
  GCF_000016825.1_00290_[Lactobacillus]_reuteri
tttggagagtttgatcctggctcaggacgaacgctggcggcgtgcctaatacatgcaagtcgagcggaccgaacgggagcttgctctcgtttggtcagcggcggacgggtgagtaacacgtgggcaacctgcccgcaagaccgggataactccgggaaaccggggctaataccggataacaccgaagaccgcatggtctttggttgaaaggcggcctttggctgtcacttgcggatgggcccgcggcgcattagctagttggtgaggtaacggctcaccaaggcgacgatgcgtagccggcctgagagggtgaccggccacactgggactgagacacggcccagactcctacgggaggcagcagtagggaatcttccgcaatgggcgaaagcctgacggagcgacgccgcgtgagcgaagaaggccttcgggtcgtaaagctctgttgtgagggacgaaggggcgccgttcgaagagggcggcgcggtgacggtacctcacgagaaagccccggctaactacgtgccagcagccgcggtaatacgtagggggcgagcgttgtccggaattattgggcgtaaagcgcgcgcaggcggtcccttaagtctgatgtgaaagcccacggctcaaccgtggagggtcattggaaactgggggacttgagtgcaggagaggagagcggaattccacgtgtagcggtgaaatgcgtagagatgtggaggaacaccagtggcgaaggcggctctctggcctgcaactgacgctgaggcgcgaaagcgtggggagcaaacaggattagataccctggtagtccacgccgtaaacgatgagtgctaagtgttagaggggtcacaccctttagtgctgcagctaacgcgataagcactccgcctggggagtacggccgcaaggctgaaactcaaaggaattgacgggggcccgcacaagcggtggagcatgtggtttaattcgaagcaacgcgaagaaccttaccaggtcttgacatccctgacaacccaagagattgggcgttccccttcgggggacagggtgacaggtggtgcatggttgtcgtcagctcgtgtcgtgagatgttgggttaagtcccgcaacgagcgcaaccctcgcctctagttgccagcattcagttgggcactctagagggactgccggcgacaagtcggaggaaggtggggatgacgtcaaatcatcatgccccttatgacctgggctacacacgtgctacaatgggcggtacaaagggctgcgaacccgcgagggggagcgaatcccaaaaagccgctctcagttcggattgcaggctgcaactcgcctgcatgaagccggaatcgctagtaatcgcggatcagcatgccgcggtgaatacgttcccgggccttgtacacaccgcccgtcacaccacgagagcttgcaacacccgaagtcggtgaggcaacccgcaagggagccagccgccgaaggtggggcaagtgattggggtgaagtcgtaacaaggtagccgtaccggaaggtgcggctggatcacctccttt

SEQ ID NO: 939 - DNA, 1556 bp, artificial sequence
  GCF_000016825.1_00607_[Lactobacillus]_reuteri
tttggagagtttgatcctggctcaggacgaacgctggcggcgtgcctaatacatgcaagtcgagcggaccgaacgggagcttgctctcgtttggtcagcggcggacgggtgagtaacacgtgggcaacctgcccgcaagaccgggataactccgggaaaccggagctaataccggataacaccgaagaccgcatggtctttggttgaaaggcggcctttggctgtcacttgcggatgggcccgcggcgcattagctagttggtgaggtaacggctcaccaaggcgacgatgcgtagctggcctgagagggtgaccggccacactgggactgagacacggcccagactcctacgggaggcagcagtagggaatcttccgcaatgggcgaaagcctgacggagcgacgccgcgtgagcgaagaaggccttcgggtcgtaaagctctgttgtgagggacgaaggagcgccgttcgaagagggcggcgcggtgacggtacctcacgagaaagccccggctaactacgtgccagcagccgcggtaatacgtagggggcgagcgttgtccggaattattgggcgtaaagcgcgcgcaggcggtcccttaagtctgatgtgaaagcccacggctcaaccgtggagggtcattggaaactgggggacttgagtgcaggagaggagagcggaattccacgtgtagcggtgaaatgcgtagagatgtggaggaacaccagtggcgaaggcggctctctggcctgcaactgacgctgaggcgcgaaagcgtggggagcaaacaggattagataccctggtagtccacgccgtaaacgatgagtgctaagtgttagaggggtcacaccctttagtgctgcagctaacgcgataagcactccgcctggggagtacggccgcaaggctgaaactcaaaggaattgacgggggcccgcacaagcggtggagcatgtggtttaattcgaagcaacgcgaagaaccttaccaggtcttgacatcccctgacaacccaagagattgggcgttcccccttcggggggacagggtgacaggtggtgcatggttgtcgtcagctcgtgtcgtgagatgttgggttaagtcccgcaacgagcgcaaccctcgcctctagttgccagcattcagttgggcactctagagggactgccggcgacaagtcggaggaaggtggggatgacgtcaaatcatcatgccccttatgacctgggctacacacgtgctacaatgggcggtacaaagggctgcgaacccgcgagggggagcgaatcccaaaaagccgctctcagttcggattgcaggctgcaactcgcctgcatgaagccggaatcgctagtaatcgcggatcagcatgccgcggtgaatacgttcccgggccttgtacacaccgcccgtcacaccacgagagcttgcaacacccgaagtcggtgaggcaacccgcaagggagccagccgccgaaggtggggcaagtgattggggtgaagtcgtaacaaggtagccgtaccggaaggtgcggctggatcacctccttt

SEQ ID NO: 940 - DNA, 1554 bp, artificial sequence
  GCF_000016825.1_00640_[Lactobacillus]_reuteri
tttggagagtttgatcctggctcaggacgaacgctggcggcgtgcctaatacatgcaagtcgagcggatcaaatcggagcttgctctgatttggtcagcggcggacgggtgagtaacacgtgggcaacctgcccgcaagaccgggataactccgggaaaccggagctaataccggataacaccgaagaccgcatggtctttggttgaaaggcggcctttggctgtcacttgcggatgggcccgcggcgcattagctagttggtgaggtaacggctcaccaaggcgacgatgcgtagccggcctgagagggtgaccggccacactgggactgagacacggcccagactcctacgggaggcagcagtagggaatcttccgcaatgggcgaaagcctgacggagcgacgccgcgtgagcgaagaaggccttcgggtcgtaaagctctgttgtgagggacgaaggagcgccgttcgaagagggcggcgcggtgacggtacctcacgagaaagccccggctaactacgtgccagcagccgcggtaatacgtaggggcgagcgttgtccggaattattgggcgtaaagcgcgcgcaggcggtcccttaagtctgatgtgaaagcccacggctcaaccgtggagggtcattggaaactgggggacttgagtgcaggagaggagagcggaattccacgtgtagcggtgaaatgcgtagagatgtggaggaacaccagtggcgaaggcggctctctggcctgcaactgacgctgaggcgcgaaagcgtggggagcaaacaggattagataccctggtagtccacgccgtaaacgatgagtgctaagtgttagaggggtcacaccctttagtgctgcagctaacgcgataagcactccgcctggggagtacggccgcaaggctgaaactcaaaggaattgacgggggcccgcacaagcggtggagcatgtggtttaattcgaagcaacgcgaagaaccttaccaggtcttgacatcccctgacaacccaagagattgggcgttcccccttcgggggacagggtgacaggtggtgcatggttgtcgtcagctcgtgtcgtgagatgttgggttaagtcccgcaacgagcgcaaccctcgcctctagttgccagcattcagttgggcactctagagggactgccggcgacaagtcggaggaaggtggggatgacgtcaaatcatcatgccccttatgacctgggctacacacgtgctacaatgggcggtacaaagggctgcgaacccgcgagggggagcgaatcccaaaaagccgctctcagttcggattgcaggctgcaactcgcctgcatgaagccggaatcgctagtaatcgcggatcagcatgccgcggtgaatacgttcccgggccttgtacacaccgcccgtcacaccacgagagcttgcaacacccgaagtcggtgaggcaacccgcaagggagccagccgccgaaggtggggcaagtgattggggtgaagtcgtaacaaggtagccgtaccggaaggtgcggctggatcacctccttt

SEQ ID NO: 941 - DNA, 1555 bp, artificial sequence
  GCF_000016825.1_01109_[Lactobacillus]_reuteri
tttggagagtttgatcctggctcaggacgaacgctggcggcgtgcctaatacatgcaagtcgagcggaccaaatcggagcttgctctggtttggtcagcggcggacgggtgagtaacacgtgggcaacctgcccgcaagaccgggataactccgggaaaccggggctaataccggataacaccgaagaccgcatggtctttggttgaaaggcggcctttggctgtcacttgcggatgggcccgcggcgcattagctagttggtgaggtaatggctcaccaaggcgacgatgcgtagccggcctgagagggtggacggccacactgggactgagacacggcccagactcctacgggaggcagcagtagggaatcttccgcaatgggcgaaagcctgacggagcgacgccgcgtgagcgaagaaggccttcgggtcgtaaagctctgttgtgagggacgaaggggcgccgttcgaagagggcggcgcggtgacggtacctcacgagaaagccccggctaactacgtgccagcagccgcggtaatacgtagggggcgagcgttgtccggaattattgggcgtaaagcgcgcgcaggcggtcccttaagtctgatgtgaaagcccacggctcaaccgtggagggtcattggaaactgggggacttgagggcaggagaggagagcggaattccacgtgtagcggtgaaatgcgtagagatgtggaggaacaccagtggcgaaggcggctctctggcctgcaactgacgctgaggcgcgaaagcgtggggagcaaacaggattagataccctggtagtccacgccgtaaacgatgagtgctaagtgttagaggggtcacaccctttagtgctgcagctaacgcgataagcactccgcctggggagtacggccgcaaggctgaaactcaaaggaattgacgggggcccgcacaagcggtggagcatgtggtttaattcgaagcaacgcgaagaaccttaccaggtcttgacatcccctgacaacccaagagattgggcgttccccttcggggggacagggtgacaggtggtgcatggttgtcgtcagctcgtgtcgtgagatgttgggttaagtcccgcaacgagcgcaaccctcgcctctagttgccagcattcagttgggcactctagagggactgccggcgacaagtcggaggaaggtggggatgacgtcaaatcatcatgccccttatgacctgggctacacacgtgctacaatgggcggtacaaagggctgcgaacccgcgagggggagcgaatcccaaaaagccgctctcagttcggattgcaggctgcaactcgcctgcatgaagccggaatcgctagtaatcgcggatcagcatgccgcggtgaatacgttcccgggccttgtacacaccgcccgtcacaccacgagagcttgcaacacccgaagtcggtgaggcaacccgcaagggagccagccgccgaaggtggggcaagtgattggggtgaagtcgtaacaaggtagccgtaccggaaggtgcggctggatcacctccttt

SEQ ID NO: 942 - DNA, 1555 bp, artificial sequence
  GCF_000016825.1_01430_[Lactobacillus]_reuteri
tttggagagtttgatcctggctcaggacgaacgctggcggcgtgcctaatacatgcaagtcgagcggaccaaatcggagcttgctctggtttggtcagcggcggacgggtgagtaacacgtgggcaacctgcccgcaagaccgggataactccgggaaaccggagctaataccggataacaccgaagaccgcatggtctttggttgaaaggcggcctttggctgtcacttgcggatgggcccgcggcgcattagctagttggtgaggtaatggctcaccaaggcgacgatgcgtagccggcctgagagggtggacggccacactgggactgagacacggcccagactcctacgggaggcagcagtagggaatcttccgcaatgggcgaaagcctgacggagcgacgccgcgtgagcgaagaaggccttcgggtcgtaaagctctgttgtgagggacgaaggggcgccgttcgaagagggcggcgcggtgacggtacctcacgagaaagccccggctaactacgtgccagcagccgcggtaatacgtagggggcgagcgttgtccggaattattgggcgtaaagcgcgcgcaggcggtcccttaagtctgatgtgaaagcccacggctcaaccgtggagggtcattggaaactgggggacttgagtgcaggagaggagagcggaattccacgtgtagcggtgaaatgcgtagagatgtggaggaacaccagtggcgaaggcggctctctggcctgcaactgacgctgaggcgcgaaagcgtggggagcaaacaggattagataccctggtagtccacgccgtaaacgatgagtgctaagtgttagaggggtcacaccctttagtgctgcagctaacgcgataagcactccgcctggggagtacggccgcaaggctgaaactcaaaggaattgacgggggcccgcacaagcggtggagcatgtggtttaattcgaagcaacgcgaagaaccttaccaggtcttgacatcccctgacaacccaagaaattgggcgttcccccttcgggggacagggtgacaggtggtgcatggttgtcgtcagctcgtgtcgtgagatgttgggttaagtcccgcaacgagcgcaaccctcgcctctagttgccagcattcagttgggcactctagagggactgccggcgacaagtcggaggaaggtggggatgacgtcaaatcatcatgccccttatgacctgggctacacacgtgctacaatgggcggtacaaagggctgcgaacccgcgagggggagcgaatcccaaaaagccgctctcagttcggattgcaggctgcaactcgcctgcatgaagccggaatcgctagtaatcgcggatcagcatgccgcggtgaatacgttcccgggccttgtacacaccgcccgtcacaccacgagagcttgcaacacccgaagtcggtgaggcaacccgcaagggagccagccgccgaaggtggggcaagtgattggggtgaagtcgtaacaaggtagccgtaccggaaggtgcggctggatcacctccttt

SEQ ID NO: 943 - DNA, 1539 bp, artificial sequence
  GCF_000159455.2_00054_[Lactobacillus]_reuteri
ttgaagagtttgatcatggctcagattgaacgctggcggcaggcctaacacatgcaagtcgagcggtagcacaagagagcttgctctctgggtgacgagcggcggacgggtgagtaatgtctgggaaactgcctgatggagggggataactactggaaacggtagctaataccgcatgacgtcttcggaccaaagtgggggaccttcgggcctcacgccatcagatgtgcccagatgggattagctagtaggtggggtaatggctcacctaggcgacgatctctagctggtctgagaggatgaccagccacactggaactgagacacggtccagactcctacgggaggcagcagtggggaatattgcacaatgggcgcaagcctgatgcagccatgccgcgtgtatgaagaaggccttcgggttgtaaagtactttcagcgaggaggaaggcattaaggttaataaccttagtgattgacgttactcgcagaagaagcaccggctaactccgtgccagcagccgcggtaatacggagggtgcaagcgttaatcggaattactgggcgtaaagcgcacgcaggcggtttgttaagtcagatgtgaaatccccgagcttaacttgggaactgcatttgaaactggcaagctagagtcttgtagaggggggtagaattccaggtgtagcggtgaaatgcgtagagatctggaggaataccggtggcgaaggcggccccctggacaaagactgacgctcaggtgcgaaagcgtggggagcaaacaggattagataccctggtagtccacgctgtaaacgatgtcgacttggaggttgtgcccttgaggcgtggcttccggagctaacgcgttaagtcgaccgcctggggagtacggccgcaaggttaaaactcaaatgaattgacgggggcccgcacaagcggtggagcatgtggtttaattcgatgcaacgcgaagaaccttacctactcttgacatccagagaatttgctagagatagcttagtgccttcgggaactctgagacaggtgctgcatggctgtcgtcagctcgtgttgtgaaatgttgggttaagtcccgcaacgagcgcaacccttatcctttgttgccagcgagtaatgtcgggaactcaaaggagactgccggtgataaaccggaggaaggtggggatgacgtcaagtcatcatggcccttacgagtagggctacacacgtgctacaatggcatatacaaagagaagcgaactcgcgagagcaagcggacctcataaagtatgtcgtagtccggattggagtctgcaactcgactccatgaagtcggaatcgctagtaatcgtagatcagaatgctacggtgaatacgttcccgggccttgtacacaccgcccgtcacaccatgggagtgggttgcaaaagaagtaggtagcttaaccttcgggagggcgcttaccactttgtgattcatgactggggtgaagtcgtaacaaggtaaccgtaggggaacctgcggttggatcacctcctt

SEQ ID NO: 944 - DNA, 1539 bp, artificial sequence; identical to SEQ ID NO: 943
  GCF_000159455.2_00359_[Lactobacillus]_reuteri

SEQ ID NO: 945 - DNA, 1539 bp, artificial sequence; identical to SEQ ID NO: 943
  GCF_000159455.2_01317_[Lactobacillus]_reuteri

SEQ ID NO: 946 - DNA, 1539 bp, artificial sequence; identical to SEQ ID NO: 943
  GCF_000159455.2_01494_[Lactobacillus]_reuteri

SEQ ID NO: 947 - DNA, 1539 bp, artificial sequence; identical to SEQ ID NO: 943
  GCF_000159455.2_01831_[Lactobacillus]_reuteri

SEQ ID NO: 948 - DNA, 1493 bp, artificial sequence
  GCF_000159455.2_01870_[Lactobacillus]_reuteri
acatgcaagtcgagcggatcgttccttcggggacggttagcggcggacgggtgagtaacacgtaggcaacctgcctgtaagatcgggataactaccggaaacggtagctaagaccggatgagtggttttctcgcatgaggagatcaagaaacacggggcaacctgtggcttacagatgggcctgcggcgcattagctagtaggtggggtaacggctcacctaggcgacgatgcgtagccgacctgagagggtgatcggccacactgggactgagacacggcccagactcctacgggaggcagcagtagggaatcttccgcaatggacgcaagtctgacggagcaacgccgcgtgagtgatgaaggttttcggatcgtaaagctctgttgccctagacgaacagcgaggagagtaactgctcttcgtgtgacggtataggagaagaaagccccggctaactacgtgccagcagccgcggtaatacgtagggggcaagcgttgtccggaattattgggcgtaaagcgcgcgcaggcggctgtttaagtctgatgtttaagcccggggctcaaccccggttcgcattggaaactggacggcttgagtgcaggagaggaaagcggaattccacgtgtagcggtgaaatgcgtagagatgtggaggaacaccagtggcgaaggcggctttctggcctgtaactgacgctgaggcgcgaaagcgtggggagcaaacaggattagataccctggtagtccacgccgtaaacgatgagtgctaggtgttgggggtttcgataccctcggtgccgaagtaaacacagtaagcactccgcctggggagtacgctcgcaagagtgaaactcaaaggaattgacggggacccgcacaagcagtggagtatgtggtttaattcgaagcaacgcgaagaaccttaccaggtcttgacatccctctgaatacgatagagatagcgtaggccttcgggacagaggagacaggtggtgcatggttgtcgtcagctcgtgtcgtgagatgttgggttaagtcccgcaacgagcgcaacccttgatgttagttgccagcacgtaaaggtgggcactctaagatgactgccggtgacaaaccggaggaaggtggggatgacgtcaaatcatcatgccccttatgacctgggctacacacgtactacaatggccggtacaacgggaagcgaagtcgcgagatggagcgaatctttagaagccggtctcagttcggattgcaggctgcaactcgcctgcatgaagtcggaattgctagtaatcgcggatcagcatgccgcggtgaatacgttcccgggtcttgtacacaccgcccgtcacaccacgagagtttacaacacccgaagtcggtggggtaacccgcaagggggccagccgccgaaggtggggtagatgattggggtgaagtcgtaacaaggtagccgtatcggaaggtgcggctggatcacctccttt

SEQ ID NO: 949 - DNA, 1539 bp, artificial sequence
  GCF_000159475.2_00219_[Lactobacillus]_reuteri
ttgaagagtttgatcatggctcagattgaacgctggcggcaggcctaacacatgcaagtcgagcggtagcacaagagagcttgctctctgggtgacgagcggcggacgggtgagtaatgtctgggaaactgcctgatggagggggataactactggaaacggtagctaataccgcatgacgtcttcggaccaaagtgggggaccttcgggcctcacgccatcagatgtgcccagatgggattagctagtaggtggggtaatggctcacctaggcgacgatctctagctggtctgagaggatgaccagccacactggaactgagacacggtccagactcctacgggaggcagcagtggggaatattgcacaatgggcgcaagcctgatgcagccatgccgcgtgtatgaagaaggccttcgggttgtaaagtactttcagcgaggaggaaggcattgtggttaataaccgcagtgattgacgttactcgcagaagaagcaccggctaactccgtgccagcagccgcggtaatacggagggtgcaagcgttaatcggaattactgggcgtaaagcgcacgcaggcggttgattaagtcagatgtgaaatccccgagcttaacttgggaactgcatttgaaactggtcagctagagtcttgtagaggggggtagaattccaggtgtagcggtgaaatgcgtagagatctggaggaataccggtggcgaaggcggccccctggacaaagactgacgctcaggtgcgaaagcgtggggagcaaacaggattagataccctggtagtccacgctgtaaacgatgtcgacttggaggttgtgcccttgaggcgtggcttccggagctaacgcgttaagtcgaccgcctggggagtacggccgcaaggttaaaactcaaatgaattgacgggggcccgcacaagcggtggagcatgtggtttaattcgatgcaacgcgaagaaccttacctactcttgacatccagagaatttagcagagatgctttagtgccttcgggaactctgagacaggtgctgcatggctgtcgtcagctcgtgttgtgaaatgttgggttaagtcccgcaacgagcgcaacccttatcctttgttgccagcacgtaatggtgggaactcaaaggagactgccggtgataaaccggaggaaggtggggatgacgtcaagtcatcatggcccttacgagtagggctacacacgtgctacaatggcatatacaaagagaagcgaactcgcgagagcaagcggacctcataaagtatgtcgtagtccggattggagtctgcaactcgactccatgaagtcggaatcgctagtaatcgtagatcagaatgctacggtgaatacgttcccgggccttgtacacaccgcccgtcacaccatgggagtgggttgcaaaagaagtaggtagcttaaccttcgggagggcgcttaccactttgtgattcatgactggggtgaagtcgtaacaaggtaaccgtaggggaacctgcggttggatcacctcctt

SEQ ID NO: 950 - DNA, 1539 bp, artificial sequence; identical to SEQ ID NO: 949
  GCF_000159475.2_01013_[Lactobacillus]_reuteri

SEQ ID NO: 951 - DNA, 1278 bp, artificial sequence
  GCF_000159475.2_01833_[Lactobacillus]_reuteri
ggctcacctaggcgacgatctctagctggtctgagaggatgaccagccacactggaactgagacacggtccagactcctacgggaggcagcagtggggaatattgcacaatgggcgcaagcctgatgcagccatgccgcgtgtatgaagaaggccttcgggttgtaaagtactttcagcgaggaggaaggcattgtggttaataaccacagtgattgacgttactcgcagaagaagcaccggctaactccgtgccagcagccgcggtaatacggagggtgcaagcgttaatcggaattactgggcgtaaagcgcacgcaggcggttgattaagtcagatgtgaaatccccgagcttaacttgggaactgcatttgaaactggtcagctagagtcttgtagaggggggtagaattccaggtgtagcggtgaaatgcgtagagatctggaggaataccggtggcgaaggcggccccctggacaaagactgacgctcaggtgcgaaagcgtggggagcaaacaggattagataccctggtagtccacgctgtaaacgatgtcgacttggaggttgtgcccttgaggcgtggcttccggagctaacgcgttaagtcgaccgcctggggagtacggccgcaaggttaaaactcaaatgaattgacgggggcccgcacaagcggtggagcatgtggtttaattcgatgcaacgcgaagaaccttacctactcttgacatccagagaatttgctagagatagcttagtgccttcgggaactctgagacaggtgctgcatggctgtcgtcagctcgtgttgtgaaatgttgggttaagtcccgcaacgagcgcaacccttatcctttgttgccagcacgtaatggtgggaactcaaaggagactgccggtgataaaccggaggaaggtggggatgacgtcaagtcatcatggcccttacgagtagggctacacacgtgctacaatggcatatacaaagagaagcgaactcgcgagagcaagcggacctcataaagtatgtcgtagtccggattggagtctgcaactcgactccatgaagtcggaatcgctagtaatcgtagatcagaatgctacggtgaatacgttcccgggccttgtacacaccgcccgtcacaccatgggagtgggttgcaaaagaagtaggtagcttaaccttcgggagggcgcttaccactttgtgattcatgactggggtgaagtcgtaacaaggtaaccgtaggggaacctgcggttggatcacctcctt

SEQ ID NO: 952 - DNA, 1539 bp, artificial sequence
  GCF_000159475.2_01990_[Lactobacillus]_reuteri
ttgaagagtttgatcatggctcagattgaacgctggcggcaggcctaacacatgcaagtcgagcggtagcacaagagagcttgctctctgggtgacgagcggcggacgggtgagtaatgtctgggaaactgcctgatggagggggataactactggaaacggtagctaataccgcatgacgtcttcggaccaaagtgggggaccttcgggcctcacgccatcagatgtgcccagatgggattagctagtaggtggggtaatggctcacctaggcgacgatctctagctggtctgagaggatgaccagccacactggaactgagacacggtccagactcctacgggaggcagcagtggggaatattgcacaatgggcgcaagcctgatgcagccatgccgcgtgtatgaagaaggccttcgggttgtaaagtactttcagcgaggaggaaggcattgtggttaataaccgcagtgattgacgttactcgcagaagaagcaccggctaactccgtgccagcagccgcggtaatacggagggtgcaagcgttaatcggaattactgggcgtaaagcgcacgcaggcggttgattaagtcagatgtgaaatccccgagcttaacttgggaactgcatttgaaactggtcagctagagtcttgtagaggggggtagaattccaggtgtagcggtgaaatgcgtagagatctggaggaataccggtggcgaaggcggccccctggacaaagactgacgctcaggtgcgaaagcgtggggagcaaacaggattagataccctggtagtccacgctgtaaacgatgtcgacttggaggttgtgcccttgaggcgtggcttccggagctaacgcgttaagtcgaccgcctggggagtacggccgcaaggttaaaactcaaatgaattgacgggggcccgcacaagcggtggagcatgtggtttaattcgatgcaacgcgaagaaccttacctactcttgacatccagagaatttgctagagatagcttagtgccttcgggaactctgagacaggtgctgcatggctgtcgtcagctcgtgttgtgaaatgttgggttaagtcccgcaacgagcgcaacccttatcctttgttgccagcacgtaatggtgggaactcaaaggagactgccggtgataaaccggaggaaggtggggatgacgtcaagtcatcatggcccttacgagtagggctacacacgtgctacaatggcatatacaaagagaagcgaactcgcgagagcaagcggacctcataaagtatgtcgtagtccggattggagtctgcaactcgactccatgaagtcggaatcgctagtaatcgtagatcagaatgctacggtgaatacgttcccgggccttgtacacaccgcccgtcacaccatgggagtgggttgcaaaagaagtaggtagcttaaccttcgggagggcgcttaccactttgtgattcatgactggggtgaagtcgtaacaaggtaaccgtaggggaacctgcggttggatcacctcctt

SEQ ID NO: 953 - DNA, 1539 bp, artificial sequence; identical to SEQ ID NO: 943
  GCF_000159475.2_02076_[Lactobacillus]_reuteri

SEQ ID NO: 954 - DNA, 1539 bp, artificial sequence; identical to SEQ ID NO: 943
  GCF_000159475.2_02169_[Lactobacillus]_reuteri

SEQ ID NO: 955 - DNA, 1517 bp, artificial sequence
  GCF_000168255.1_00640_[Lactobacillus]_reuteri
atggagagtttgatcctggctcaggatgaacgctagcggcaggcttaatacatgcaagtcgaggggcagcacgtcttcggatggtggcgaccggcaaacgggtgcggaacacgtacataaccaaccttatcctggaggatagcccggtgaaaaccggattaatactccatagtatattttgttcgcatgagtagaatattaaacgtaaggggataagacggatgtgcgtatgattagttagttggcggggtaacggcccaccaagaccacgatcattagctgatgtgagagcatgatcagccacatgggcactgagacacgggcccaactcctacgggaggcagcagtaaggaatattggtcaatggacgaaagtctgaaccagccatgccgcgtgaaggatgaaggtcctctggattgtaaacttcttttatctggggcgaaaaccatcttttctaagatatttgacagtaccagaagaataagcaccggctaactccgtgccagcagccgcggtaatacggagggtgcaagcgttatccggattcactgggtttaaagggtgcgcaggcggatttataagtcagaggtgaaatctgtaggcttaacctacaaactgcctttgatactatagatcttgaatgtcgctgaggtcagcggaatataacatgtagcggtgaaatgcatagatatgttatagaacaccgattgcgaaggcagctgactaaaggacgattgacgctgaggcacgaaagcgtgggtagcgaacaggattagataccctggtagtccacgccctaaacgatgattactcgacatttgcgatacgatagtaagtgtctgagcgaaagcattaagtaatccacctgggaagtacgaccgcaaggttgaaactcaaaggaattggcgggggtccgcacaagcggtggagtatgtggtttaattcgatgatacgcgaggaaccttacccgggctagaatgtgagtgacgtagattgaaaggtctatttatagcaatatacacgaaacaaggtgctgcatggttgtcgtcagctcgtgccgtgaggtgttgggttaagtcccgcaacgagcgcaacccctatcgttagttgccatcaggttaagctgggcactctaatgagactgccgccgtaaggcgcgaggaaggaggggatgatgtcaaatcatcatggcctttatgcccggggctacacacgtactacaatggtaaggacaaagagcagccacttggtgacaaggcgcgaatctcaaaaaccttatctcagttcggatcggagtctgcaactcgactccgtgaagctggaatcgctagtaatcgtagatcagcaatgctacggtgaatacgttcccggaccttgcacacaccgcccgtcaagccatgaaagctgggtgtacctaaagtcggtaaccgaaaggatccgcctagggtaaaactagtaattggggctaagtcgtaacaaggtagccgtaccggaaggtgcggctggaatacctcctt

SEQ ID NO: 956 - DNA, 1517 bp, artificial sequence
  GCF_000168255.1_00797_[Lactobacillus]_reuteri
atggagagtttgatcctggctcaggatgaacgctagcggcaggcttaatacatgcaagtcgaggggcagcacgtcttcggatggtggcgaccggcaaacgggtgcggaacacgtacataaccaaccttatcctggaggatagcccggtgaaaaccggattaatactccatagtatattttgttcgcatgagtagaatattaaacgtaaggggataagacggatgtgcgtatgattagttagttggcggggtaacggcccaccaagaccacgatcattagctgatgtgagagcatgatcagccacatgggcactgagacacgggcccaactcctacgggaggcagcagtaaggaatattggtcaatggacgaaagtctgaaccagccatgccgcgtgaaggatgaaggtcctctggattgtaaacttcttttatctggggcgaaaaccatcttttctaagatatttgacagtaccagaagaataagcaccggctaactccgtgccagcagccgcggtaatacggagggtgcaagcgttatccggattcactgggtttaaagggtgcgcaggcggatttataagtcagaggtgaaatctgtaggcttaacctacaaactgcctttgatactatagatcttgaatgtcgctgaggtcagcggaatataacatgtagcggtgaaatgcatagatatgttatagaacaccgattgcgaaggcagctgactaaaggacgattgacgctgaggcacgaaagcgtgggtagcgaacaggattagataccctggtagtccacgccctaaacgatgattactcgacatttgcgatacgatagtaagtgtctgagcgaaagcattaagtaatccacctgggaagtacgaccgcaaggttgaaactcaaaggaattggcgggggtccgcacaagcggtggagtatgtggtttaattcgatgatacgcgaggaaccttacccgggctagaatgtgagtgacgtagattgaaaggtctatttatagcaatatacacgaaacaaggtgctgcatggttgtcgtcagctcgtgccgtgaggtgttgggttaagtcccgcaacgagcgcaacccctatcgttagttgccatcaggttaagctgggcactctaatgagaccgccgccgtaaggcgcgaggaaggaggggatgatgtcaaatcatcatggcctttatgcccggggctacacacgtactacaatggtaaggacaaagagcagccacttggtgacaaggcgcgaatctcaaaaaccttatctcagttcggatcggagtctgcaactcgactccgtgaagctggaatcgctagtaatcgtagatcagcaatgctacggtgaatacgttcccggaccttgcacacaccgcccgtcaagccatgaaagctgggtgtacctaaagtcggtaaccgaaaggatccgcctagggtaaaactagtaattggggctaagtcgtaacaaggtagccgtaccggaaggtgcggctggaatacctcctt

SEQ ID NO: 957 - DNA, 1121 bp, artificial sequence
  GCF_000168255.1_01279_[Lactobacillus]_reuteri
acggccttcgggttgtaaacctctttcagcagggaagaagcgaaagtgacggtacctgcagaagaagcgccggctaactacgtgccagcagccgcggtaatacgtagggcgcgagcgttgtccggaattattgggcgtaaagagctcgtaggcggcttgtcacgtcgggtgtgaaagaccggggcttaactccggttctgcattcgatacgggctagctagagttcggtaggggagatcggaattcctggtgtagcggtgaaatgcgcagatatcaggaggaacaccggtggcgaaggcggatctctgggccgatactgacgctgaggagcgaaagcgtggggagcgaacaggattagataccctggtagtccacgccgtaaacggtgggaactaggtgttggcgacattccacgtcgtcggtgccgcagctaacgcattaagttccccgcctggggagtacggccgcaaggctaaaactcaaaggaattgacgggggcccgcacaagcagcggagcatgtggcttaattcgacgcaacgcgaagaaccttaccaaggcttgacatacaccggaaacggccagagatggtcgcccccttgtggtcggtgtacaggtggtgcatggctgtcgtcagctcgtgtcgtgagatgttgggttaagtcccgcaacgagcgcaacccttgttctgtgttgccagcatgcccttcggggtgatggggactcacaggagaccgccggggtcaactcggaggaaggtggggacgacgtcaagtcatcatgccccttatgtcttgggctgcacacgtgctacaatggcaggtacaatgagctgcgataccgtgaggtggagcgaatctcaaaaagcctgtctcagttcggattggggtctgcaactcgaccccatgaagtcggagttgctagtaatcgcagatcagcattgctgcggtgaatacgttcccgggccttgtacacaccgcccgtcacgtcacgaaagtcggtaacacccgaagccggtggcccaaccccttgtgggagggagctgtcgaaggtgggactggcgattgggacgaagtcgtaacaaggtagccgtaccggaaggtgcggctggatcacctccttt

SEQ ID NO: 958 - DNA, 1478 bp, artificial sequence
  GCF_000168255.1_02038_[Lactobacillus]_reuteri
acggagagtttgatcctggctcaggacgaacgctggcggcgtgcttaacacatgcaagtcgagcggtagtatgccttcgggtgtatgagagcggcgaacgggtgagtaacacgtgagcaatctgcccttcactctgggatagccaccggaaacggtgattaataccggatatgaccactgtcggcatcgatggtggtggaaagtttttgcggtgaaggatgggctcgcggcctatcagcttgttggtgaggtaatggctcaccaaggcttcgacgggtagccggcctgagagggtgaccggccacactgggactgagacacggcccagactcctacgggaggcagcagtggggaatattggacaatgggcgaaagcctgatccagcaacgccgcgtgagggatgacggccttcgggttgtaaacctctttcagcagggacgaagcgcaagtgacggtacctgcagaagaagcaccggccaactacgtgccagcagccgcggtaatacgtagggtgcgagcgttgtccggaattattgggcgtaaagggctcgtaggcggttggtcacgtcgggagtgaaaactcggagcttaactccgagcctgcttccgatacgggccgactagaggtatgcaggggagaacggaattcctggtgtagcggtgaaatgcgcagatatcaggaggaacaccggtggcgaaggcggttctctgggcattacctgacgctgaggagcgaaagtgtggggagcgaacaggattagataccctggtagtccacaccgtaaacgttgggcgctaggtgtgggacacattccacgtgttccgtgccgcagctaacgcattaagcgccccgcctggggagtacggccgcaaggctaaaactcaaaggaattgacgggggcccgcacaagcggcggagcatgcggattaattcgatgcaacgcgaagaaccttacctgggtttgacatataccggaaacacctagagataggtgcccttttagtcggtatacaggtggtgcatggctgtcgtcagctcgtgtcgtgagatgttgggttaagtcccgcaacgagcgcaaccctcgtcttatgttgccagcacgtaatggtggggactcataagagactgccggggtcaactcggaggaaggtggggatgacgtcaagtcatcatgccccttatgtccagggcttcacgcatgctacaatggccggtacaaagggctgcgataccgcgaggtggagcgaatcccaaaaagccggtctcagttcggattggggtctgcaactcgaccccatgaagtcggagtcgctagtaatcgcagatcagcaacgctgcggtgaatacgttcccgggccttgtacacaccgcccgtcacgtcacgaaagttggtaacacccgaagccggtggcctaacccttgtggagggagccgtcgaaggtgggacgagcgattgggacgaagtcgtaacaaggt

SEQ ID NO: 959 - DNA, 1385 bp, artificial sequence
  GCF_000168255.1_02184_[Lactobacillus]_reuteri
acggagagtttgatcctggctcaggacgaacgctggcggcgtgcttaacacatgcaagtcgagcggtagtatgccttcgggtgtatgagagcggcgaacgggtgagtaacacgtgagcaatctgcccttcactctgggatagccaccggaaacggtgattaataccggatatgaccactgtcggcatcgatggtggtggaaagtttttgcggtgaaggatgggctcgcggcctatcagcttgttggtgaggtaatggctcaccaaggcttcgacgggtagccggcctgagagggtgaccggccacactgggactgagacacggcccagactcctacgggaggcagcagtggggaatattggacaatgggcgaaagcctgatccagcaacgccgcgtgagggatgacggccttcgggttgtaaacctctttcagcagggacgaagcgcaagtgacggtacctgcagaagaagcaccggccaactacgtgccagcagccgcggtaatacgtagggtgcgagcgttgtccggaattattgggcgtaaagggctcgtaggcggttggtcacgtcgggagtgaaaactcggagcttaactccgagcctgcttccgatacgggccgactagaggtatgcaggggagaacggaattcctggtgtagcggtgaaatgcgcagatatcaggaggaacaccggtggcgaaggcggttctctgggcattacctgacgctgaggagcgaaagtgtggggagcgaacaggattagataccctggtagtccacaccgtaaacgttgggcgctaggtgtgggacacattccacgtgttccgtgccgcagctaacgcattaagcgccccgcctggggagtacggccgcaaggctaaaactcaaaggaattgacgggggcccgcacaagcggcggagcatgcggattaattcgatgcaacgcgaagaaccttacctgggtttgacatataccggaaacacctagagataggtgcccttttagtcggtatacaggtggtgcatggctgtcgtcagctcgtgtcgtgagatgttgggttaagtcccgcaacgagcgcaaccctcgtcttatgttgccagcacgtaatggtggggactcataagagactgccggggtcaactcggaggaaggtggggatgacgtcaagtcatcatgccccttatgtccagggcttcacgcatgctacaatggccggtacaaagggctgcgataccgcgaggtggagcgaatcccaaaaagccggtctcagttcggattggggtctgcaactcgaccccatgaagtcggagtcgctagtaatcgcagatcagcaacgctgcggtgaatacgttcccgggccttgtacacaccgcccgtcacgtcac

SEQ ID NO: 960 - DNA, 1514 bp, artificial sequence
  GCF_000168255.1_02216_[Lactobacillus]_reuteri
acggagagtttgatcctggctcaggacgaacgctggcggcgtgcttaacacatgcaagtcgagcggtagtatgccttcgggtgtatgagagcggcgaacgggtgagtaacacgtgagcaatctgcccttcactctgggatagccaccggaaacggtgattaataccggatatgaccactgtcggcatcgatggtggtggaaagtttttgcggtgaaggatgggctcgcggcctatcagcttgttggtgaggtaatggctcaccaaggcttcgacgggtagccggcctgagagggtgaccggccacactgggactgagacacggcccagactcctacgggaggcagcagtggggaatattggacaatgggcgaaagcctgatccagcaacgccgcgtgagggatgacggccttcgggttgtaaacctctttcagcagggacgaagcgcaagtgacggtacctgcagaagaagcaccggccaactacgtgccagcagccgcggtaatacgtagggtgcgagcgttgtccggaattattgggcgtaaagggctcgtaggcggttggtcacgtcgggagtgaaaactcggagcttaactccgagcctgcttccgatacgggccgactagaggtatgcaggggagaacggaattcctggtgtagcggtgaaatgcgcagatatcaggaggaacaccggtggcgaaggcggttctctgggcattacctgacgctgaggagcgaaagtgtggggagcgaacaggattagataccctggtagtccacaccgtaaacgttgggcgctaggtgtgggacacattccacgtgttccgtgccgcagctaacgcattaagcgccccgcctggggagtacggccgcaaggctaaaactcaaaggaattgacgggggcccgcacaagcggcggagcatgcggattaattcgatgcaacgcgaagaaccttacctgggtttgacatataccggaaacacctagagataggtgcccttttagtcggtatacaggtggtgcatggctgtcgtcagctcgtgtcgtgagatgttgggttaagtcccgcaacgagcgcaaccctcgtcttatgttgccagcacgtaatggtggggactcataagagactgccggggtcaactcggaggaaggtggggatgacgtcaagtcatcatgccccttatgtccagggcttcacgcatgctacaatggccggtacaaagggctgcgataccgcgaggtggagcgaatcccaaaaagccggtctcagttcggattggggtctgcaactcgaccccatgaagtcggagtcgctagtaatcgcagatcagcaacgctgcggtgaatacgttcccgggccttgtacacaccgcccgtcacgtcacgaaagttggtaacacccgaagccggtggcctaacccttgtggagggagccgtcgaaggtgggacgagcgattgggacgaagtcgtaacaaggtagccgtaccggaaggtgcggctggatcacctccttt

SEQ ID NO: 961 - DNA, 1521 bp, artificial sequence
  GCF_000179455.1_00609_[Lactobacillus]_reuteri
tacggagagtttgatcctggctcaggacgaacgctggcggcgtgcttaacacatgcaagtcgaacgatgaagcctagcttgctaggtggaagagtggcgaacgggtgagtaacacgtgagcaacctgcccttcactctgggatacgcactggaaacggtgtctaatactggatatgacccatcaccgcatggtgtgtgggtggaaagatttatcggtgaaggatgggctcgcggcctatcagcttgttggtgaggtagtggctcaccaaggcgacgacgggtagccggcctgagagggtgaccggccacactgggactgagacacggcccagactcctacgggaggcagcagtggggaatattgcacaatgggcgcaagcctgatgcagcaacgccgcgtgagggatgacggccttcgggttgtaaacctcttttagtagggaagaagcgaaagtgacggtacctgcagaaaaagcaccggctaactacgtgccagcagccgcggtaatacgtagggtgcaagcgttgtccggaattattgggcgtaaagagctcgtaggcggcttgtcgcgtctgctgtgaaaacccgaggctcaacctcgggcctgcagtgggtacgggcaagctagagtgcggtaggggagattggaattcctggtgtagcggtggaatgcgcagatatcaggaggaacaccgatggcgaaggcagatctctgggccgtaactgacgctgaggagcgaaagcatggggagcgaacaggattagataccctggtagtccatgccgtaaacgttgggaactagatgtagggcctgttccacgggttctgtgtcgtagctaacgcattaagttccccgcctggggagtacggccgcaaggctaaaactcaaaggaattgacgggggcccgcacaagcggcggagcatgcggattaattcgatgcaacgcgaagaaccttaccaaggcttgacatatacgagaacgggcgagagatcgtcaactctttggacactcgtaaacaggtggtgcatggttgtcgtcagctcgtgtcgtgagatgttcggttaagtccggcaacgagcgcaaccctcgtcctatgttgccagcacgttatggtgggaactcatgggatactgccgtggtcaacacggaggaaggtggggatgacgtcaaatcatcatgccccttatgtcttgggcttcacgcatgctacaatggccgatacaatgggctgcgataccgcgaggtggagcgaatcccaaaaagtcggtctcagttcggattggggtctgcaactcgaccccatgaagtcggagtcgctagtaatcgcagatcagcaacgctgcggtgaatacgttcccgggccttgtacacaccgcccgtcaagtcatgaaagtcggtaacacccgaagccggtggcctaacccttgtggagggagccgtcgaaggtgggactggtgattaggactaagtcgtaacaaggtagccgtaccggaaggtgcggctggatcacctccttt

SEQ ID NO: 962 - DNA, 1538 bp, artificial sequence
  GCF_000236455.2_00694_[Lactobacillus]_reuteri
ttgaagagtttgatcatggctcagattgaacgctggcggcaggcctaacacatgcaagtcgaacggtaacaggaagaagcttgcttctttgctgacgagtggcggacgggtgagtaatgtctgggaaactgcccgatggagggggataactactggaaacggtagctaataccgcataacgtcgcaagaccaaagagggggaccttcgggcctcttgccatcggatgtgcccagatgggattagcttgttggtgaggtaacggctcaccaaggcgacgatccctagctggtctgagaggatgaccagccacactggaactgagacacggtccagactcctacgggaggcagcagtggggaatattgcacaatgggcgcaagcctgatgcagccatgccgcgtgtatgaagaaggccttcgggttgtaaagtactttcagcggggaggaagggagtaaagttaatacctttgctcattgacgttacccgcagaagaagcaccggctaactccgtgccagcagccgcggtaatacggagggtgcaagcgttaatcggaattactgggcgtaaagcgcacgcaggcggttgattaagtcagatgtgaaatccccgggctcaacctgggaactgcatctgatactggtcagcttgagtctcgtagaggggggtagaattccaggtgtagcggtgaaatgcgtagagatctggaggaataccggtggcgaaggcggccccctggacgaagactgacgctcaggtgcgaaagcgtggggagcaaacaggattagataccctggtagtccacgccgtaaacgatgtcgacttggaggttgtgcccttgaggcgtggcttccggagctaacgcgttaagtcgaccgcctggggagtacggccgcaaggttaaaactcaaatgaattgacgggggcccgcacaagcggtggagcatgtggtttaattcgatgcaacgcgaagaaccttacctggtcttgacatccacggaagttttcagagatgagaatgtgccttcgggaaccgtgagacaggtgctgcatggctgtcgtcagctcgtgttgtgaaatgttgggttaagtcccgcaacgagcgcaacccttatcctttgttgccagcggttaggccgggaactcaaaggagactgccagtgataaactggaggaaggtggggatgacgtcaagtcatcatggcccttacgaccagggctacacacgtgctacaatggcgcatacaaagagaagcgacctcgcgagagcaagcggacctcataaagtgcgtcgtagtccggattggagtctgcaactcgactccatgaagtcggaatcgctagtaatcgtggatcagaatgccacggtgaatacgttcccgggccttgtacacaccgcccgtcacaccatgggagtgggttgcaaaagaagtaggtagcttaaccttcgggagggcgcttaccactttgtgattcatgactggggtgaagtcgtaacaaggtaaccgtaggggaacctgcggttggatcacctcctt

SEQ ID NO: 963 - DNA, 1562 bp, artificial sequence
  GCF_000236455.2_00971_[Lactobacillus]_reuteri
atgagagtttgatcctggctcaggacgaacgctggcggcatgcctaatacatgcaagtcgaacgaactttcccgatgattgaagcttgcttcatgaatcggatctaagtgagtggcggacgggtgagtaacacgtgggtaacctgcccaaaagtgggggataacatctggaaacaggtgctaataccgcataacaactactttcacatgatcgtagcttgaaagatggctctgctatcgcttttggatggacccgcggcgtattagctagttggtgagataaaggctcaccaaggcaatgatacgtagccgacctgagagggtaatcggccacattgggactgagacacggcccaaactcctacgggaggcagcagtagggaatcttccacaatgggcgaaagcctgatggagcaatgccgcgtgagtgaagaaggttttcggatcgtaaaactctgttgttgaagaagaacatgcgtgagagtaactgttcacgtactgacggtattcaaccagaaagccacggctaactacgtgccagcagccgcggtaatacgtaggtggcaagcgttgtccggatttattgggcgtaaagagaatgtaggcggtttattaagtttgaagtgaaagccctcggctcaaccgaggaagtgcttcgaaaactggtaaacttgagtgcagaagaggaaagtggaactccatgtgtagcggtggaatgcgtagatatatggaagaacaccagtggcgaaggcggctttctggtctgtaactgacgctgagattcgaaagcatgggtagcaaacaggattagataccctggtagtccatgccgtaaacgatgagtgctaagtgttggagggtttccgcccttcagtgctgcagctaacgcattaagcactccgcctggggagtacgatcgcaagattgaaactcaaaggaattgacgggggcccgcacaagcggtggagcatgtggtttaattcgaagcaacgcgaagaaccttaccaggtcttgacataccatgaaaagctaagagattagtctttcccttcggggacatggatacaggtggtgcatggttgtcgtcagctcgtgtcgtgagatgttgggttaagtcccgcaacgagcgcaacccttattatcagttgccagcattcagttgggcactctggtgagactgccggtgacaaaccggaggaaggtggggacgacgtcaaatcatcatgccccttatgacctgggctacacacgtgctacaatggtcggtacaacgtgctgcgaactcgcgagggtaagcaaatcacttaaaaccgatctcagttcggattgcaggctgcaactcgcctgcatgaagctggaatcgctagtaatcgcggatcagcatgccgcggtgaatacgttcccgggccttgtacacaccgcccgtcacaccatgagagtttgtaacacccaaagccggtggggtaacccttcggggagctagccgtctaaggtgggacaaatgattagggtgaagtcgtaacaaggtagccgtaggagaacctgcggctggatcacctcctt

SEQ ID NO: 964 - DNA, 1455 bp, artificial sequence
  GCF_000236455.2_01376_[Lactobacillus]_reuteri
agtgagtggcgaactggtgagtaacacgtgggaaacctgcccagaagtgggggataacacctggaaacagatgctaataccgcataacaactcggaccgcatggtctgagtttgaaagatggcttcggctatcacttttggatggtcccgcggcgtattagctagatggtgaggtaacggctcaccatggcaatgatacgtagccgacctgagagggtaatcggccacattgggactgagacacggcccaaactcctacgggaggcagcagtagggaatcttccacaatggacgaaagtctgatggagcaacgccgcgtgagtgaagaagggtttcggctcgtaaaactctgttgttaaagaagaacatatctgagagtaactgttcaggtattgacggtatttaaccagaaagccacggctaactacgtgccagcagccgcggtaatacgtaggtggcaagcgttgtccggatttattgggcgtaaagcgagcgcaggcggttttttaagtctgatgtgaaagccttcggctcaaccgaagaagtgcatcggaaactgggaaacttgagtgcagaagaggacagtggaactccatgtgtagcggtgaaatgcgtagatatatggaagaacaccagtggcgaaggcggctgtctggtctgtaactgacgctgaggctcgaaagtatgggtagcaaacaggattagataccctggtagtccataccgtaaacgatgaatgctaagtgttggagggtttccgcccttcagtgctgcagctaacgcattaagcattccgcctggggagtacggccgcaaggctgaaactcaaaggaattgacgggggcccgcacaagcggtggagcatgtggtttaattcgaagctacgcgaagaaccttaccaggtcttgacatactatgcaaatctaagagattagacgttcccttcggggacatggatacaggtggtgcatggttgtcgtcagctcgtgtcgtgagatgttgggttaagtcccgcaacgagcgcaacccttattatcagttgccagcattaagttgggcactctggtgagactgccggtgacaaaccggaggaaggtggggatgacgtcaaatcatcatgccccttatgacctgggctacacacgtgctacaatggatggtacaacgagttgcgaactcgcgagagcaagctaatctcttaaagccattctcagttcggattgtaggctgcaactcgcctacatgaagtcggaatcgctagtaatcgcggatcagcatgccgcggtgaatacgttcccgggccttgtacacaccgcccgtcacaccatgagagtttgtaacacccaaagtcggtggggtaaccttcgggagccaaccgcctaaggtgggacagatgattagggtgaagtcgtaacaaggtagccgtaggagaacctgcggctggatcacctcctt

SEQ ID NO: 965 - DNA, 1562 bp, artificial sequence
  GCF_000236455.2_01411_[Lactobacillus]_reuteri
tttgagagtttgatcctggctcaggacgaacgctggcggcgtgcctaatacatgcaagtcgaacgaactctggtaatgattggtgcttgcatcaagatttacatttgagtgagtggcgaactggtgagtaacacgtgggaaacctgcccagaagtgggggataacacctggaaacagatgctaataccgcataacaactcggaccgcatggtctgagtttgaaagatggcttcggctatcacttttggatggtcccgcggcgtattagctagatggtggggtaacggctcaccatggcaatgatacgtagccgacctgagagggtaatcggccacattgggactgagacacggcccaaactcctacgggaggcagcagtagggaatcttccacaatggacgaaagtctgatggagcaacgccgcgtgagtgaagaagggtttcggctcgtaaaactctgttgttaaagaagaacatatctgagagtaactgttcaggtattgacggtatttaaccagaaagccacggctaactacgtgccagcagccgcggtaatacgtaggtggcaagcgttgtccggatttattgggcgtaaagcgagcgcaggcggttttttaagtctgatgtgaaagccttcggcttaaccgaagaagtgcatcggaaactggaaaacttgagtgcagaagaggacagtggaactccatgtgtagcggtgaaatgcgtagatatatggaagaacaccagtggcgaaggcggctgtctggtctgtaactgacgctgaggctcgaaagtatgggtagcaaacaggattagataccctggtagtccataccgtaaacgatgaatgctaagtgttggagggtttccgcccttcagtgctgcagctaacgcattaagcattccgcctggggagtacggccgcaaggctgaaactcaaaggaattgacgggggcccgcacaagcggtggagcatgtggtttaattcgaagctacgcgaagaaccttaccaggtcttgacatactatgcaaatctaagagattagacgttcccttcggggacatggatacaggtggtgcatggttgtcgtcagctcgtgtcgtgagatgttgggttaagtcccgcaacgagcgcaacccttattatcagttgccagcattaagttgggcactctggtgagactgccggtgacaaaccggaggaaggtggggatgacgtcaaatcatcatgccccttatgacctgggctacacacgtgctacaatggatggtacaacgagttgcgaactcgcgagagcaagctaatctcttaaagccattctcagttcggattgtaggctgcaactcgcctacatgaagtcggaatcgctagtaatcgcggatcagcatgccgcggtgaatacgttcccgggccttgtacacaccgcccgtcacaccatgagagtttgtaacacccaaagtcggtggggtaaccttcgggagccaaccgcctaaggtgggacagatgattagggtgaagtcgtaacaaggtagccgtaggagaacctgcggctggatcacctcctt

SEQ ID NO: 966 - DNA, 1562 bp, artificial sequence
  GCF_000236455.2_01751_[Lactobacillus]_reuteri
tttgagagtttgatcctggctcaggacgaacgctggcggcgtgcctaatacatgcaagtcgaacgaactctggtaatgattggtgcttgcatcaagatttacatttgagtgagtggcgaactggtgagtaacacgtgggaaacctgcccagaagtgggggataacacctggaaacagatgctaataccgcataacaactcggaccgcatggtctgagtttgaaagatggcttcggctatcacttttggatggtcccgcggcgtattagctagatggtgaggtaacggctcaccatggcaatgatacgtagccgacctgagagggtaatcggccacattgggactgagacacggcccaaactcctacgggaggcagcagtagggaatcttccacaatggacgaaagtctgatggagcaacgccgcgtgagtgaagaagggtttcggctcgtaaaactctgttgttaaagaagaacatatctgagagtaactgttcaggtattgacggtatttaaccagaaagccacggctaactacgtgccagcagccgcggtaatacgtaggtggcaagcgttgtccggatttattgggcgtaaagcgagcgcaggcggttttttaagtctgatgtgaaagccttcggcttaaccgaagaagtgcatcggaaactggaaaacttgagtgcagaagaggacagtggaactccatgtgtagcggtgaaatgcgtagatatatggaagaacaccagtggcgaaggcggctgtctggtctgtaactgacgctgaggctcgaaagtatgggtagcaaacaggattagataccctggtagtccataccgtaaacgatgaatgctaagtgttggagggtttccgcccttcagtgctgcagctaacgcattaagcattccgcctggggagtacggccgcaaggctgaaactcaaaggaattgacgggggcccgcacaagcggtggagcatgtggtttaattcgaagctacgcgaagaaccttaccaggtcttgacatactatgcaaatctaagagattagacgttcccttcggggacatggatacaggtggtgcatggttgtcgtcagctcgtgtcgtgagatgttgggttaagtcccgcaacgagcgcaacccttattatcagttgccagcattaagttgggcactctggtgagactgccggtgacaaaccggaggaaggtggggatgacgtcaaatcatcatgccccttatgacctgggctacacacgtgctacaatggatggtacaacgagttgcgaactcgcgagagcaagctaatctcttaaagccattctcagttcggattgtaggctgcaactcgcctacatgaagtcggaatcgctagtaatcgcggatcagcatgccgcggtgaatacgttcccgggccttgtacacaccgcccgtcacaccatgagagtttgtaacacccaaagtcggtggggtaaccttcgggagccaaccgcctaaggtgggacagatgattagggtgaagtcgtaacaaggtagccgtaggagaacctgcggctggatcacctcctt

SEQ ID NO: 967 - DNA, 1570 bp, artificial sequence
  GCF_000236455.2_01892_[Lactobacillus]_reuteri
tttgagagtttgatcctggctcaggacgaacgctggcggcgtgcctaatacatgcaagtcgaacgaactctggttattgattgaaggtgcttgcacctgattgatttaacatttgagtgagtggcgaactggtgagtaacacgtaggaaacctgcccagaagcgggggataacacctggaaacagatgctaataccgcataacaactcggaccgcatggtctgagcttgaaagatggcttcggctatcacttttggatggtcctgcggcgtattagctagatggtgaggtaaaggctcaccatggcaatgatacgtagccgacctgagagggtaatcggccacattgggactgagacacggcccaaactcctacgggaggcagcagtagggaatcttccacaatggacgaaagtctgatggagcaacgccgcgtgagtgaagaagggtttcggctcgtaaaactctgttgttagagaagaacatatctgagagtaactgttcaggtattgacggtatctaaccagaaagccacggctaactacgtgccagcagccgcggtaatacgtaggtggcaagcgttgtccggatttattgggcgtaaagcgagcgcaggcggttttttaagtctgatgtgaaagccttcggcttaaccggagaagtgcatcggaaactgggaaacttgagtgcagaagaggacagtggaactccatgtgtagcggtgaaatgcgtagatatatggaagaacaccagtggcgaaggcggctgtctggtctgtaactgacgctgaggctcgaaagtatgggtagcaaacaggattagataccctggtagtccataccgtaaacgatgaatgctaagtgttggagggtttccgcccttcagtgctgcagctaacgcattaagcattccgcctggggagtacggtcgcaagactgaaactcaaaggaattgacgggggcccgcacaagcggtggagcatgtggtttaattcgaagctacgcgaagaaccttaccaggtcttgacatactatgcaaatctaagagattagacgttcccttcggggacatggatacaggtggtgcatggttgtcgtcagctcgtgtcgtgagatgttgggttaagtcccgcaacgagcgcaacccttattatcagttgccagcattaagttgggcactctggtgagactgccggtgacaaaccggaggaaggtggggatgacgtcaaatcatcatgccccttatgacctgggctacacacgtgctacaatggatggtacaacgagttgcgaactcgcgagagcaagctaatctcttaaaaccattctcagttcggattgtaggctgcaactcgcctacatgaagttggaatcgctagtaatcgcggatcagcatgccgcggtgaatacgttcccgggccttgtacacaccgcccgtcacaccatgagagtttgtaacacccaaagtcggtggggtaaccttcggggaccagccgcctaaggtgggacagatgattagggtgaagtcgtaacaaggtagccgtaggagaacctgcggctggatcacctcctt

SEQ ID NO: 968 - DNA, 1528 bp, artificial sequence
  GCF_000712555.1_00823_[Lactobacillus]_reuteri
atggagagtttgatcctggctcaggatgaacgctagctacaggcttaacacatgcaagtcgaggggaaacggcggagagtgcttgcactctttggacgtcgaccggcgcacgggtgagtaacgcgtatccaaccttcccattactgtgggataacctgccgaaaggcagactaataccgcatggtcttcgatgacggcatcagatttgaagtaaagatttatcggtaatggatggggatgcgtctgattagcttgttggcggggtaacggcccaccaaggcaacgatcagtaggggttctgagaggaaggtcccccacattggaactgagacacggtccaaactcctacgggaggcagcagtgaggaatattggtcaatggacgtaagtctgaaccagccaagtagcgtgcaggatgacggccctatgggttgtaaactgcttttttatgggaataaagtgagggacgtgtccctttttgcaggtaccatacgaataaggaccggctaattccgtgccagcagccgcggtaatacggaaggtccaggcgttatccggatttattgggtttaaagggagcgtaggccggagattaagtgtgttgtgaaatgtagacgctcaacgtctgacttgcagcgcatactggtttccttgagtacgcacaacgttggcggaattcgtcgtgtagcggtgaaatgcttagatatgacgaagaactccgattgcgaaggcagctgacgggagcgcaactgacgcttaagctcgaaggtgcgggtatcaaacaggattagataccctggtagtccgcacagtaaacgatggatgcccgctgttggtacctggtatcagcggctaagcgaaagcattaagcatcccacctggggagtacgccggcaacggtgaaactcaaaggaattgacgggggcccgcacaagcggaggaacatgtggtttaattcgatgatacgcgaggaaccttacccgggcttgaattgcaggagaacgatacagagatgttgaggtccttcgggactcctgtgaaggtgctgcatggttgtcgtcagctcgtgccgtgaggtgtcggcttaagtgccataacgagcgcaacccctctcttcagttgccatcaggtgatgctgggcactctggagacactgccaccgtaaggtgtgaggaaggtggggatgacgtcaaatcagcacggcccttacgtccggggctacacacgtgttacaatggccggtacagagggatggtgtaatgcaaattgcatcaaatcttgaaagccggtcccagttcggactggggtctgcaacccgaccccacgaagctggattcgctagtaatcgcgcatcagccatggcgcggtgaatacgttcccgggccttgtacacaccgcccgtcaagccatgaaagccgggggtgcctgaagtccgtgaccgcaaggatcggcctagggcaaaactggtgattggggctaagtcgtaacaaggtagccgtaccggaaggtgcggctggaacacctccttt

SEQ ID NO: 969 - DNA, 1529 bp, artificial sequence
  GCF_000758185.1_00112_[Lactobacillus]_reuteri
tatgagagtttgatcctggctcaggatgaacgctggcggcgtgcttaacacatgcaagtcgaacgaagctgcccaaaggaagttttcggatggaatttaggtagacttagtggcggacgggtgagtaacgcgtggataacctgccttatacagggggataacggagagaaatttccgctaagaccgcataagaccacagcaccgcatggtgcaggggtaaaatatttataggtataagatggatccgcgtccgattagctagttggtgaggtaaaggcccaccaaggcgacgatcggtagccggcctgagagggtgaacggccacattgggactgagacacggcccaaactcctacgggaggcagcagtggggaatattggacaatgggggaaaccctgatccagcgacgccgcgtgagtgaagaagtatttcggtatgtaaagctctatcagcagggaagaaaatgacggtacctgactaagaagccccggctaactacgtgccagcagccgcggtaatacgtagggggcaagcgttatccggatttactgggtgtaaagggagcgcagacggcaatgcaagtctgaagtgaaaggcgtgggcttaacccatgaactgctttggaaactgtatagcttgagtgtcggaggggtaagcggaattcctagtgtagcggtgaaatgcgtagatattaggaggaacaccggaggcgaaggcggcttactggacgacaactgacgttgaggctcgaaggcgtggggagcaaacaggattagataccctggtagtccacgcagtaaacgatgaatacttggtgtcggggaggtaaactcttcggtgccgcaagctaacgcattaagtattccacctggggagtacgttcgcaagaatgaaactcaaaggaattgacggggacccgcacaagcggtggagcatgtggtttaattcgaagcaacgcgaagaaccttaccaaatcttgacatactcttgaatagctttgtaatgaagctagtctttcgggacaagggatacaggtggtgcatggttgtcgtcagctcgtgtcgtgagatgttgggttaagtcccgcaacgagcgcaacccttgtcgtcagtagccagcagtaagatgggcactctgacgagacagccggagataatccggaggaaggtggggatgacgtcaaatcatcatgccccttatgatttgggctacacacgtgctacaatggcgtaaacaaagtgaagcaaagccgcgaggtcaagcaaatcacaaaaataacgtctcagttcggattgtagtctgcaactcgactatatgaagctggaatcgctagtaatcgcagatcagaatgctgcggtgaatacgttcccgggtcttgtacacaccgcccgtcacaccatgggagtcatcaatgcccgaagtcagtgacctaaccgtaaggaaggagctgccgaaggcagggaggataactggggtgaagtcgtaacaaggtagccgtatcggaaggtgcggctggatcacctccttt

SEQ ID NO: 970 - DNA, 1547 bp, artificial sequence
  GCF_001688685.2_00287_[Lactobacillus]_reuteri
tcggagagtttgatcctggctcaggacgaacgctggcggcgtgcctaatacatgcaagtcgagcgaacagatgggagcttgctccctgatgttagcggcggacgggtgagtaacacgtgggtaacctgcctgtaagactgggataactccgggaaaccggggctaataccggatggttgtttgaaccgcatggttcaaacataaaaggtggcttcggctaccacttacagatggacccgcggcgcattagctagttggtgaggtaatggctcaccaaggcaacgatgcgtagccgacctgagagggtgatcggccacactgggactgagacacggcccagactcctacgggaggcagcagtagggaatcttccgcaatggacgaaagtctgacggagcaacgccgcgtgagtgatgaaggttttcggatcgtaaagctctgttgttagggaagaacaagtaccgttcgaatagggcggtaccttgacggtacctaaccagaaagccacggctaactacgtgccagcagccgcggtaatacgtaggtggcaagcgttgtccggaattattgggcgtaaagggctcgcaggcggtttcttaagtctgatgtgaaagcccccggctcaaccggggagggtcattggaaactgggaaacttgagtgcagaagaggagagtggaattccacgtgtagcggtgaaatgcgtagagatgtggaggaacaccagtggcgaaggcgactctctggtctgtaactgacgctgaggagcgaaagcgtggggagcgaacaggattagataccctggtagtccacgccgtaaacgatgagtgctaagtgttagggggtttccgccccttagtgctgcagctaacgcattaagcactccgcctggggagtacggtcgcaagactgaaactcaaaggaattgacgggggcccgcacaagcggtggagcatgtggtttaattcgaagcaacgcgaagaaccttaccaggtcttgacatcctctgacaatcctagagataggacgtccccttcgggggcagagtgacaggtggtgcatggttgtcgtcagctcgtgtcgtgagatgttgggttaagtcccgcaacgagcgcaacccttgatcttagttgccagcattcagttgggcactctaaggtgactgccggtgacaaaccggaggaaggtggggatgacgtcaaatcatcatgccccttatgacctgggctacacacgtgctacaatggacagaacaaagggcagcgaaaccgcgaggttaagccaatcccacaaatctgttctcagttcggatcgcagtctgcaactcgactgcgtgaagctggaatcgctagtaatcgcggatcagcatgccgcggtgaatacgttcccgggccttgtacacaccacccgtcacaccacgagagtttgtaacacccgaagtcggtgaggtaaccttttaggagccagccgccgaaggtgggacagatgattggggtgaagtcgtaacaaggtagccgtatcggaaggtgcggctggatcacctccttt

SEQ ID NO: 971 - DNA, 1546 bp, artificial sequence
  GCF_001688685.2_00323_[Lactobacillus]_reuteri
tcggagagtttgatcctggctcaggacgaacgctggcggcgtgcctaatacatgcaagtcgagcggacagatgggagcttgctccctgatgttagcggcggacgggtgagtaacacgtgggtaacctgcctgtaagactgggataactccgggaaaccggggctaataccggatggttgtttgaaccgcatggttcaaacataaaaggtggcttcggctaccacttacagatggacccgcggcgcattagctagttggtgaggtaacggctcaccaaggcaacgatgcgtagccgacctgagagggtgatcggccacactgggactgagacacggcccagactcctacgggaggcagcagtagggaatcttccgcaatggacgaaagtctgacggagcaacgccgcgtgagtgatgaaggttttcggatcgtaaagctctgttgttagggaagaacaagtaccgttcgaatagggcggtaccttgacggtacctaaccagaaagccacggctaactacgtgccagcagccgcggtaatacgtaggtggcaagcgttgtccggaattattgggcgtaaagggctcgcaggcggtttcttaagtctgatgtgaaagcccccggctcaaccggggagggtcattggaaactggggaacttgagtgcagaagaggagagtggaattccacgtgtagcggtgaaatgcgtagagatgtggaggaacaccagtggcgaaggcgactctctggtctgtaactgacgctgaggagcgaaagcgtggggagcgaacaggattagataccctggtagtccacgccgtaaacgatgagtgctaagtgttagggggtttccgccccttagtgctgcagctaacgcattaagcactccgcctggggagtacggtcgcaagactgaaactcaaaggaattgacgggggcccgcacaagcggtggagcatgtggtttaattcgaagcaacgcgaagaaccttaccaggtcttgacatcctctgacaatcctagagataggacgtccccttcggggcagagtgacaggtggtgcatggttgtcgtcagctcgtgtcgtgagatgttgggttaagtcccgcaacgagcgcaacccttgatcttagttgccagcattcagttgggcactctaaggtgactgccggtgacaaaccggaggaaggtggggatgacgtcaaatcatcatgccccttatgacctgggctacacacgtgctacaatggacagaacaaagggcagcgaaaccgcgaggttaagccaatcccacaaatctgttctcagttcggatcgcagtctgcaactcgactgcgtgaagctggaatcgctagtaatcgcggatcagcatgccgcggtgaatacgttcccgggccttgtacacaccgcccgtcacaccacgagagtttgtaacacccgaagtcggtgaggtaaccttttaggagccagccgccgaaggtgggacagatgattggggtgaagtcgtaacaaggtagccgtatcggaaggtgcggctggatcacctccttt

SEQ ID NO: 972 - DNA, 1546 bp, artificial sequence
  GCF_001688685.2_00720_[Lactobacillus]_reuteri
tcggagagtttgatcctggctcaggacgaacgctggcggcgtgcctaatacatgcaagtcgagcggacaggtgggagcttgctccctgatgttagcggcggacgggtgagtaacacgtgggtaacctgcctgtaagactgggataactccgggaaaccggggctaataccggatggttgtttgaaccgcatggttcaaacataaaaggtggcttcggctaccacttacagatggacccgcggcgcattagctagttggtgaggtaacggctcaccaaggcaacgatgcgtagccgacctgagagggtgatcggccacactgggactgagacacggcccagactcctacgggaggcagcagtagggaatcttccgcaatggacgaaagtctgacggagcaacgccgcgtgagtgatgaaggttttcggatcgtaaagctctgttgttagggaagaacaagtaccgttcgaacagggcggtaccttgacggtacctaaccagaaagccacggctaactacgtgccagcagccgcggtaatacgtaggtggcaagcgttttccggaattattgggcgtaaagggctcgcaggcggtttcttaagtctgatgtgaaagcccccggctcaaccggggagggtcattggaaactggggaacttgagtgcagaagaggagagtggaattccacgtgtagcggtgaaatgcgtagagatgtggaggaacaccagtggcgaaggcgactctctggtctgtaactgacgctgaggagcgaaagcgtggggagcgaacaggattagataccctggtagtccacgccgtaaacgatgagtgctaagtgttagggggtttccgccccttagtgctgcagctaacgcattaagcactccgcctggggagtacggtcgcaagactgaaactcaaaggaattgacgggggcccgcacaagcggtggagcatgtggtttaattcgaagcaacgcgaagaaccttaccaggtcttgacatcctctgacaatcctagagataggacgtccccttcggggcagagtgacaggtggtgcatggttgtcgtcagctcgtgtcgtgagatgttgggttaagtcccgcaacgagcgcaacccttgatcttagttgccagcattcagttgggcactctaaggtgactgccggtgacaaaccggaggaaggtggggatgacgtcaaatcatcatgccccttatgacctgggctacacacgtgctacaatggacagaacaaagggcagcgaaaccgcgaggttaagccaatcccacaaatctgttctcagttcggatcgcagtctgcaactcgactgcgtgaagctggaatcgctagtaatcgcggatcagcatgccgcggtgaatacgttcccgggccttgtacacaccgcccgtcacaccacgagagtttgtaacacccgaagtcggtgaggtaaccttttaggagccagccgccgaaggtgggacagatgattggggtgaagtcgtaacaaggtagccgtatcggaaggtgcggctggatcacctccttt

SEQ ID NO: 973 - DNA, 1059 bp, artificial sequence
  GCF_001688685.2_01034_[Lactobacillus]_reuteri
atgacggtacctgaagaataagcaccggctaactacgtgccagcagccgcggtaatacgtagggtgcaagcgttaatcggaattactgggcgtaaagcgtgcgcaggcggttatgtaagacaggtgtgaaatccccgggcttaacctgggaatggcatttgtgactgcatggctagagtgtgtcagaggggggtagaattccacgtgtagcagtgaaatgcgtagagatgtggaggaataccgatggcgaaggcagccccctgggataacactgacgctcatgcacgaaagcgtggggagcaaacaggattagataccctggtagtccacgccctaaacgatgtctactagttgtcgggtcttaattgacttggtaacgcagctaacgcgtgaagtagaccgcctggggagtacggtcgcaagattaaaactcaaaggaattgacggggacccgcacaagcggtggatgatgtggattaattcgatgcaacgcgaaaaaccttacctacccttgacatgtacggaatgctgaagagatttggcagtgctcgaaagagaaccgtaacacaggtgctgcatggctgtcgtcagctcgtgtcgtgagatgttgggttaagtcccgcaacgagcgcaacccttgtcattagttgctacgaaagggcactctaatgagactgccggtgacaaaccggaggaaggtggggatgacgtcaagtcctcatggcccttatgggtagggcttcacacgtcatacaatggtacatacagagggccgccaacccgcgagggggagctaatcccagaaagtgtatcgtagtccggattgtagtctgcaactcgactacatgaagttggaatcgctagtaatcgcggatcagcatgtcgcggtgaatacgttcccgggtcttgtacacaccgcccgtcacaccatgggagcgggttttaccagaagtaggtagcctaaccgcaaggagggcgcttaccacggtaggattcgtgactggggtgaagtcgtaacaaggtagccgtatcggaaggtgcggctggatcacctccttt

SEQ ID NO: 974 - DNA, 1514 bp, artificial sequence
  GCF_001688685.2_01814_[Lactobacillus]_reuteri
tattgagagtttgatcctggctcaggacgaacgctggcggcgtgcctaacacatgcaagtcgagcgaggggagtttcttcggaaacaaacctagcggcggacgggtgagtaacacgtgggcaacctgccttatagtggggaatagcctctcgaaagggagattaataccgcataacattgcactttcgcatgaaagagcaattaaaggagcaatccgctataagatgggcccgcggcgcattagctagttggtgaggtaacggctcaccaaggcgacgatgcgtagccgacctgagagggtgatcggccacattgggactgagacacggcccagactcctacgggaggcagcagtggggaatattgcacaatgggggaaaccctgatgcagcaacgccgcgtgagtgatgaaggtcttcggatcgtaaagctctgtcttcagggacgataatgacggtacctgaggaggaagccacggctaactacgtgccagcagccgcggtaatacgtaggtggcgagcgttgtccggatttactgggcgtaaagggagcgtaggcggacttttaagtgagatgtgaaatacccgagctcaacttgggggctgcatttcaaactggaagtctagagtgcaggagaggagagtggaattcctagtgtagcggtgaaatgcgtagagattaggaagaacaccagtggcgaaggcgactctctggactgtaactgacgctgaggctcgaaagcgtggggagcaaacaggattagataccctggtagtccacgccgtaaacgatgaatactaggtgtaggggttgtcatgacctctgtgccgccgcaaacgcattaagtattccgcctggggagtacggtcgcaagattaaaactcaaaggaattgacgggggcccgcacaagcagcggagcatgtggtttaattcgaagcaacgcgaagaaccttacctagacttgacatctcctgcattactcttaatcgaggaagtcctttcggggacaggatgacaggtggtgcatggttgtcgtcagctcgtgtcgtgagatgttgggttaagtcccgcaacgagcgcaacccttattgttagttgctaccatttagttgagcactctagcgagactgcccgggttaaccgggaggaaggtggggatgacgtcaaatcatcatgccccttatgtctagggctacacacgtgctacaatggcaagtacaacgagatgcaataccgcaaggtggagctaaactataaaacttgtctcagttcggattgtaggctgaaactcgcctacatgaagctggagttgctagtaatcgcgaatcagaatgtcgcggtgaatacgttcccgggccttgtacacaccgcccgtcacaccatgagagttggcaatacccaaagttcgtgagctaacccgtaagggaggcagcgacctaaggtagggtcagcgattggggtgaagtcgtaacaaggtagccgtaggagaacctgcggctggatcacctccttt

SEQ ID NO: 975 - DNA, 1178 bp, artificial sequence
  GCF_001688685.2_01935_[Lactobacillus]_reuteri
  misc_feature (1178)..(1178): n is a, c, g, or t
tattgagagtttgatcctggctcaggacgaacgctggcggcgtgcctaacacatgcaagtcgagcgaggggagtttcttcggaaacaaacctagcggcggacgggtgagtaacacgtgggcaacctgccttatagtggggaatagcctctcgaaagggagattaataccgcataacattgcactttcgcatgaaagagcaattaaaggagcaatccgctataagatgggcccgcggcgcattagctagttggtgaggtaacggctcaccaaggcgacgatgcgtagccgacctgagagggtgatcggccacattgggactgagacacggcccagactcctacgggaggcagcagtggggaatattgcacaatgggggaaaccctgatgcagcaacgccgcgtgagtgatgaaggtcttcggatcgtaaagctctgtcttcagggacgataatgacggtacctgaggaggaagccacggctaactacgtgccagcagccgcggtaatacgtaggtggcgagcgttgtccggatttactgggcgtaaagggagcgtaggcggacttttaagtgagatgtgaaatacccgagctcaacttgggggctgcatttcaaactggaagtctagagtgcaggagaggagagtggaattcctagtgtagcggtgaaatgcgtagagattaggaagaacaccagtggcgaaggcgactctctggactgtaactgacgctgaggctcgaaagcgtggggagcaaacaggattagataccctggtagtccacgccgtaaacgatgaatactaggtgtaggggttgtcatgacctctgtgccgccgcaaacgcattaagtattccgcctggggagtacggtcgcaagattaaaactcaaaggaattgacgggggcccgcacaagcagcggagcatgtggtttaattcgaagcaacgcgaagaaccttacctagacttgacatctcctgcattactcttaatcgaggaagtcctttcggggacaggatgacaggtggtgcatggttgtcgtcagctcgtgtcgtgagatgttgggttaagtcccgcaacgagcgcaacccttattgttagttgctaccatttagttgagcactctagcgagactgcccgggttaaccgggaggaaggtggggatgacgtcaaatcatcatgn

SEQ ID NO: 976 - DNA, 1481 bp, artificial sequence
  GCF_001703935.1_02085_[Lactobacillus]_reuteri
cttgagagtttgatcctggctcagaacgaacgctggcggcaggcttaacacatgcaagtcgaacggtctcttcggaggcagtggcagacgggtgagtaacgcgtgggaatctaccttttgctacggaacaacagttggaaacgactgctaataccgtatgtgcccttcgggggaaagatttatcggcaaaggatgagcccgcgttggattagctagttggtagggtaaaggcctaccaaggcgacgatccatagctggtctgagaggatgatcagccacactgggactgagacacggcccagactcctacgggaggcagcagtggggaatattggacaatgggcgcaagcctgatccagccatgccgcgtgagtgatgaaggccctagggttgtaaagctctttcaccggtgaagataatgacggtaaccggagaagaagccccggctaacttcgtgccagcagccgcggtaatacgaagggggctagcgttgttcggatttactgggcgtaaagcgcacgtaggcggacttttaagtcaggggtgaaatcccggggctcaaccccggaactgcctttgatactggaagtcttgagtatggtagaggtgagtggaattccgagtgtagaggtgaaattcgtagatattcggaggaacaccagtggcgaaggcggctcactggaccattactgacgctgaggtgcgaaagcgtggggagcaaacaggattagataccctggtagtccacgccgtaaacgatgaatgttagccgttggggagtttactcttcggtggcgcagctaacgcattaaacattccgcctggggagtacggtcgcaagattaaaactcaaaggaattgacgggggcccgcacaagcggtggagcatgtggtttaattcgaagcaacgcgcagaaccttaccagcccttgacataccggtcgcggacacagagatgtgtctttcagttcggctggaccggatacaggtgctgcatggctgtcgtcagctcgtgtcgtgagatgttgggttaagtcccgcaacgagcgcaaccctcgcccttagttgccagcatttagttgggcactctaaggggactgccagtgataagctggaggaaggtggggatgacgtcaagtcctcatggcccttacgggctgggctacacacgtgctacaatggtggtgacagtgggcagcgagcgtgcgagcgcaagctaatctccaaaagccatctcagttcggattgcactctgcaactcgagtgcatgaagttggaatcgctagtaatcgcggatcagcatgccgcggtgaatacgttcccgggccttgtacacaccgcccgtcacaccatgggagttggttttacccgaaggcactgtgctaaccgcaaggaggcaggtgaccacggtagggtcagcgactggggtgaagtcgtaacaaggtagccgtaggggaacctgcggctggatcacctccttt

SEQ ID NO: 977 - DNA, 1525 bp, artificial sequence
  GCF_001705505.1_01306_[Lactobacillus]_reuteri
ttggagagtttgatcctggctcaggacgaacgctggcggcgtgcttaacacatgcaagtcgaacggaaaggccccttcgggggtactcgagtggcgaacgggtgagtaacacgtgggcaatctgccctgcacttcgggataagcctgggaaactgggtctaataccggataggaccacttggcgcatgccttgtggtggaaagcttttgcggtgtgggatgggcccgcggcctatcagcttgttggtggggtgatggcctaccaaggcgacgacgggtagccggcctgagagggtgtccggccacactgggactgagatacggcccagactcctacgggaggcagcagtggggaatattgcacaatgggcgcaagcctgatgcagcgacgccgcgtgggggatgacggccttcgggttgtaaacctctttcaccatcgacgaaggctcacttcgtgagttgacggtaggtggagaagaagcaccggccaactacgtgccagcagccgcggtaatacgtagggtgcgagcgttgtccggaattactgggcgtaaagagctcgtaggtggtttgtcgcgttgttcgtgaaatctcacggcttaactgtgagcgtgcgggcgatacgggcagactagagtactgcaggggagactggaattcctggtgtagcggtggaatgcgcagatatcaggaggaacaccggtggcgaaggcgggtctctgggcagtaactgacgctgaggagcgaaagcgtggggagcgaacaggattagataccctggtagtccacgccgtaaacggtgggtactaggtgtgggtttccttccttgggatccgtgccgtagctaacgcattaagtaccccgcctggggagtacggccgcaaggctaaaactcaaaggaattgacgggggcccgcacaagcggcggagcatgtggattaattcgatgcaacgcgaagaaccttacctgggtttgacatgcacaggacgcgtctagagataggcgttcccttgtggcctgtgtgcaggtggtgcatggctgtcgtcagctcgtgtcgtgagatgttgggttaagtcccgcaacgagcgcaacccttgtctcatgttgccagcgggtaatgccggggactcgtgagagactgccggggtcaactcggaggaaggtggggatgacgtcaagtcatcatgccccttatgtccagggcttcacacatgctacaatggccggtacaaagggctgcgatgccgcaaggttaagcgaatccttttaaagccggtctcagttcggatcggggtctgcaactcgaccccgtgaagtcggagtcgctagtaatcgcagatcagcaacgctgcggtgaatacgttcccgggccttgtacacaccgcccgtcacgtcatgaaagtcggtaacacccgaagccagtggcctaaccttttggagggagctgtcgaaggtgggatcggcgattgggacgaagtcgtaacaaggtagccgtaccggaaggtgcggctggatcacctccttt

SEQ ID NO: 978 - DNA, 1525 bp, artificial sequence
  GCF_001705505.1_01777_[Lactobacillus]_reuteri
ttggagagtttgatcctggctcaggacgaacgctggcggcgtgcttaacacatgcaagtcgaacggaaaggcctcttcggaggtactcgagtggcgaacgggtgagtaacacgtgggcaatctgccctgcacttcgggataagcctgggaaactgggtctaataccggataggaccacttggcgcatgccttgtggtggaaagcttttgcggtgtgggatgggcccgcggcctatcagcttgttggtggggtgatggcctaccaaggcgacgacgggtagccggcctgagagggtgtccggccacactgggactgagatacggcccagactcctacgggaggcagcagtggggaatattgcacaatgggcgcaagcctgatgcagcgacgccgcgtgggggatgacggccttcgggttgtaaacctctttcaccatcgacgaaggctcactttgtgagttgacggtaggtggagaagaagcaccggccaactacgtgccagcagccgcggtaatacgtagggtgcgagcgttgtccggaattactgggcgtaaagagctcgtaggtggtttgtcgcgttgttcgtgaaatctcacggcttaactgtgagcgtgcgggcgatacgggcagactagagtactgcaggggagactggaattcctggtgtagcggtggaatgcgcagatatcaggaggaacaccggtggcgaaggcgggtctctgggcagtaactgacgctgaggagcgaaagcgtggggagcgaacaggattagataccctggtagtccacgccgtaaacggtgggtactaggtgtgggtttccttccttgggatccgtgccgtagctaacgcattaagtaccccgcctggggagtacggccgcaaggctaaaactcaaaggaattgacgggggcccgcacaagcggcggagcatgtggattaattcgatgcaacgcgaagaaccttacctgggtttgacatgcacaggacgcgtctagagataggcgttcccttgtggcctgtgtgcaggtggtgcatggctgtcgtcagctcgtgtcgtgagatgttgggttaagtcccgcaacgagcgcaacccttgtctcatgttgccagcgggtaatgccggggactcgtgagagactgccggggtcaactcggaggaaggtggggatgacgtcaagtcatcatgccccttatgtccagggcttcacacatgctacaatggccggtacaaagggctgcgatgccgcaaggttaagcgaatccttttaaagccggtctcagttcggatcggggtctgcaactcgaccccgtgaagtcggagtcgctagtaatcgcagatcagcaacgctgcggtgaatacgttcccgggccttgtacacaccgcccgtcacgtcatgaaagtcggtaacacccgaagccagtggcctaacccttgggagggagctgtcgaaggtgggatcggcgattgggacgaagtcgtaacaaggtagccgtaccggaaggtgcggctggatcacctccttt

SEQ ID NO: 979 - DNA, 1300 bp, artificial sequence
  GCF_001705505.1_02069_[Lactobacillus]_reuteri
gatgggcccgcggcctatcagcttgttggtggggtaatggcctaccaaggcgacgacgggtagccggcctgagagggtgaccggccacactgggactgagatacggcccagactcctacgggaggcagcagtggggaatattgcacaatgggcgcaagcctgatgcagcgacgccgcgtgagggatgacggccttcgggttgtaaacctctttcaatagggacgaagcgcaagtgacggtacctatagaagaaggaccggccaactacgtgccagcagccgcggtaatacgtagggtccgagcgttgtccggaattactgggcgtaaagagctcgtaggtggtttgtcgcgttgttcgtgaaaactcacagcttaactgtgggcgtgcgggcgatacgggcagactagagtactgcaggggagactggaattcctggtgtagcggtggaatgcgcagatatcaggaggaacaccggtggcgaaggcgggtctctgggcagtaactgacgctgaggagcgaaagcgtggggagcgaacaggattagataccctggtagtccacgccgtaaacggtgggtactaggtgtgggtttccttccttgggatccgtgccgtagctaacgcattaagtaccccgcctggggagtacggccgcaaggctaaaactcaaaggaattgacgggggcccgcacaagcggcggagcatgtggattaattcgatgcaacgcgaagaaccttacctgggtttgacatgcacaggacgccggcagagatgtcggttcccttgtggcctgtgtgcaggtggtgcatggctgtcgtcagctcgtgtcgtgagatgttgggttaagtcccgcaacgagcgcaacccttgtctcatgttgccagcacgttatggtggggactcgtgagagactgccggggtcaactcggaggaaggtggggatgacgtcaagtcatcatgccccttatgtccagggcttcacacatgctacaatggccggtacaaagggctgcgatgccgtgaggtggagcgaatcctttcaaagccggtctcagttcggatcggggtctgcaactcgaccccgtgaagtcggagtcgctagtaatcgcagatcagcaacgctgcggtgaatacgttcccgggccttgtacacaccgcccgtcacgtcatgaaagtcggtaacacccgaagccggtggcctaacccttgtggagggagccgtcgaaggtgggatcggcgattgggacgaagtcgtaacaaggtagccgtaccggaaggtgcggctggatcacctccttt

SEQ ID NO: 980 - DNA, 1526 bp, artificial sequence
  GCF_001705505.1_02072_[Lactobacillus]_reuteri
ttggagagtttgatcctggctcaggacgaacgctggcggcgtgcttaacacatgcaagtcgaacggaaaggccccttcgggggtactcgagtggcgaacgggtgagtaacacgtgggcaatctgccctgcacttcgggataagcctgggaaactgggtctaataccggataggaccacttggcgcatgccttgtggtggaaagcttttgcggtgtgggatgggcccgcggcctatcagcttgttggtggggtgatggcctaccaaggcgacgacgggtagccggcctgagagggtgtccggccacactgggactgagatacggcccagactcctacgggaggcagcagtggggaatattgcacaatgggcgcaagcctgatgcagcgacgccgcgtgggggatgacggccttcgggttgtaaacctctttcaccatcgacgaaggctcacttcgtgagttgacggtaggtggagaagaagcaccggccaactacgtgccagcagccgcggtaatacgtagggtgcgagcgttgtccggaattactgggcgtaaagagctcgtaggtggtttgtcgcgttgttcgtgaaatctcacggcttaactgtgagcgtgcgggcgatacgggcagactagagtactgcaggggagactggaattcctggtgtagcggtggaatgcgcagatatcaggaggaacaccggtggcgaaggcgggtctctgggcagtaactgacgctgaggagcgaaagcgtggggagcgaacaggattagataccctggtagtccacgccgtaaacggtgggtactaggtgtgggtttccttccttgggatccgtgccgtagctaacgcattaagtaccccgcctggggagtacggccgcaaggctaaaactcaaaggaattgacgggggcccgcacaagcggcggagcatgtggattaattcgatgcaacgcgaagaaccttacctgggtttgacatgcacaggacgcgtctagagataggcgttcccttgtggcctgtgtgcaggtggtgcatggctgtcgtcagctcgtgtcgtgagatgttgggttaagtcccgcaacgagcgcaacccttgtctcatgttgccagcgggtaatgccggggactcgtgagagactgccggggtcaactcggaggaaggtggggatgacgtcaagtcatcatgccccttatgtccagggcttcacacatgctacaatggccggtacaaagggctgcgatgccgtaaggttaagcgaatccttttaaagccggtctcagttcggatcggggtctgcaactcgaccccgtgaagtcggagtcgctagtaatcgcagatcagcaacgctgcggtgaatacgttcccgggccttgtacacaccgcccgtcacgtcatgaaagtcggtaacacccgaagccagtggcctaaccctttgggagggagctgtcgaaggtgggatcggcgattgggacgaagtcgtaacaaggtagccgtaccggaaggtgcggctggatcacctccttt

SEQ ID NO: 981 - DNA, 1518 bp, artificial sequence
  GCF_001705505.1_02079_[Lactobacillus]_reuteri
tttggagagtttgatcctggctcaggacgaacgctggcggcgtgcttaacacatgcaagtcgaacggaaaggccccttcgggggtactcgagtggcgaacgggtgagtaacacgtgggtaatctgccctgcacttcgggataagcctgggaaactgggtctaataccggataggaccccgaggcgcatgccttggggtggaaagcttttgcggtgtgggatgggcccgcggcctatcagcttgttggtggggtgacggcctaccaaggcgacgacgggtagccggcctgagagggtgtccggccacactgggactgagatacggcccagactcctacgggaggcagcagtggggaatattgcacaatgggcgcaagcctgatgcagcgacgccgcgtgggggatgacggccttcgggttgtaaacctctttcagcagggacgaagcgcaagtgacggtacctgcagaagaagcaccggccaactacgtgccagcagccgcggtaatacgtagggtgcgagcgttgtccggaattactgggcgtaaagagctcgtaggtggtttgtcgcgttgttcgtgaaatctcacggcttaactgtgagcgtgcgggcgatacgggcagactggagtactgcaggggagactggaattcctggtgtagcggtggaatgcgcagatatcaggaggaacaccggtggcgaaggcgggtctctgggcagtaactgacgctgaggagcgaaagcgtggggagcgaacaggattagataccctggtagtccacgccgtaaacggtgggtactaggtgtgggtttccttccttgggatccgtgccgtagctaacgcattaagtaccccgcctggggagtacggccgcaaggctaaaactcaaaggaattgacgggggcccgcacaagcggcggagcatgtggattaattcgatgcaacgcgaagaaccttacctgggtttgacatgcacaggacgccggcagagatgtcggttcccttgtggcctgtgtgcaggtggtgcatggctgtcgtcagctcgtgtcgtgagatgttgggttaagtcccgcaacgagcgcaacccttgtctcatgttgccagcgcgtaatggcggggactcgtgagagactgccggggtcaactcggaggaaggtggggatgacgtcaagtcatcatgccccttatgtccagggcttcacacatgctacaatggccggtacaaagggctgcgatgccgcaaggttaagcgaatccttttaaagccggtctcagttcggatcggggtctgcaactcgaccccgtgaagtcggagtcgctagtaatcgcagatcagcaacgctgcggtgaatacgttcccgggccttgtacacaccgcccgtcacgtcatgaaagtcggtaacacccgaagccagtggcctaaccctttgggagggagctgtcgaaggtgggatcggcgattgggacgaagtcgtaacaaggtagccgtaccggaaggtgcggctggatcacctccttt

SEQ ID NO: 982 - DNA, 1059 bp, artificial sequence
  GCF_002112225.1_02431_[Lactobacillus]_reuteri
atgacggtaccggaagaataagcaccggctaactacgtgccagcagccgcggtaatacgtagggtgcaagcgttaatcggaattactgggcgtaaagcgtgcgcaggcggtttgctaagaccgatgtgaaatccccgggctcaacctgggaactgcattggtgactggcaggctagagtatggcagaggggggtagaattccacgtgtagcagtgaaatgcgtagagatgtggaggaataccgatggcgaaggcagccccctgggccaatactgacgctcatgcacgaaagcgtggggagcaaacaggattagataccctggtagtccacgccctaaacgatgtcaactagttgttggggattcatttccttagtaacgtagctaacgcgtgaagttgaccgcctggggagtacggtcgcaagattaaaactcaaaggaattgacggggacccgcacaagcggtggatgatgtggattaattcgatgcaacgcgaaaaaccttacctacccttgacatggtcggaatcctgctgagaggcgggagtgctcgaaagagaaccggcgcacaggtgctgcatggctgtcgtcagctcgtgtcgtgagatgttgggttaagtcccgcaacgagcgcaacccttgtccttagttgctacgcaagagcactctaaggagactgccggtgacaaaccggaggaaggtggggatgacgtcaagtcctcatggcccttatgggtagggcttcacacgtcatacaatggtcggaacagagggttgccaacccgcgagggggagctaatcccagaaaaccgatcgtagtccggattgcactctgcaactcgagtgcatgaagctggaatcgctagtaatcgcggatcagcatgccgcggtgaatacgttcccgggtcttgtacacaccgcccgtcacaccatgggagtgggttttaccagaagtggctagtctaaccgcaaggaggacggtcaccacggtaggattcatgactggggtgaagtcgtaacaaggtagccgtatcggaaggtgcggctggatcacctccttt

SEQ ID NO: 983 - DNA, 1573 bp, artificial sequence
  GCF_002253725.1_00136_[Lactobacillus]_reuteri
tatgagagtttgatcctggctcaggatgaacgccggcggtgtgcctaatacatgcaagtcgtacgcactggcccaactaattgatggtgcttgcacctgattgacgatggatcaccagtgagtggcggacgggtgagtaacacgtaggtaacctgccccggagcgggggataacatttggaaacagatgctaataccgcataacaacaaaagccgcatggcttttgtttgaaagatggctttggctatcactctgggatggacctgcggtgcattagctagttggtaaggtaacggcttaccaaggcgatgatgcatagccgagttgagagactgatcggccacaatggaactgagacacggtccatactcctacgggaggcagcagtagggaatcttccacaatgggcgcaagcctgatggagcaacaccgcgtgagtgaagaagggtttcggctcgtaaagctctgttgttggagaagaacgtgcgtgagagtaactgttcacgcagtgacggtatccaaccagaaagtcacggctaactacgtgccagcagccgcggtaatacgtaggtggcaagcgttatccggatttattgggcgtaaagcgagcgcaggcggttgcttaggtctgatgtgaaagccttcggcttaaccgaagaagtgcatcggaaaccgggcgacttgagtgcagaagaggacagtggaactccatgtgtagcggtggaatgcgtagatatatggaagaacaccagtggcgaaggcggctgtctggtctgcaactgacgctgaggctcgaaagcatgggtagcgaacaggattagataccctggtagtccatgccgtaaacgatgagtgctaggtgttggagggtttccgcccttcagtgccggagctaacgcattaagcactccgcctggggagtacgaccgcaaggttgaaactcaaaggaattgacgggggcccgcacaagcggtggagcatgtggtttaattcgaagctacgcgaagaaccttaccaggtcttgacatcttgcgctaaccttagagataaggcgttcccttcagggacgcaatgacaggtggtgcatggtcgtcgtcagctcgtgtcgtgagatgttgggttaagtcccgcaacgagcgcaacccttgttactagttgccagcattgagttgggcactctagtgagactgccggtgacaaaccggaggaaggtggggacgacgtcagatcatcatgccccttatgacctgggctacacacgtgctacaatggacggtacaacgagtcgcaaactcgcgagagtaagctaatctcttaaagccgttctcagttcggactgtaggctgcaactcgcctacacgaagtcggaatcgctagtaatcgcggatcagcatgccgcggtgaatacgttcccgggccttgtacacaccgcccgtcacaccatgggagtttgtaacgcccaaagtcggtggcctaacctttatggagggagccgcctaaggcgggacagatgactggggtgaagtcgtaacaaggtagccgtaggagaacctgcggctggatcacctccttt

SEQ ID NO: 984 - DNA, 1517 bp, artificial sequence
  GCF_002553845.1_00259_[Lactobacillus]_reuteri
tacggagagtttgatcctggctcaggatgaacgctggcggcgtgcttaacacatgcaagtcgaacggtgaacacggagcttgctctgtgggatcagtggcgaacgggtgagtaacacgtgagcaacctgcccctgactctgggataagcgctggaaacggcgtctaatactggatatgtgacgtgaccgcatggtctgcgtttggaaagatttttcggttggggatgggctcgcggcctatcagcttgttggtgaggtaatggctcaccaaggcgtcgacgggtagccggcctgagagggtgaccggccacactgggactgagacacggcccagactcctacgggaggcagcagtggggaatattgcacaatgggcgaaagcctgatgcagcaacgccgcgtgagggatgacggccttcgggttgtaaacctcttttagcagggaagaagcgaaagtgacggtacctgcagaaaaagcgccggctaactacgtgccagcagccgcggtaatacgtagggcgcagcgttatccggaattattgggcgtaaagagctcgtaggcggtttgtcgcgtctgctgtgaaatcccgaggctcaacctcggcctgcagtgggtacgggcagactagagtgcggtaggggagattggaattcctggtgtagcggtggaatgcgcagatatcaggaggaacaccgatggcgaaggcagatctctgggccgtaactgacgctgaggagcgaaagggtggggagcaaacaggcttagataccctggtagtccaccccgtaaacgttgggaactagttgtgggtccattccacggattccgtgacgcagctaacgcattaagttccccgcctggggagtacggccgcaaggctaaaactcaaaggaattgacggggacccgcacaagcggcggagcatgcggattaattcgatgcaacgcgaagaaccttaccaaggcttgacatatacgagaacgggccagaaatggtcaactctttggacactcgtaaacaggtggtgcatggttgtcgtcagctcgtgtcgtgagatgttgggttaagtcccgcaacgagcgcaaccctcgttctatgttgccagcacgtaatggtgggaactcatgggatactgccggggtcaactcggaggaaggtggggatgacgtcaatcatcatgccccttatgtcttgggcttcacgcatgctacaatggccggtacaaagggctgcaataccgtgaggtggagcgaatcccaaaaagccggtccagttcggattgaggtctgcaactcgacctcatgaagtcggagtcgctagtaatcgcagatcaggcaacgctgcggtgaatacgttccgggtcttgtacacaccgcccgtcaagtcatgaaagtcggtaacacctgaagccggtggcctaaccttgtggagggagctgtcgaaggtgggatcggtaattaggactaagtcgtaacaaggtagccgtaccggaaggtgcggctggatcacctccttt

SEQ ID NO: 985 - DNA, 1538 bp, artificial sequence
  GCF_002553855.1_00551_[Lactobacillus]_reuteri
ttgaagagtttgatcatggctcagattgaacgctggcggcaggcctaacacatgcaagtcgaacggtaacagaaagaagcttgcttctttgctgacgagtggcggacgggtgagtaatgtctgggaaactgcccgatggagggggataactactggaaacggtagctaataccgcataacgtcgcaagaccaaagagggggaccttcgggcctcttgccatcggatgtgcccagatgggattagctagtaggcggggtaacggcccacctaggcgacgatctctagctggtctgagaggatgaccagccacactggaactgagacacggtccagactcctacgggaggcagcagtggggaatattgcacaatgggcgcaagcctgatgcagccatgccgcgtgtatgaagaaggccttcgggttgtaaagtactttcagcggggaggaagggagtaaagttaatacctttgctcattgacgttacccgcagaagaagcaccggctaactccgtgccagcagccgcggtaatacggagggtgcaagcgttaatcggaattactgggcgtaaagcgcacgcaggcggtttgttaagtcagatgtgaaatccccgggctcaacctgggaactgcatctgatactggcaagcttgagtctcgtagaggggggtagaattccaggtgtagcggtgaaatgcgtagagatctggaggaataccggtggcgaaggcggccccctggacgaagactgacgctcaggtgcgaaagcgtggggagcaaacaggattagataccctggtagtccacgccgtaaacgatgtcgacttggaggttgtgcccttgaggcgtggcttccggagctaacgcgttaagtcgaccgcctggggagtacggccgcaaggttaaaactcaaatgaattgacgggggcccgcacaagcggtggagcatgtggtttaattcgatgcaacgcgaagaaccttacctggtcttgacatccacagaacattccagagatgggatggtgccttcgggaactgtgagacaggtgctgcatggctgtcgtcagctcgtgttgtgaaatgttgggttaagtcccgcaacgagcgcaacccttatcctttgttgccagcggttcggccgggaactcaaaggagactgccagtgataaactggaggaaggtggggatgacgtcaagtcatcatggcccttacgaccagggctacacacgtgctacaatggcgcatacaaagagaagcgacctcgcgagagcaagcggacctcataaagtgcgtcgtagtccggattggagtctgcaactcgactccatgaagtcggaatcgctagtaatcgtggatcagaatgccacggtgaatacgttcccgggccttgtacacaccgcccgtcacaccatgggagtgggttgcaaaagaagtaggtagcttaaccttcgggagggcgcttaccactttgtgattcatgactggggtgaagtcgtaacaaggtaaccgtaggggaacctgcggttggatcacctcctt

SEQ ID NO: 986 - DNA, 1538 bp, artificial sequence
  GCF_002553915.1_00179_[Lactobacillus]_reuteri
ttgaagagtttgatcatggctcagattgaacgctggcggcaggcctaacacatgcaagtcgaacggtaacagaaagaagcttgcttctttgctgacgagtggcggacgggtgagtaatgtctgggaaactgcccgatggagggggataactactggaaacggtagctaataccgcataatgtcgcaagaccaaagagggggaccttcgggcctcttgccatcggatgtgcccagatgggattagctagtaggcggggtaacggcccacctaggcgacgatctctagctggtctgagaggatgaccagccacactggaactgagacacggtccagactcctacgggaggcagcagtggggaatattgcacaatgggcgcaagcctgatgcagccatgccgcgtgtatgaagaaggccttcgggttgtaaagtactttcagcggggaggaagggagtaaagttaatacctttgctcattgacgttacccgcagaagaagcaccggctaactccgtgccagcagccgcggtaatacggagggtgcaagcgttaatcggaattactgggcgtaaagcgcacgcaggcggtttgttaagtcagatgtgaaatccccgggctcaacctgggaactgcatctgatactggcaagcttgagtctcgtagaggggggtagaattccaggtgtagcggtgaaatgcgtagagatctggaggaataccggtggcgaaggcggccccctggacgaagactgacgctcaggtgcgaaagcgtggggagcaaacaggattagataccctggtagtccacgccgtaaacgatgtcgacttggaggttgtgcccttgaggcgtggcttccggagctaacgcgttaagtcgaccgcctggggagtacggccgcaaggttaaaactcaaatgaattgacgggggcccgcacaagcggtggagcatgtggtttaattcgatgcaacgcgaagaaccttacctggtcttgacatccacagaacattccagagatgggatggtgccttcgggaactgtgagacaggtgctgcatggctgtcgtcagctcgtgttgtgaaatgttgggttaagtcccgcaacgagcgcaacccttatcctttgttgccagcggtccggccgggaactcaaaggagactgccagtgataaactggaggaaggtggggatgacgtcaagtcatcatggcccttacgaccagggctacacacgtgctacaatggcgcatacaaagagaagcgacctcgcgagagcaagcggacctcataaagtgcgtcgtagtccggattggagtctgcaactcgactccatgaagtcggaatcgctagtaatcgtggatcagaatgccacggtgaatacgttcccgggccttgtacacaccgcccgtcacaccatgggagtgggttgcaaaagaagtaggtagcttaaccttcgggagggcgcttaccactttgtgattcatgactggggtgaagtcgtaacaaggtaaccgtaggggaacctgcggttggatcacctcctt

SEQ ID NO: 987 - DNA, 1503 bp, artificial sequence
  GCF_002554025.1_01502_[Lactobacillus]_reuteri
atggagagtttgatcctggctcaggatgaacgctagcggcaggcctaatacatgcaagtcaaacgggtagcaataccagtggcgtacgggtgcgtaacgcgtatgcaacctacctttaactgggggacaacagcgggaaactgctgctaataccccgtaacgcaggggcacggcatcgtgatactgctaaagaagcaattcggttagagatgggcatgcgttcgattagctagttggtgcaggtaacggctcaccaaggcgacgatcgataggggctctgagaggagaatcccccacactggcactgagatacgggccagactcctacgggaggcagcagtagggaatattgggcaatggaggaaactctgacccagccatgccgcgtgcaggaagaaggccctctgggttgtaaactgcttttgatagggaagaaagaggtcatgcgtgaccagttgacggtacctatcgaataagcaccggctaactacgtgccagcagccgcggtaatacgtagggtgcaagcgttgtccggatttattgggtttaaagggtgcgtaggcggtttattaagtcagtggtgaaagacgatcgctcaacgattgcagtgccattgatactggtaaacttgagtagtgcagaggtagctggaattgatcgtgtagcggtgaaatgcatagatatgatcaagaacgccaattgcgaaggcaggttactggacactcactgacgctgaggcacgaaagtgtggggatcaaacaggattagataccctggtagtccacactgtaaacgatgataactcgctgttggcacttggtgtcagcggcttagggaaaccgttaagttatccacctggggagtacgccggcaacggtgaaactcaaaggaattgacgggggtccgcacaagcggtggagcatgtggtttaattcgatgatacgcgaggaaccttacctgggctagaatgtgagtgaagctatcagaaatggtagcgtccgcaaggacacgaaacaaggtgctgcatggctgtcgtcagctcgtgccgtgaggtgttgggttaagtcccgcaacgagcgcaacccctgcgagtagttaccagcgagtcaagtcggggactctactcggactgcctgtgcaaacagagaggaaggaggggacgacgtcaagtcatcatggcccttacgcccagggccacacacgtgctacaatggtcggtacaaagggtcgccacttggtaacaaggagccaatctctaaagccgatcacagttcggattgaggtctgcaactcgacctcatgaagctggaatcgctagtaatcgggtatcagccatgatccggtgaatacgttcccggaccttgtacacaccgcccgtcaagccatgggagtttggtgtacctgaagtcggccggttcaaggtcgattagggtaaaacaggcgactggggctaagtcgtaacaaggtagccgtaccggaaggtgcggctggaacacctccttt

SEQ ID NO: 988 - DNA, 1517 bp, artificial sequence
  GCF_002554045.1_00045_[Lactobacillus]_reuteri
atggagagtttgatcctggctcaggatgaacgctagcggcaggcctaatacatgcaagtcgaacgggattggaagcttgcttccatgagagtggcgtacgggtgcgtaacgcgtatgcaacctacctcaatcagggggatagcccgaagaaattcggattaacaccgcataaaaccacagggtagcattacctaatggtcaaatatttataggattgagatgggcatgcgtgtcattagctagttggtaaggtaacggcttaccaaggcgacgatgactaggggatctgagaggatgaccccccacactggtactgagacacggaccagactcctacgggaggcagcagtaaggaatattggtcaatggaggcaactctgaaccagccatgccgcgtgtaggaagactgccttatgggttgtaaactacttttatacgggaataaaccttagttcgtgaactaagctgaatgtaccgtaagaataaggatcggctaactccgtgccagcagccgcggtaatacggaggatccaagcgttatccggatttattgggtttaaagggagcgtaggcggcctattaagtcaggggtgaaagacggcagcttaactgtcgcagtgcctttgatactgataggcttgaatgtagttgaggtaggcggaatgtgacaagtagcggtgaaatgcatagatatgtcacagaacaccgattgcgaaggcagcttactaagctataattgacgctgaggctcgaaagcgtggggatcaaacaggattagataccctggtagtccacgccctaaacgatgataactcgatgttggcgatatacagtcagcgtccaagcgaaagcgttaagttatccacctggggagtacgcccgcaagggtgaaactcaaaggaattgacgggggcccgcacaagcggaggagcatgtggtttaattcgatgatacgcgaggaaccttacccgggcttgaaagttagtgaatcatttagagatagatgagtgagcaatcacacgaaactaggtgctgcatggctgtcgtcagctcgtgccgtgaggtgttgggttaagtcccgcaacgagcgcaacccctatgtttagttgccagcacataatggtggggactctaaacagactgcctgtgcaaacagagaggaaggaggggacgacgtcaagtcatcatggcccttacgtccggggctacacacgtgctacaatggacggtacagagggcagctacctggcaacaggatgcaaatctcaaaaagccgttcacagttcggatcggggtctgcaactcgaccccgtgaagttggattcgctagtaatcgcgtatcagcaatgacgcggtgaatacgttcccgggccttgtacacaccgcccgtcaagccatggaagttgggggcgcctaaagtctgtaaccgcaaggagcggcctagggtgaaactgataactagggctaagtcgtaacaaggtagccgtaccggaaggtgcggctggaatacctccttt

SEQ ID NO: 989 - DNA, 1502 bp, artificial sequence
  GCF_002888655.1_00338_[Lactobacillus]_reuteri
cggagagttcgatcctggctcaggatgaacgctggcggcgcgcctaacacatgcaagtcgaacggcacccctctccggagggaagcgagtggcgaacggctgagtaacacgtggagaacctgccccctcccccgggatagccgcccgaaaggacgggtaataccggataccccggggtgccgcatggcaccccggctaaagccccgacgggaggggatggctccgcggcccatcaggtagacggcggggtgacggcccaccgtgccgacaacgggtagccgggttgagagaccgaccggccagattgggactgagacacggcccagactcctacgggaggcagcagtggggaatcttgcgcaatggggggaaccctgacgcagcgacgccgcgtgcgggacggaggccttcgggtcgtaaaccgctttcagcagggaagagtcaagactgtacctgcagaagaagccccggctaactacgtgccagcagccgcggtaatacgtagggggcgagcgttatccggattcattgggcgtaaagcgcgcgtaggcggcccggcaggccgggggtcgaagcggggggctcaaccccccgaagcccccggaacctccgcggcttgggtccggtaggggagggtggaacacccggtgtagcggtggaatgcgcagatatcgggtggaacaccggtggcgaaggcggccctctgggccgagaccgacgctgaggcgcgaaagctgggggagcgaacaggattagataccctggtagtcccagccgtaaacgatggacgctaggtgtggggggacgatccccccgtgccgcagccaacgcattaagcgtcccgcctggggagtacggccgcaaggctaaaactcaaaggaattgacgggggcccgcacaagcagcggagcatgtggcttaattcgaagcaacgcgaagaaccttaccagggcttgacatatgggtgaagcgggggagaccccgtggccgagaggagcccatacaggtggtgcatggctgtcgtcagctcgtgtcgtgagatgttgggttaagtcccgcaacgagcgcaacccccgccgcgtgttgccatcgggtgatgccgggaacccacgcgggaccgccgccgtcaaggcggaggagggcggggacgacgtcaagtcatcatgccccttatgccctgggctgcacacgtgctacaatggccggtacagagggatgccaccccgcgagggggagcggatcccggaaagccggccccagttcggattgggggctgcaacccgcccccatgaagtcggagttgctagtaatcgcggatcagcatgccgcggtgaatgcgttcccgggccttgtacacaccgcccgtcacaccacccgagtcgtctgcacccgaagtcgccggcccaaccgagaggggggaggcgccgaaggtgtggagggtgaggggggtgaagtcgtaacaaggtagccgtaccggaaggtgcggctggatcacctccttt

SEQ ID NO: 990 - DNA, 1530 bp, artificial sequence
  GCF_003072625.1_00175_[Lactobacillus]_reuteri
aagagtttgatcctggctcagattgaacgctggcggcatgctttacacatgcaagtcgaacggtaacagggacttcggtctgctgacgagtggcgaacgggtgagtaatgcatcggaacgtaccgagtaatgggggataacgcatcgaaaggtgtgctaataccgcatacgccctgagggggaaagcgggggatcgaaagacctcgcgttattcgagcggccgatgccggattagctagttggtggggtaaaggctcaccaaggcgacgatccgtagcaggtctgagaggatgatctgccacactgggactgagacacggcccagactcctacgggaggcagcagtggggaattttggacaatgggggcaaccctgatccagccatgccgcgtgtctgaagaaggccttcgggttgtaaaggacttttgtcagggaggaaatccttaaggctaatacccttgggggatgacagtacctgaagaataagcaccggctaactacgtgccagcagccgcggtaatacgtagggtgcaagcgttaatcggaattactgggcgtaaagcgtgcgcaggcggtttgaaaagtcagctgtgaaagccccgggctcaacctgggaactgcggttgaaactctcaagctagagtgcgtcagaggggggtggaattccacgtgtagcagtgaaatgcgtagagatgtggaggaacaccaatggcgaaggcagccccctgggatgacactgacgctcatgcacgaaagcgtggggagcaaacaggattagataacctggtagtccacgccctaaacgatgtcgactagccgttggagatttcggtttctggtggcgcagctaacgcgtgaagtcgaccgcctggggagtacggtcgcaagattaaaactcaaaggaattgacgggggcccgcacaagcggtggatgatgtggattaattcgatgcaacgcgaaaaaccttacctggtcttgacatgtaccgaacctcgaagagatttgagggtgcccgaaagggagcggtaacacaggtgctgcatggctgtcgtcagctcgtgtcgtgagatgttgggttaagtcccgcaacgagcgcaacccttgtcattagttgccagcattaagttgggcactctaatgagactgccggtgacaaaccggaggaaggtggggatgacgtcaagtcctcatggcccttatgaccagggcttcacacgtcatacaatggtcggtacagagggtcgctaagccgcgaggtagtgccaatctcataaaaccgatcgtagtccggatcgcagtctgcaactcgactgcgtgaagtcggaatcgctagtaatcgcggatcagcatgtcgcggtgaatacgttcccgggccttgtacacaccgcccgtcacaccatgggagtggaatccgccagaagtgggtagggtaaccgtaaggagcccgcttaccacggtaggtttcatgactggggtgaagtcgtaacaaggtagccgtaggggaacctgcggctggatcacctccttt

SEQ ID NO: 991 - DNA, 1530 bp, artificial sequence; identical to SEQ ID NO: 990
  GCF_003072625.1_00310_[Lactobacillus]_reuteri

SEQ ID NO: 992 - DNA, 1530 bp, artificial sequence; identical to SEQ ID NO: 990
  GCF_003072625.1_00666_[Lactobacillus]_reuteri

SEQ ID NO: 993 - DNA, 1530 bp, artificial sequence; identical to SEQ ID NO: 990
  GCF_003072625.1_00704_[Lactobacillus]_reuteri

SEQ ID NO: 994 - DNA, 1530 bp, artificial sequence; identical to SEQ ID NO: 990
  GCF_003072625.1_01141_[Lactobacillus]_reuteri

SEQ ID NO: 995 - DNA, 1541 bp, artificial sequence
  GCF_003072625.1_01469_[Lactobacillus]_reuteri
ttgaagagtttgatcatggctcagattgaacgctggcggcaggcttaacacatgcaagtcgaacggtaacagagaatagcttgctattttgctgacgagtggcggacgggtgagtaatgcttgggaatatgccttatggtgggggacaacagttggaaacgactgctaataccgcataacatctccggatcaaagtgggggaccttcgggcctcacgccataagagtagcccaagtgggattagctagttggtaaggtaatggcttaccaaggcgacgatccctagttggtcttagaggatgaccagccacactggaactgagacacggtccagactcctacgggaggcagcagtggggaatattgcacaatgggcgcaagcctgatgcagccatgccgcgtgtgtgaagaaggctttcgggttgtaaagcactttcagcgaggaggaaaggttgtactttaatagagtgcagctgtgacgttactcgcagaagaagcaccggctaactccgtgccagcagccgcggtaatacggagggtgcgagcgttaatcggaattactgggcgtaaagcgcgcgtaggtggttaattaagtcagatgtgaaatcccagggctcaaccttggaactgcatttgaaactggttgactagagttttgtagagggtggtagaatttcaggtgtagcggtgaaatgcgtagagatctgaaggaataccagtggcgaaggcggccacctggacaaagactgacactgaggcgcgaaggcgtggggagcaaacgggattagataccccggtagtccacgcagtaaacgatgtctattagaattttgtggctatatgccgtgggattcaaagctaacgcattaaatagaccgcctggggagtacggccgcaaggttaaaactcaaatgaattgacgggggcccgcacaagcggtggagcatgtggtttaattcgatgcaacgcgaagaaccttaccatcccttgacatccagagaatcacctagagatagatgagtgccttcgggaactctgagacaggtgctgcatggctgtcgtcagctcgtgttgtgaaatgttgggttaagtcccgcaacgagcgcaacccttatccttatttgccagcgggttatgccgggaactctagggacactgccggtgataaaccggaggaaggtggggacgacgtcaagtcatcatggcccttacgggatgggctacacacgtgctacaatggcaaatacaaagggctgctcaccagcgatggtatgcgaatctcctaaagtttgtcgtagtccggatcggagtctgcaactcgactccgtgaagttggaatcgctagtaatcgtggatcagaatgccacggtgaatacgttcccgggccttgtacacaccgcccgtcacaccatgggagtgggctgcaccagaagtcattagcttaacccttcggggatggcgatgaccacggtgtggttcatgactggggtgaagtcgtaacaaggtagccctaggggaacctggggctggatcacctcctt

SEQ ID NO: 996 - DNA, 1532 bp, artificial sequence
  GCF_003174815.1_01976_[Lactobacillus]_reuteri
tgaagagtttgatcatggctcagattgaacgctggcggcaggcctaacacatgcaagtcgagcggatgaagagagcttgctctctgattcagcggcggacgggtgagtaatgcctaggaatctgcctggtagtgggggacaacgtctcgaaagggacgctaataccgcatacgtcctacgggagaaagcaggggaccttcgggccttgcgctatcagatgagcctaggtcggattagctagttggtgaggtaatggctcaccaaggcgacgatccgtaactggtctgagaggatgatcagtcacactggaactgagacacggtccagactcctacgggaggcagcagtggggaatattggacaatgggcgaaagcctgatccagccatgccgcgtgtgtgaagaaggtcttcggattgtaaagcactttaagttgggaggaagggcagtaaattaatactttgctgttttgacgttaccgacagaataagcaccggctaactctgtgccagcagccgcggtaatacagagggtgcaagcgttaatcggaattactgggcgtaaagcgcgcgtaggtggtttgttaagttggatgtgaaatccccgggctcaacctgggaactgcattcaaaactgacaagctagagtatggtagagggtggtggaatttcctgtgtagcggtgaaatgcgtagatataggaaggaacaccagtggcgaaggcgaccacctggactgatactgacactgaggtgcgaaagcgtggggagcaaacaggattagataccctggtagtccacgccgtaaacgatgtcaactagccgttgggagccttgagctcttagtggcgcagctaacgcattaagttgaccgcctggggagtacggccgcaaggttaaaactcaaatgaattgacgggggcccgcacaagcggtggagcatgtggtttaattcgaagcaacgcgaagaaccttaccaggccttgacatccaatgaactttccagagatggattggtgccttcgggaacattgagacaggtgctgcatggctgtcgtcagctcgtgtcgtgagatgttgggttaagtcccgtaacgagcgcaacccttgtccttagttaccagcacgtaatggtgggcactctaaggagactgccggtgacaaaccggaggaaggtggggatgacgtcaagtcatcatggcccttacggcctgggctacacacgtgctacaatggtcggtacagagggttgccaagccgcgaggtggagctaatcccataaaaccgatcgtagtccggatcgcagtctgcaactcgactgcgtgaagtcggaatcgctagtaatcgcgaatcagaatgtcgcggtgaatacgttcccgggccttgtacacaccgcccgtcacaccatgggagtgggttgcaccagaagtagctagtctaaccttcgggaggacggttaccacggtgtgattcatgactggggtgaagtcgtaacaaggtagccgtaggggaacctgcggctggatcacctcctt

SEQ ID NO: 997 - DNA, 1532 bp, artificial sequence
  GCF_003174815.1_02406_[Lactobacillus]_reuteri
tgaagagtttgatcatggctcagattgaacgctggcggcaggcctaacacatgcaagtcgagcggatgaagagagcttgctctctgattcagcggcggacgggtgagtaatgcctaggaatctgcctggtagtgggggacaacgtctcgaaagggacgctaataccgcatacgtcctacgggagaaagcaggggaccttcgggccttgcgctatcagatgagcctaggtcggattagctagttggtgaggtaatggctcaccaaggcgacgatccgtaactggtctgagaggatgatcagtcacactggaactgagacacggtccagactcctacgggaggcagcagtggggaatattggacaatgggcgaaagcctgatccagccatgccgcgtgtgtgaagaaggtcttcggattgtaaagcactttaagttgggaggaagggcagtaaattaatactttgctgttttgacgttaccgacagaataagcaccggctaactctgtgccagcagccgcggtaatacagagggtgcaagcgttaatcggaattactgggcgtaaagcgcgcgtaggtggtttgttaagttggatgtgaaagccccgggctcaacctgggaactgcattcaaaactgacaagctagagtatggtagagggtggtggaatttcctgtgtagcggtgaaatgcgtagatataggaaggaacaccagtggcgaaggcgaccacctggactgatactgacactgaggtgcgaaagcgtggggagcaaacaggattagataccctggtagtccacgccgtaaacgatgtcaactagccgttgggagccttgagctcttagtggcgcagctaacgcattaagttgaccgcctggggagtacggccgcaaggttaaaactcaaatgaattgacgggggcccgcacaagcggtggagcatgtggtttaattcgaagcaacgcgaagaaccttaccaggccttgacatccaatgaactttccagagatggattggtgccttcgggaacattgagacaggtgctgcatggctgtcgtcagctcgtgtcgtgagatgttgggttaagtcccgtaacgagcgcaacccttgtccttagttaccagcacgtaatggtgggcactctaaggagactgccggtgacaaaccggaggaaggtggggatgacgtcaagtcatcatggcccttacggcctgggctacacacgtgctacaatggtcggtacagagggttgccaagccgcgaggtggagctaatcccataaaaccgatcgtagtccggatcgcagtctgcaactcgactgcgtgaagtcggaatcgctagtaatcgcgaatcagaatgtcgcggtgaatacgttcccgggccttgtacacaccgcccgtcacaccatgggagtgggttgcaccagaagtagctagtctaaccttcgggaggacggttaccacggtgtgattcatgactggggtgaagtcgtaacaaggtagccgtaggggaacctgcggctggatcacctcctt

SEQ ID NO: 998 - DNA, 1532 bp, artificial sequence; identical to SEQ ID NO: 996
  GCF_003175035.1_00724_[Lactobacillus]_reuteri

SEQ ID NO: 999 - DNA, 1459 bp, artificial sequence
  GCF_003316895.1_00447_[Lactobacillus]_reuteri
ttgagagtttgatcctggctcagaacgaacgctggcggcaggcctaacacatgcaagtcgagcgagaccttcgggtctagcggcggacgggttagtaacgcgtgggaatatacccttcactacggaatagcctcgggaaactgggagtaataccgtatacgcccttttggggaaagatttatcggtgaaggattagcccgcgtctgattagatagttggtggggtaatggcctaccaagtctacgatcagtagctggtttgagaggatgatcagcaacactgggactgagacacggcccagactcctacgggaggcagcagtggggaatcttagacaatgggcgcaagcctgatctagccatgccgcgtgagtgacgaaggccttagggtcgtaaagctctttcgccagagatgataatgacagtatctggtaaagaaaccccggctaactccgtgccagcagccgcggtaatacggagggggttagcgttgttcggaattactgggcgtaaagcgcacgtaggcggattggaaagtatggggtgaaatcccagggctcaaccctggaactgccttgtaaactcccagtctagagttcgagagaggtgagtggaattccaagtgtagaggtgaaattcgtagatatttggaggaacaccagtggcgaaggcggctcactggctcgatactgacgctgaggtgcgaaagtgtggggagcaaacaggattagataccctggtagtccacaccgtaaacgatgaatgccagacgtcggggggcttgcccttcggtgtcacacctaacggattaagcattccgcctggggagtacggtcgcaagattaaaactcaaaggaattgacgggggcccgcacaagcggtggagcatgtggtttaattcgaagcaacgcgcagaaccttaccaacccttgacatcctctgaccgcctgggagaccaggttttctcgtaagagacagagtgacaggtgctgcatggctgtcgtcagctcgtgtcgtgagatgttcggttaagtccggcaacgagcgcaacccacatctttagttgccatcatttagttgggcactctagagaaactgcccgtgataagcgggaggaaggtgtggatgacgtcaagtcctcatggcccttacgggttgggctacacacgtgctacaatggcatctacaatgggttaatctccaaaagatgtctcagttcggattggggtctgcaactcgaccccatgaagtcggaatcgctagtaatcgcgtaacagcatgacgcggtgaatacgttcccgggccttgtacacaccgcccgtcacaccatgggagttgggtttacccgaaggccgtgcgccaaccagcaatgggggcagcggaccacggtgagctcagcgactggggtgaagtcgtaacaaggtagccgtaggggaacctgcggctggatcacctccttt

SEQ ID NO: 1000 - DNA, 1459 bp, artificial sequence; identical to SEQ ID NO: 999
  GCF_003316895.1_00576_[Lactobacillus]_reuteri

SEQ ID NO: 1001 - DNA, 1553 bp, artificial sequence
  GCF_003316895.1_00922_[Lactobacillus]_reuteri
tatgagagtttgatcctggctcaggacgaacgctggcggcgtgcctaatacatgcaagttgaacgcttctttcttatcgaacttcggttcaccaagaaagaagagtagcgaacgggtgagtaacacgtgggtaacctgcccatcagcgggggataacacttggaaacaggtgctaataccgcataatactttttctctcatgagtgaaagttgaaaggcgcttttgcgtcactgatggatggacccgcggtgcattagctagttggtagggtaacggcctaccaaggcaacgatgcatagccgacctgagagggtgatcggccacactgggactgagacacggcccagactcctacgggaggcagcagtagggaatcttcggcaatggacgaaagtctgaccgagcaacgccgcgtgagtgaagaaggttttcggatcgtaaaactctgttgttagagaagaacaaggatgagaagagaatgttcatcccttgacggtatctaaccagaaagccacggctaactacgtgccagcagccgcggtaatacgtaggtggcaagcgttgtccggatttattgggcgtaaagcgagcgcaggcggttctttaagtctgatgtgaaagcccccggctcaaccggggagggtcattggaaactggggaacttgagtgcagaagaggagagtggaattccatgtgtagcggtgaaatgcgtagatatatggaggaacaccagtggcgaaggcggctctctggtctgtaactgacgctgaggctcgaaagcgtggggagcaaacaggattagataccctggtagtccacgccgtaaacgatgagtgctaagtgttggagggtttccgcccttcagtgctgcagctaacgcattaagcactccgcctggggagtacgaccgcaaggttgaaactcaaaggaattgacgggggcccgcacaagcggtggagcatgtggtttaattcgaagcaacgcgaagaaccttaccaggtcttgacatcctttgaccactctagagatagagctttcccttcggggacaaagtgacaggtggtgcatggttgtcgtcagctcgtgtcgtgagatgttgggttaagtcccgcaacgagcgcaacccttattgttagttgccatcatttagttgggcactctagcgagactgccggtgacaaaccggaggaaggtggggatgacgtcaaatcatcatgccccttatgacctgggctacacacgtgctacaatgggaagtacaacgagttgcgaagtcgcgaggctaagctaatctcttaaagcttctctcagttcggattgtaggctgcaactcgcctacatgaagccggaatcgctagtaatcgcggatcagcacgccgcggtgaatacgttcccgggccttgtacacaccgcccgtcacaccacgagagtttgtaacacccgaagtcggtgaggtaaccttttggagccagccgcctaaggtgggatagatgattggggtgaagtcgtaacaaggtagccgtatcggaaggtgcggctggatcacctcctt

SEQ ID NO: 1002 - DNA, 1551 bp, artificial sequence
  GCF_003316895.1_00959_[Lactobacillus]_reuteri
ttgaagagtttgatcatggctcagattgaacgctggcggcaggcctaacacatgcaagtcgagcggaaacgacactaacaatccttcgggtgcgttaatgggcgtcgagcggcggacgggtgagtaatgcctaggaaattgccttgatgtgggggataaccattggaaacgatggctaataccgcataatgcctacgggccaaagagggggatcttcggacctctcgcgtcaagatatgcctaggtgggattagctagttggtgaggtaatggctcaccaaggcgacgatccctagctggtctgagaggatgatcagccacactggaactgagacacggtccagactcctacgggaggcagcagtggggaatattgcacaatgggcgaaagcctgatgcagccatgccgcgtgtatgaagaaggccttcgggttgtaaagtactttcagttgtgaggaagggggtgtcgttaatagcggcatctcttgacgttagcaacagaagaagcaccggctaactccgtgccagcagccgcggtaatacggagggtgcgagcgttaatcggaattactgggcgtaaagcgcatgcaggtggttcattaagtcagatgtgaaagcccggggctcaacctcggaactgcatttgaaactggtgaactagagtactgtagaggggggtagaatttcaggtgtagcggtgaaatgcgtagagatctgaaggaataccagtggcgaaggcggccccctggacagatactgacactcagatgcgaaagcgtggggagcaaacaggattagataccctggtagtccacgccgtaaacgatgtctacttggaggttgtggccttgagccgtggctttcggagctaacgcgttaagtagaccgcctggggagtacggtcgcaagattaaaactcaaatgaattgacgggggcccgcacaagcggtggagcatgtggtttaattcgatgcaacgcgaagaaccttacctactcttgacatccagagaagccagcggagacgcaggtgtgccttcgggagctctgagacaggtgctgcatggctgtcgtcagctcgtgttgtgaaatgttgggttaagtcccgcaacgagcgcaacccttatccttgtttgccagcgagtaatgtcgggaactccagggagactgccggtgataaaccggaggaaggtggggacgacgtcaagtcatcatggcccttacgagtagggctacacacgtgctacaatggcgcatacagagggcagcaagctagcgatagtgagcgaatcccaaaaagtgcgtcgtagtccggattggagtctgcaactcgactccatgaagtcggaatcgctagtaatcgtgaatcagaatgtcacggtgaatacgttcccgggccttgtacacaccgcccgtcacaccatgggagtgggctgcaaaagaagtgggtagtttaacctttcggggaggacgctcaccactttgtggttcatgactggggtgaagtcgtaacaaggtagccctaggggaacctggggctggatcacctcctt

SEQ ID NO: 1003 - DNA, 1551 bp, artificial sequence
  GCF_003316895.1_01390_[Lactobacillus]_reuteri
ttgaagagtttgatcatggctcagattgaacgctggcggcaggcctaacacatgcaagtcgagcggaaacgacactaacaatccttcgggtgcgttaatgggcgtcgagcggcggacgggtgagtaatgcctaggaaattgccttgatgtgggggataaccattggaaacgatggctaataccgcataatgcctacgggccaaagagggggatcttcggacctctcgcgtcaagatatgcctaggtgggattagctagttggtgaggtaatggctcaccaaggcgacgatccctagctggtctgagaggatgatcagccacactggaactgagacacggtccagactcctacgggaggcagcagtggggaatattgcacaatgggcgaaagcctgatgcagccatgccgcgtgtatgaagaaggccttcgggttgtaaagtactttcagttgtgaggaagggggtgtcgttaatagcggcatctcttgacgttagcaacagaagaagcaccggctaactccgtgccagcagccgcggtaatacggagggtgcgagcgttaatcggaattactgggcgtaaagcgcatgcaggtggttcattaagtcagatgtgaaagcccggggctcaacctcggaactgcatttgaaactggtgaactagagtactgtagaggggggtagaatttcaggtgtagcggtgaaatgcgtagagatctgaaggaataccagtggcgaaggcggccccctggacagatactgacactcagatgcgaaagcgtggggagcaaacaggattagataccctggtagtccacgccgtaaacgatgtctacttggaggttgtggccttgagccgtggctttcggagctaacgcgttaagtagaccgcctggggagtacggtcgcaagattaaaactcaaatgaattgacgggggcccgcacaagcggtggagcatgtggtttaattcgatgcaacgcgaagaaccttacctactcttgacatccagagaagccagcggagacgcaggtgtgccttcgggaactctgagacaggtgctgcatggctgtcgtcagctcgtgttgtgaaatgttgggttaagtcccgcaacgagcgcaacccttatccttgtttgccagcgagtaatgtcgggaactccagggagactgccggtgataaaccggaggaaggtggggacgacgtcaagtcatcatggcccttacgagtagggctacacacgtgctacaatggcgcatacagagggcagcaagctagcgatagtgagcgaatcccaaaaagtgcgtcgtagtccggattggagtctgcaactcgactccatgaagtcggaatcgctagtaatcgtgaatcagaatgtcacggtgaatacgttcccgggccttgtacacaccgcccgtcacaccatgggagtgggctgcaaaagaagtgggtagtttaacctttcggggaggacgctcaccactttgtggttcatgactggggtgaagtcgtaacaaggtagccctaggggaacctggggctggatcacctcctt

SEQ ID NO: 1004 - DNA, 1551 bp, artificial sequence
  GCF_003316895.1_01808_[Lactobacillus]_reuteri
ttgaagagtttgatcatggctcagattgaacgctggcggcaggcctaacacatgcaagtcgagcggaaacgacattaacaatccttcgggtgcgttaatgggcgtcgagcggcggacgggtgagtaatgcctaggaaattgccttgatgtgggggataaccattggaaacgatggctaataccgcataatgcctacgggccaaagagggggatcttcggacctctcgcgtcaagatatgcctaggtgggattagctagttggtgaggtaatggctcaccaaggcgacgatccctagctggtctgagaggatgatcagccacactggaactgagacacggtccagactcctacgggaggcagcagtggggaatattgcacaatgggcgaaagcctgatgcagccatgccgcgtgtatgaagaaggccttcgggttgtaaagtactttcagttgtgaggaagggggtgtcgttaatagcggcatctcttgacgttagcaacagaagaagcaccggctaactccgtgccagcagccgcggtaatacggagggtgcgagcgttaatcggaattactgggcgtaaagcgcatgcaggtggttcattaagtcagatgtgaaagcccggggctcaacctcggaactgcatttgaaactggtgaactagagtactgtagaggggggtagaatttcaggtgtagcggtgaaatgcgtagagatctgaaggaataccagtggcgaaggcggccccctggacagatactgacactcagatgcgaaagcgtggggagcaaacaggattagataccctggtagtccacgccgtaaacgatgtctacttggaggttgtggccttgagccgtggctttcggagctaacgcgttaagtagaccgcctggggagtacggtcgcaagattaaaactcaaatgaattgacgggggcccgcacaagcggtggagcatgtggtttaattcgatgcaacgcgaagaaccttacctactcttgacatccagagaagccagcggagacgcaggtgtgccttcgggaactctgagacaggtgctgcatggctgtcgtcagctcgtgttgtgaaatgttgggttaagtcccgcaacgagcgcaacccttatccttgtttgccagcgagtaatgtcgggaactccagggagactgccggtgataaaccggaggaaggtggggacgacgtcaagtcatcatggcccttacgagtagggctacacacgtgctacaatggcgcatacagagggcagcaagctagcgatagtgagcgaatcccaaaaagtgcgtcgtagtccggattggagtctgcaactcgactccatgaagtcggaatcgctagtaatcgtgaatcagaatgtcacggtgaatacgttcccgggccttgtacacaccgcccgtcacaccatgggagtgggctgcaaaagaagtgggtagtttaacctttcggggaggacgctcaccactttgtggttcatgactggggtgaagtcgtaacaaggtagccctaggggaacctggggctggatcacctcctt

SEQ ID NO: 1005 - DNA, 1539 bp, artificial sequence
  GCF_003703885.1_00433_[Lactobacillus]_reuteri
ttgaagagtttgatcatggctcagattgaacgctggcggcaggcctaacacatgcaagtcgagcggcagcgggaagtagtttactactttgccggcgagcggcggacgggtgagtaatgtctgggaaactgcctgatggagggggataactactggaaacggtagctaataccgcataacgtcttcggaccaaagtgggggaccttcgggcctcacgccatcggatgtgcccagatgggattagctagtaggtggggtaatggctcacctaggcgacgatccctagctggtctgagaggatgaccagccacactggaactgagacacggtccagactcctacgggaggcagcagtggggaatattgcacaatgggcgcaagcctgatgcagccatgccgcgtgtgtgaagaaggccttcgggttgtaaagcactttcagcgaggaggaaggccaataacttaatacgttgttggattgacgttactcgcagaagaagcaccggctaactccgtgccagcagccgcggtaatacggagggtgcaagcgttaatcggaattactgggcgtaaagcgcacgcaggcggtttgttaagtcagatgtgaaatccccgcgcttaacgtgggaactgcatttgaaactggcaagctagagtcttgtagaggggggtagaattccaggtgtagcggtgaaatgcgtagagatctggaggaataccggtggcgaaggcggccccctggacaaagactgacgctcaggtgcgaaagcgtggggagcaaacaggattagataccctggtagtccacgctgtaaacgatgtcgacttggaggttgtgcccttgaggcgtggcttccggagctaacgcgttaagtcgaccgcctggggagtacggccgcaaggttaaaactcaaatgaattgacgggggcccgcacaagcggtggagcatgtggtttaattcgatgcaacgcgaagaaccttacctactcttgacatccacagaacttagcagagatgcttcggtgccttcgggaactgtgagacaggtgctgcatggctgtcgtcagctcgtgttgtgaaatgttgggttaagtcccgcaacgagcgcaacccttatcctttgttgccagcacgtaatggtgggaactcaaaggagactgccggtgataaaccggaggaaggtggggatgacgtcaagtcatcatggcccttacgagtagggctacacacgtgctacaatggcagatacaaagtgaagcgaactcgcgagagcaagcggaccacataaagtctgtcgtagtccggattggagtctgcaactcgactccatgaagtcggaatcgctagtaatcgtagatcagaatgctacggtgaatacgttcccgggccttgtacacaccgcccgtcacaccatgggagtgggttgcaaaagaagtaggtagcttaaccttcgggagggcgcttaccactttgtgattcatgactggggtgaagtcgtaacaaggtaaccgtaggggaacctgcggttggatcacctcctt

SEQ ID NO: 1006 - DNA, 1539 bp, artificial sequence; identical to SEQ ID NO: 1005
  GCF_003703885.1_01505_[Lactobacillus]_reuteri

SEQ ID NO: 1007 - DNA, 1539 bp, artificial sequence
  GCF_003703885.1_01511_[Lactobacillus]_reuteri
ttgaagagtttgatcatggctcagattgaacgctggcggcaggcctaacacatgcaagtcgagcggcagcgggaagtagtttactactttgccggcgagcggcggacgggtgagtaatgtctgggaaactgcctgatggagggggataactactggaaacggtagctaataccgcataacgtcttcggaccaaagtgggggaccttagggcctcacgccatcggatgtgcccagatgggattagctagtaggtggggtaatggctcacctaggcgacgatccctagctggtctgagaggatgaccagccacactggaactgagacacggtccagactcctacgggaggcagcagtggggaatattgcacaatgggcgcaagcctgatgcagccatgccgcgtgtgtgaagaaggccttcgggttgtaaagcactttcagcgaggaggaaggccaataacttaatacgttgttggattgacgttactcgcagaagaagcaccggctaactccgtgccagcagccgcggtaatacggagggtgcaagcgttaatcggaattactgggcgtaaagcgcacgcaggcggtttgttaagtcagatgtgaaatccccgcgcttaacgtgggaactgcatttgaaactggcaagctagagtcttgtagaggggggtagaattccaggtgtagcggtgaaatgcgtagagatctggaggaataccggtggcgaaggcggccccctggacaaagactgacgctcaggtgcgaaagcgtggggagcaaacaggattagataccctggtagtccacgctgtaaacgatgtcgacttggaggttgtgcccttgaggcgtggcttccggagctaacgcgttaagtcgaccgcctggggagtacggccgcaaggttaaaactcaaatgaattgacgggggcccgcacaagcggtggagcatgtggtttaattcgatgcaacgcgaagaaccttacctactcttgacatccacagaacttagcagagatgcttcggtgccttcgggaactgtgagacaggtgctgcatggctgtcgtcagctcgtgttgtgaaatgttgggttaagtcccgcaacgagcgcaacccttatcctttgttgccagcacgtaatggtgggaactcaaaggagactgccggtgataaaccggaggaaggtggggatgacgtcaagtcatcatggcccttacgagtagggctacacacgtgctacaatggcagatacaaagtgaagcgaactcgcgagagcaagcggaccacataaagtctgtcgtagtccggattggagtctgcaactcgactccatgaagtcggaatcgctagtaatcgtagatcagaatgctacggtgaatacgttcccgggccttgtacacaccgcccgtcacaccatgggagtgggttgcaaaagaagtaggtagcttaaccttcgggagggcgcttaccactttgtgattcatgactggggtgaagtcgtaacaaggtaaccgtaggggaacctgcggttggatcacctcctt

SEQ ID NO: 1008 - DNA, 1537 bp, artificial sequence
  GCF_004794115.1_01748_[Lactobacillus]_reuteri
ttatgagagtttgatcctggctcagaacgaacgctggcggcgcgcctaatacatgcaagtcgagcgagaaggtgtagcaatacacttgtaaagcggcgaacgggtgaggaatacatgggtaatctaccatcgagtggggaataaccagccgaaaggttggctaataccgcgtacgcctccggatcttcgggttcggagggaaagccacactgtgagtgcggcgctctttgatgagctcatgtcctatcagcttgttggtagggtaacggcctaccaaggctttgacgggtagctggtctgagaggacgatcagccacactggcactgcgacacgggccagactcctacgggaggcagcagtaaggaatattgcgcaatgggcgaaagcctgacgcagcgacgccgcgtgggggatgaaggtcttcggattgtaaacccctttcgggagggaagatggagcgagcaatcgttcggacggtacctccagaagcagccacggccaacttcgtgccagcagccgcggtaatacgaaggtggcaagcgttgttcggattcactgggcgtacagggtgtgtaggcggtttggtaagccttctgttaaagcttcgggcccaacccggaaagcgcagagggtactgccaggctagagggtgggagaggagcgcggaattcccggtgtagcggtgaaatgcgtagagatcgggaggaaggccggtggcgaaggcggcgctctggaacatacctgacgctgagacacgaaagcgtggggagcaaacaggattagataccctggtagtccacgccctaaactatggatactaagtgtcggcgggttaccgccggtgccgcagctaacgcattaagtatcccgcctgggaagtacggccgcaaggttgaaactcaaaggaattgacgggggcccgcacaagcggtggagcatgtggtttaattcgacgcaacgcgaagaaccttacccaggttggacatgcacgtagtagaaaggtgaaagcctgacgaggtagcaataccagcgtgctcaggtgctgcatggctgtcgtcagctcgtgccgtgaggtgttgggttaagtcccgcaacgagcgcaacccctgctttcagttgctaccgggtcatgccgagcactctgaaaggactgcccaggataacggggaggaaggtggggatgacgtcaagtcagcatggcctttatgcctggggccacacacgtgctacaatggccggtacaaagcgctgcaaacctgcgagggggagccaatcgcaaaaaaccggcctcagttcagattgaggtctgcaactcgacctcatgaaggcggaatcgctagtaatcgcggatcagcacgccgcggtgaatacgttcccgggccttgtacacaccgcccgtcacaccacgaaagcctgttgtacctgaagtcgcccaagccaaccgcaaggaggcaggcgcccacggtatggccggtgattggggtgaagtcgtaacaaggtagccgtaggggaacctgcggctggatcacctccttt

SEQ ID NO: 1009 - DNA, 1555 bp, artificial sequence
  GCF_900156885.1_00898_[Lactobacillus]_reuteri
ttgaagagtttgatcatggctcagattgaacgctggcggcaggcctaacacatgcaagtcgagcggtaacaggaagaaagcttgctttctttgctgacgagcggcggacgggtgagtaatgcctgggaatatgccttagtgtgggggataactattggaaacgatagctaataccgcataacgtccttgttcattacgagcgggaccaaagagggggaccttcgggcctttcgcgctaagattagcccaggtgggattagctagttggtgaggtaaaggctcaccaaggcaacgatccctagctggtctgagaggatgatcagccacactggaactgagacacggtccagactcctacgggaggcagcagtggggaatattgcacaatgggggaaaccctgatgcagccatgccgcgtgtatgaagaaggccttcgggttgtaaagtactttcagtcgtgaggaagattatacagttaatagctgtgtgatttgacgttagcgacagaagaagcaccggctaactccgtgccagcagccgcggtaatacggagggtgcgagcgttaatcggaattactgggcgtaaagcgcatgcaggcggtctgttaagcaagatgtgaaagcccggggctcaacctcggaaccgcattttgaactggcagactagagtcttgtagaggggggtagaatttcaggtgtagcggtgaaatgcgtagagatctgaaggaataccggtggcgaaggcggccccctggacaaagactgacgctcagatgcgaaagcgtggggagcaaacaggattagataccctggtagtccacgccgtaaacgatgtctacttgaaggttgtggccttgagccgtggctttcggagctaacgcgttaagtagaccgcctggggagtacggtcgcaagattaaaactcaaatgaattgacgggggcccgcacaagcggtggagcatgtggtttaattcgatgcaacgcgaagaaccttacctactcttgacatccacagaagagaccagagatggacttgtgccttcgggaactgtgagacaggtgctgcatggctgtcgtcagctcgtgttgtgaaatgttgggttaagtcccgcaacgagcgcaacccttatccttgtttgccagcacgtcatggtgggaactccagggagactgccggtgataaaccggaggaaggtggggacgacgtcaagtcatcatggcccttacgagtagggctacacacgtgctacaatggcgtatacagagggctgccaaccagcgatggtgagcgaatcccacaaagtacgtcgtagtccggatcggagtctgcaactcgactccgtgaagtcggaatcgctagtaatcgtgaatcagaatgtcacggtgaatacgttcccgggccttgtacacaccgcccgtcacaccatgggagtgggctgcaccagaagtagatagcttaaccttcgggagggcgtttaccacggtgtggttcatgactggggtgaagtcgtaacaaggtagccctaggggaacctggggctggatcacctcctt

SEQ ID NO: 1010 - DNA, 1523 bp, artificial sequence
  GCF_001754075.1_02616_[Merdimonas]_faecis
acggagagtttgatcctggctcaggacgaacgctggcggcgtgcttaacacatgcaagtcgaacgatgaaccacttcggtggggattagtggcgaacgggtgagtaacacgtgggcaatctgcccttcactctgggacaagccctggaaacggggtctaataccggatatcactcctgcaggcatctgcgggggtcgaaagctccggcggtgaaggatgagcccgcggcctatcagcttgttggtgaggtagtggctcaccaaggcgacgacgggtagccggcctgagagggcgaccggccacactgggactgagacacggcccagactcctacgggaggcagcagtggggaatattgcacaatgggcgaaagcctgatgcagcgacgccgcgtgagggatgacggccttcgggttgtaaacctctttcagcagggaagaagcgaaagtgacggtacctgcagaagaagcgccggctaactacgtgccagcagccgcggtaatacgtagggcgcaagcgttgtccggaattattgggcgtaaagagctcgtaggcggcttgtcacgtcgggtgtgaaagcccggggcttaaccccgggtctgcattcgatacgggcaggctagagtgtggtaggggagatcggaattcctggtgtagcggtgaaatgcgcagatatcaggaggaacaccggtggcgaaggcggatctctgggccattactgacgctgaggagcgaaagcgtggggagcgaacaggattagataccctggtagtccacgccgtaaacggtgggaactaggtgttggcgacattccacgtcgtcggtgccgcagctaacgcattaagttccccgcctggggagtacggccgcaaggctaaaactcaaaggaattgacgggggcccgcacaagcagcggagcatgtggcttaattcgacgcaacgcgaagaaccttaccaaggcttgacatacaccggaaacgtctggagacaggcgcccccttgtggtcggtgtacaggtggtgcatggctgtcgtcagctcgtgtcgtgagatgttgggttaagtcccgcaacgagcgcaacccttgtcctgtgttgccagcatgcccttcggggtgatggggactcacaggagaccgccggggtcaactcggaggaaggtggggacgacgtcaagtcatcatgccccttatgtcttgggctgcacacgtgctacaatggccggtacaatgagctgcgataccgtgaggtggagcgaatctcaaaaagccggtctcagttcggattggggtctgcaactcgaccccatgaagtcggagttgctagtaatcgcagatcagcattgctgcggtgaatacgttcccgggccttgtacacaccgcccgtcacgtcacgaaagttggtaacacccgaagccggtggcccaaccccttgtgggagggagctgtcgaaggtgggactagcgattgggacgaagtcgtaacaaggtagccgtaccggaaggtgcggctggatcacctccttt

SEQ ID NO: 1011 - DNA, 1527 bp, artificial sequence
  GCF_000162895.1_01311_Actinomycetaceae_NG7_sp1
tgaagagtttgatcctggctcagattgaacgctggcgggatgctttacacatgcaagtcggacggcagcacgggcttcggcctggtggcgagtggcgaacgggtgagtaatgtatcggaacgtgcccagtagcgggggataactacgcgaaagcgtggctaataccgcatacgccctacgggggaaagcgggggaccttcgggcctcgcactattggagcggccgatatcggattagctagttggtggggtaacggcctaccaaggcgacgatccgtagctggtttgagaggacgaccagccacactgggactgagacacggcccagactcctacgggaggcagcagtggggaattttggacaatgggggcaaccctgatccagccatcccgcgtgtgcgatgaaggccttcgggttgtaaagcacttttggcaggaaagaaacggcacgggctaatatcctgtgcaactgacggtacctgcagaataagcaccggctaactacgtgccagcagccgcggtaatacgtagggtgcaagcgttaatcggaattactgggcgtaaagcgtgcgcaggcggttcggaaagaaagatgtgaaatcccagggcttaaccttggaactgcatttttaactaccgggctagagtgtgtcagagggaggtggaattccgcgtgtagcagtgaaatgcgtagatatgcggaggaacaccgatggcgaaggcagcctcctgggataacactgacgctcatgcacgaaagcgtggggagcaaacaggattagataccctggtagtccacgccctaaacgatgtcaactagctgttggggccttcgggccttggtagcgcagctaacgcgtgaagttgaccgcctggggagtacggtcgcaagattaaaactcaaaggaattgacggggacccgcacaagcggtggatgatgtggattaattcgatgcaacgcgaaaaaccttacctacccttgacatgtctggaatcccgaagagatttgggagtgctcgcaagagaaccggaacacaggtgctgcatggctgtcgtcagctcgtgtcgtgagatgttgggttaagtcccgcaacgagcgcaacccttgtcattagttgctacgaaagggcactctaatgagactgccggtgacaaaccggaggaaggtggggatgacgtcaagtcctcatggcccttatgggtagggcttcacacgtcatacaatggtcgggacagagggtcgccaacccgcgagggggagccaatcccagaaacccgatcgtagtccggatcgcagtctgcaactcgactgcgtgaagtcggaatcgctagtaatcgcggatcagcatgtcgcggtgaatacgttcccgggtcttgtacacaccgcccgtcacaccatgggagtgggttttaccagaagtagttagcctaaccgcaaggggggcgattaccacggtaggattcatgactggggtgaagtcgtaacaaggtagccgtatcggaaggtgcggctggatcacctccttt

SEQ ID NO: 1012 - DNA, 1552 bp, artificial sequence
  GCF_001652275.1_01599_Actinomycetaceae_NG7_sp1
tactgagagtttgatcctggctcaggacgaacgctggcggcgtgcctaatacatgcaagtcgtgcggaccttttaaaagcttgcttttaaaaggttagcggcggacgggtgagtaacacgtgggcaacctgcctgtaagactgggataacgccgggaaaccggggctaataccagatagttttttcctccgcatggaggaaaaaggaaaggcggcttcggctgccacttacagatgggcccgcggcgcattagctagttggcggggtaacggcccaccaaggcaacgatgcgtagccgacctgagagggtgatcggccacattgggactgagacacggcccaaactcctacgggaggcagcagtagggaatcttccgcaatggacgaaagtctgacggagcaacgccgcgtgagtgaagaaggccttcgggtcgtaaaactctgttgccggggaagaacaagtgtcgttcgaacagggcggcgccttgacggtacccggccagaaagccacggctaactacgtgccagcagccgcggtaatacgtaggtggcaagcgttgtccggaattattgggcgtaaagcgcgcgcaggcggcttcttaagtctgatgtgaaatcttgcggctcaaccgcaagcggtcattggaaactgggaggcttgagtgcagaagaggagagtggaattccacgtgtagcggtgaaatgcgtagagatgtggaggaacaccagtggcgaaggcggctctctggtctgtaactgacgctgaggcgcgaaagcgtggggagcaaacaggattagataccctggtagtccacgccgtaaacgatgagtgctaagtgttagagggtttccgccctttagtgctgcagctaacgcattaagcactccgcctggggagtacggccgcaaggctgaaactcaaaggaattgacgggggcccgcacaagcggtggagcatgtggtttaattcgaagcaacgcgaagaaccttaccaggtcttgacatcctctgacctccctggagacagggccttccccttcgggggacagagtgacaggtggtgcatggttgtcgtcagctcgtgtcgtgagatgttgggttaagtcccgcaacgagcgcaacccttgaccttagttgccagcattgagttgggcactctaaggtgactgccggtgacaaaccggaggaaggtggggatgacgtcaaatcatcatgccccttatgacctgggctacacacgtgctacaatggatggtacaaagggctgcgagaccgcgaggttaagccaatcccagaaaaccattcccagttcggattgcaggctgcaacccgcctgcatgaagccggaatcgctagtaatcgcggatcagcatgccgcggtgaatacgttcccgggccttgtacacaccgcccgtcacaccacgagagtttgtaacacccgaagtcggtgaggtaacctttagggagccagccgccgaaggtgggacagatgattggggtgaagtcgtaacaaggtagccgtatcggaaggtgcggctggatcacctccttt

SEQ ID NO: 1013 - DNA, 1554 bp, artificial sequence
  GCF_001652275.1_01729_Actinomycetaceae_NG7_sp1
tactgagagtttgatcctggctcaggacgaacgctggcggcgtgcctaatacatgcaagtcgtgcggaccttgttgaaagcttgcttttaacaaggctagcggcggacgggtgagtaacacgtgggcaacctgcctgtaagactgggataacgccgggaaaccggggctaataccggatagttttttcctccgcatggaggaaaaaggaaaggcggcttcggctgccacttacagatgggcccgcggcgcattagctagttggcggggtaatggcccaccaaggcaacgatgcgtagccgacctgagagggtgatcggccacattgggactgagacacggcccaaactcctacgggaggcagcagtagggaatcttccgcaatggacgaaagtctgacggagcaacgccgcgtgagtgaagaaggccttcgggtcgtaaaactctgttgccggggaagaacaagtgccgttcgaacagggcggcgccttgacggtacccggccagaaagccacggctaactacgtgccagcagccgcggtaatacgtaggtggcaagcgttgtccggaattattgggcgtaaagcgcgcgcaggcggcttcttaagtctgatgtgaaatcttgcggctcaaccgcaagcggtcattggaaactgggaggcttgagtgcagaagaggagagtggaattccacgtgtagcggtgaaatgcgtagagatgtggaggaacaccagtggcgaaggcggctctctggtctgtaactgacgctgaggcgcgaaagcgtggggagcaaacaggattagataccctggtagtccacgccgtaaacgatgagtgctaagtgttagagggtttccgccctttagtgctgcagctaacgcattaagcactccgcctggggagtacggccgcaaggctgaaactcaaaggaattgacgggggcccgcacaagcggtggagcatgtggtttaattcgaagcaacgcgaagaaccttaccaggtcttgacatcctctgacctccctggagacagggccttccccttcgggggacagagtgacaggtggtgcatggttgtcgtcagctcgtgtcgtgagatgttgggttaagtcccgcaacgagcgcaacccttgaccttagttgccagcattgagttgggcactctaaggtgactgccggtgacaaaccggaggaaggtggggatgacgtcaaatcatcatgccccttatgacctgggctacacacgtgctacaatggatggtacaaagggctgcgagaccgcgaggttaagccaatcccagaaaaccattcccagttcggattgcaggctgcaacccgcctgcatgaagccggaatcgctagtaatcgcggatcagcatgccgcggtgaatacgttcccgggccttgtacacaccgcccgtcacaccacgagagtttgtaacacccgaagtcggtgaggtaacctttacggagccagccgccgaaggtgggacagatgattggggtgaagtcgtaacaaggtagccgtatcggaaggtgcggctggatcacctccttt

SEQ ID NO: 1014 - DNA, 1552 bp, artificial sequence
  GCF_001652275.1_02118_Actinomycetaceae_NG7_sp1
tactgagagtttgatcctggctcaggacgaacgctggcggcgtgcctaatacatgcaagtcgtgcggaccttttaaaagcttgcttttaaaaggttagcggcggacgggtgagtaacacgtgggcaacctgcctgtaagatcgggataacgccgggaaaccggggctaataccggatagttttttcctccgcatggaggaaaaaggaaagacggcttttgctgtcacttacagatgggcccgcggcgcattagctagttggtggggtaacggctcaccaaggcaacgatgcgtagccgacctgagagggtgatcggccacattgggactgagacacggcccaaactcctacgggaggcagcagtagggaatcttccgcaatggacgaaagtctgacggagcaacgccgcgtgagtgaagaaggccttcgggtcgtaaaactctgttgccggggaagaacaagtgccgttcgaacagggcggtgccttgacggtacccggccagaaagccacggctaactacgtgccagcagccgcggtaatacgtaggtggcaagcgttgtccggaattattgggcgtaaagcgcgcgcaggcggtttcttaagtctgatgtgaaatcttgcggctcaaccgcaagcggtcattggaaactgggaggcttgagtgcagaagaggagagtggaattccacgtgtagcggtgaaatgcgtagagatgtggaggaacaccagtggcgaaggcggctctctggtctgtaactgacgctgaggcgcgaaagcgtggggagcaaacaggattagataccctggtagtccacgccgtaaacgatgagtgctaagtgttagagggtttccgccctttagtgctgcagctaacgcattaagcactccgcctggggagtacggccgcaaggctgaaactcaaaggaattgacgggggcccgcacaagcggtggagcatgtggtttaattcgaagcaacgcgaagaaccttaccaggtcttgacatcctctgacctccctggagacagggccttccccttcgggggacagagtgacaggtggtgcatggttgtcgtcagctcgtgtcgtgagatgttgggttaagtcccgcaacgagcgcaacccttgaccttagttgccagcattgagttgggcactctaaggtgactgccggtgacaaaccggaggaaggtggggatgacgtcaaatcatcatgccccttatgacctgggctacacacgtgctacaatggatggtacaaagggctgcgagaccgcgaggttaagccaatcccagaaaaccattcccagttcggattgcaggctgcaacccgcctgcatgaagccggaatcgctagtaatcgcggatcagcatgccgcggtgaatacgttcccgggccttgtacacaccgcccgtcacaccacgagagtttgtaacacccgaagtcggtgaggtaacctttacggagccagccgccgaaggtgggacagatgattggggtgaagtcgtaacaaggtagccgtatcggaaggtgcggctggatcacctccttt

SEQ ID NO: 1015 - DNA, 1523 bp, artificial sequence
  GCF_005886335.1_00178_Actinomycetaceae_NG7_sp1
acggagagtttgatcctggctcaggacgaacgctggcggcgtgcttaacacatgcaagtcgaacgatgaagcctttcggggtggattagtggcgaacgggtgagtaacacgtgggcaatctgcccttcactctgggacaagccctggaaacggggtctaataccggataacactctgtcccgcatgggacggggttgaaagctccggcggtgaaggatgagcccgcggcctatcagcttgttggtggggtaatggcctaccaaggcgacgacgggtagccggcctgagagggcgaccggccacactgggactgagacacggcccagactcctacgggaggcagcagtggggaatattgcacaatgggcgaaagcctgatgcagcgacgccgcgtgagggatgacggccttcgggttgtaaacctctttcagcagggaagaagcgaaagtgacggtacctgcagaagaagcgccggctaactacgtgccagcagccgcggtaatacgtagggcgcaagcgttgtccggaattattgggcgtaaagagctcgtaggcggcttgtcacgtcggatgtgaaagcccggggcttaaccccgggtctgcattcgatacgggctagctagagtgtggtaggggagatcggaattcctggtgtagcggtgaaatgcgcagatatcaggaggaacaccggtggcgaaggcggatctctgggccattactgacgctgaggagcgaaagcgtggggagcgaacaggattagataccctggtagtccacgccgtaaacgttgggaactaggtgttggcgacattccacgtcgtcggtgccgcagctaacgcattaagttccccgcctggggagtacggccgcaaggctaaaactcaaaggaattgacgggggcccgcacaagcagcggagcatgtggcttaattcgacgcaacgcgaagaaccttaccaaggcttgacatataccggaaagcatcagagatggtgccccccttgtggtcggtatacaggtggtgcatggctgtcgtcagctcgtgtcgtgagatgttgggttaagtcccgcaacgagcgcaacccttgttctgtgttgccagcatgcccttcggggtgatggggactcacaggagactgccggggtcaactcggaggaaggtggggacgacgtcaagtcatcatgccccttatgtcttgggctgcacacgtgctacaatggccggtacaatgagctgcgatgccgcgaggcggagcgaatctcaaaaagccggtctcagttcggattggggtctgcaactcgaccccatgaagtcggagttgctagtaatcgcagatcagcattgctgcggtgaatacgttcccgggccttgtacacaccgcccgtcacgtcacgaaagtcggtaacacccgaagccggtggcccaaccccttgtgggagggagctgtcgaaggtgggactggcgattgggacgaagtcgtaacaaggtagccgtaccggaaggtgcggctggatcacctccttt

SEQ ID NO: 1016 - DNA, 1527 bp, artificial sequence
  GCF_005886335.1_00559_Actinomycetaceae_NG7_sp1
actgagagtttgatcctggctcagagcgaacgctggcggcgtgcttaacacatgcaagtcatacggagttatggaggggtaacctgacataactaagtggcggacgggtgagtaacgcgtaggtgacctgcccttgtgactgggataaccactggaaacggtggataataccggataagcccacgattaggtgatagtagtgggaaaaggagaaatctgcacaaggatgggcctgcgtcctatcaggtagttggtaaggtaaaggcttaccaagcctaagacgggtagccggtctgagaggatggacggccacactggaactgagacacggtccagactcctacgggaggcagcagtgaggaattttgcgcaatgggcgaaagcctgacgcagcgacgccgcgtgggggatgaaggccttcgggttgtaaaccccttttgtaagggaagatagtgacggtaccttaagaataagccacggctaactctgtgccagcagccgcggtaagacagaggtggcaagcgttgctcggaatcactgggcttaaagggcgcgtaggcggttaatcaagtttagggtggaatgcatgggctcaacctgtgaattgccttgaaaactggttgacttgagtaagcgaggggatggcggaattcctggtgtagcggtgaaatgcgtagatatcaggaggaaggccggtggcgaaggcggccatctggcgcttaactgacgctgaggcgcgaaagcgtggggatcaaacaggattagataccctggtagtccacgccctaaacggtgggtactaggtgtagggctctttagggttctgtgccgaagggaaaccgataagtaccccgcctgggaagtacggccgcaaggttgaaactcaaaggaattgacgggggcccgcacaagcggtggagcatgtggtttaattcgacgcaacgcgaagaaccttacctgggtttgacatgcagatggtagtgatccgaaaggtgagcgactttcccgtaagggagagagtctgcacaggtgctgcatggctgtcgtcagctcgtgccgtgaggtgttgggttaagtcccgcaacgagcgcaacccctatcctttgttgccatcaggttaagctgggcactctaaggaaactgccggcgatgagttggaggaaggtggggacgacgtcaagtcatcatggcccttatatccagggctacacacgtgctacaatggttattacagagggaagcaatgccgcgaggtggagcaaatccccaaaaatattcgtagttgggatcggagtctgcaactcgactccgtgaacgtggaatcgctagtaatcgcagatcagctacgctgcggtgaatacgttcccgggccttgtacacaccgcccgtcacaccacgaaagtctgctgtacccgaagagggtgagctaaccagcaatggaggcagctcgctaaggtatggtaggtaattggggtgaagtcgtaacaaggtagccgtaggggaacctgcggctggatcacctccttt

SEQ ID NO: 1017 - DNA, 1504 bp, artificial sequence
  GCF_005886335.1_00712_Actinomycetaceae_NG7_sp1
atggagagtttgatcctggctcaggatgaacgctagcggcaggcctaatacatgcaagtcgaacgaaccgcaaggttagtggcgaacgggtgcgtaacgcgtaaacaatctgccccggtttgggggatagcccggcgaaagctggggtaaacccgcgtagtttcaggaggtggcatcacattctgaatagacatttatggaaccgggaggggtttgcgtctgattagttagatggcggggtaacggcccaccatgacgatgatcagtaggggctctgagaggagggtcccccacatgggcactgagacacgggcccaactcctacgggaggcagcagtagggaatattggtcaatggacggaagtctgaaccagccatgccgcgtgcaggaagaaggcgctcagcgttgtaaactgcttttgagagggaagaaagtgcaggatgcgtcctgttttgccggtacctttcgaataagcaccggctaactccgtgccagcagccgcggtaatacggagggtgcaagcgttgtccggatttattgggtttaaagggtgcgtaggtggtttggtaagtctggtttgaaagtcagccgcttaacggttgagggtggctggatactgccgaacttgaatgtcccggaggcaggcggaacgggttgtgtagcggtgaaatgcatagatatgacccagaacaccgattgcgaaggcagcctgctacgggaagattgacactgaggcacgagagcatggggagcaaacaggattagataccctggtagtccatgccgtaaacgatgatcactgtctgtttggctttcgggctgagtggataagcgaaagcgataagtgatccacctggggagtacgccggcaacggtgaaactcaaaggaattgacgggggtccgcacaagcggtggagcatgtggtttaattcgatgatacgcgaggaaccttacccgggctagaatgtgcgtgaatgatgtggaaacatgtcagcctagcaataggcacaaaacaaggtgctgcatggctgtcgtcagctcgtgccgtgaggtgttgggttaagtcccgcaacgagcgcaacccctattttcagttgccagcatgtaatgatggggactctggaaagactgcctgcgcaagcagagaggaaggaggggacgacgtcaagtcatcatggcccttacgcccggggcgacacacgtgctacaatggtatctacagcgtgttacgagctggtaacagtgagtcaatcacgaaaaggatatcacagttcggattggggtctgcaactcgaccctatgaagctggaatcgctagtaatcgcgcatcagccatggcgcggtgaatacgttcccggaccttgtacacaccgcccgtcaagccatggaagtctgggggacctgaagctccgcgtgaaaccggggtaagggtaaaccaggtaactagggctaagtcgtaacaaggtagccgtaccggaaggtgcggctggaacacctccttt

SEQ ID NO: 1018 - DNA, 1529 bp, artificial sequence
  STR00422_Anaerostipes_hadrus
atgagagtttgatcctggctcaggatgaacgctggcggcgtgcttaacacatgcaagtcgaacgaaacaccttatttgattttcttcggaactgaagatttggtgattgagtggcggacgggtgagtaacgcgtgggtaacctgccctgtacagggggataacagtcagaaatgactgctaataccgcataagaccacagcaccgcatggtgcaggggtaaaaactccggtggtacaggatggacccgcgtctgattagctggttggtgaggtaacggctcaccaaggcgacgatcagtagccggcttgagagagtgaacggccacattgggactgagacacggcccaaactcctacgggaggcagcagtggggaatattgcacaatgggggaaaccctgatgcagcgacgccgcgtgagtgaagaagtatctcggtatgtaaagctctatcagcagggaagaaaatgacggtacctgactaagaagccccggctaactacgtgccagcagccgcggtaatacgtagggggcaagcgttatccggaattactgggtgtaaagggtgcgtaggtggtatggcaagtcagaagtgaaaacccagggcttaactctgggactgcttttgaaactgtcagactggagtgcaggagaggtaagcggaattcctagtgtagcggtgaaatgcgtagatattaggaggaacatcagtggcgaaggcggcttactggactgaaactgacactgaggcacgaaagcgtggggagcaaacaggattagataccctggtagtccacgccgtaaacgatgaatactaggtgtcggggccgtagaggcttcggtgccgcagccaacgcagtaagtattccacctggggagtacgttcgcaagaatgaaactcaaaggaattgacggggacccgcacaagcggtggagcatgtggtttaattcgaagcaacgcgaagaaccttacctggtcttgacatccttctgaccggtccttaaccggacctttccttcgggacaggagtgacaggtggtgcatggttgtcgtcagctcgtgtcgtgagatgttgggttaagtcccgcaacgagcgcaacccctatctttagtagccagcatataaggtgggcactctagagagactgccagggataacctggaggaaggtggggacgacgtcaaatcatcatgccccttatgaccagggctacacacgtgctacaatggcgtaaacagagggaagcagcctcgtgagagtgagcaaatcccaaaaataacgtctcagttcggattgtagtctgcaactcgactacatgaagctggaatcgctagtaatcgcgaatcagaatgtcgcggtgaatacgttcccgggtcttgtacacaccgcccgtcacaccatgggagtcagtaacgcccgaagtcagtgacccaaccgtaaggagggagctgccgaaggcgggaccgataactggggtgaagtcgtaacaaggtagccgtatcggaaggtgcggctggatcacctccttt

SEQ ID NO: 1019 - DNA, 1529 bp, artificial sequence
  STR00479_Anaerostipes_hadrus
atgagagtttgatcctggctcaggatgaacgctggcggcgtgcttaacacatgcaagtcgaacgaaacaccttatttgattttcttcggaactgaagatttggtgattgagtggcggacgggtgagtaacgcgtgggtaacctgccctgtacagggggataacagtcagaaatgactgctaataccgcataagaccacagcaccgcatggtgcaggggtaaaaactccggtggtacaggatggacccgcgtctgattagctggttggtgaggtaacggctcaccaaggcgacgatcagtagccggcttgagagagtgaacggccacattgggactgagacacggcccaaactcctacgggaggcagcagtggggaatattgcacaatgggggaaaccctgatgcagcgacgccgcgtgagtgaagaagtatttcggtatgtaaagctctatcagcagggaagaaaatgacggtacctgactaagaagccccggctaactacgtgccagcagccgcggtaatacgtagggggcaagcgttatccggaattactgggtgtaaagggtgcgtaggtggtatggcaagtcagaagtgaaaacccagggcttaactctgggactgcttttgaaactgtcagactagagtgcaggagaggtaagcggaattcctagtgtagcggtgaaatgcgtagatattaggaggaacatcagtggcgaaggcggcttactggactgaaactgacactgaggcacgaaagcgtggggagcaaacaggattagataccctggtagtccacgccgtaaacgatgaatactaggtgtcggggccgtagaggcttcggtgccgcagccaacgcagtaagtattccacctggggagtacgttcgcaagaatgaaactcaaaggaattgacggggacccgcacaagcggtggagcatgtggtttaattcgaagcaacgcgaagaaccttacctggtcttgacatccttctgaccggtccttaaccggacctttccttcgggacaggagagacaggtggtgcatggttgtcgtcagctcgtgtcgtgagatgttgggttaagtcccgcaacgagcgcaacccctatctttagtagccagcatataaggtgggcactctagagagactgccagggataacctggaggaaggtggggacgacgtcaaatcatcatgccccttatgaccagggctacacacgtgctacaatggcgtaaacagagggaagcagcctcgtgagagtgagcaaatcccaaaaataacgtctcagttcggattgtagtctgcaactcgactacatgaagctggaatcgctagtaatcgcgaatcagaatgtcgcggtgaatacgttcccgggtcttgtacacaccgcccgtcacaccatgggagtcagtaacgcccgaagtcagtgacccaaccgtaaggagggagctgccgaaggcgggaccgataactggggtgaagtcgtaacaaggtagccgtatcggaaggtgcggctggatcacctccttt

SEQ ID NO: 1020 - DNA, 881 bp, artificial sequence
  STR00494_Anaerostipes_hadrus
gagaggtaagcggaattcctagtgtagcggtgaaatgcgtagatattaggaggaacatcagtggcgaaggcggcttactggactgaaactgacactgaggcacgaaagcgtggggagcaaacaggattagataccctggtagtccacgccgtaaacgatgaatactaggtgtcggggccgtagaggcttcggtgccgcagccaacgcagtaagtattccacctggggagtacgttcgcaagaatgaaactcaaaggaattgacggggacccgcacaagcggtggagcatgtggtttaattcgaagcaacgcgaagaaccttacctggtcttgacatccttctgaccggtccttaaccggacctttccttcgggacaggagtgacaggtggtgcatggttgtcgtcagctcgtgtcgtgagatgttgggttaagtcccgcaacgagcgcaacccctatctttagtagccagcatataaggtgggcactctagagagactgccagggataacctggaggaaggtggggacgacgtcaaatcatcatgccccttatgaccagggctacacacgtgctacaatggcgtaaacagagggaagcagcctcgtgagagtgagcaaatcccaaaaataacgtctcagttcggattgtagtctgcaactcgactacatgaagctggaatcgctagtaatcgcgaatcagaatgtcgcggtgaatacgttcccgggtcttgtacacaccgcccgtcacaccatgggagtcagtaacgcccgaagtcagtgacccaaccgtaaggagggagctgccgaaggcgggaccgataactggggtgaagtcgtaacaaggtagccgtatcggaaggtgcggctggatcacctccttt

SEQ ID NO: 1021 - DNA, 1180 bp, artificial sequence
  STR00620_Anaerostipes_hadrus
actcctacgggaggcagcagtggggaatattgcacaatgggggaaaccctgatgcagcgacgccgcgtgagtgaagaagtatctcggtatgtaaagctctatcagcagggaagaaaatgacggtacctgactaagaagccccggctaactacgtgccagcagccgcggtaatacgtagggggcaagcgttatccggaattactgggtgtaaagggtgcgtaggtggtatggcaagtcagaagtgaaaacccagggcttaactctgggactgcttttgaaactgtcagactagagtgcaggagaggtaagcggaattcctagtgtagcggtgaaatgcgtagatattaggaggaacatcagtggcgaaggcggcttactggactgaaactgacactgaggcacgaaagcgtggggagcaaacaggattagataccctggtagtccacgccgtaaacgatgaatactaggtgtcggggccgtagaggcttcggtgccgcagccaacgcagtaagtattccacctggggagtacgttcgcaagaatgaaactcaaaggaattgacggggacccgcacaagcggtggagcatgtggtttaattcgaagcaacgcgaagaaccttacctggtcttgacatccttctgaccggtccttaaccggacctttccttcgggacaggagagacaggtggtgcatggttgtcgtcagctcgtgtcgtgagatgttgggttaagtcccgcaacgagcgcaacccctatctttagtagccagcatataaggtgggcactctagagagactgccagggataacctggaggaaggtggggacgacgtcaaatcatcatgccccttatgaccagggctacacacgtgctacaatggcgtaaacagagggaagcagcctcgtgagagtgagcaaatcccaaaaataacgtctcagttcggattgtagtctgcaactcgactacatgaagctggaatcgctagtaatcgcgaatcagaatgtcgcggtgaatacgttcccgggtcttgtacacaccgcccgtcacaccatgggagtcagtaacgcccgaagtcagtgacccaaccgtaaggagggagctgccgaaggcgggaccgataactggggtgaagtcgtaacaaggtagccgtatcggaaggtgcggctggatcacctccttt

SEQ ID NO: 1022 - DNA, 1388 bp, artificial sequence
  STR02109_Anaerostipes_hadrus
ctgccctgtacagggggataacagtcagaaatgactgctaataccgcataagaccacagcaccgcatggtgcaggggtaaaaactccggtggtacaggatggacccgcgtctgattagctggttggtgaggtaacggctcaccaaggcgacgatcagtagccggcttgagagagtgaacggccacattgggactgagacacggcccaaactcctacgggaggcagcagtggggaatattgcacaatgggggaaaccctgatgcagcgacgccgcgtgagtgaagaagtatctcggtatgtaaagctctatcagcagggaagaaaatgacggtacctgactaagaagccccggctaactacgtgccagcagccgcggtaatacgtagggggcaagcgttatccggaattactgggtgtaaagggtgcgtaggtggtatggcaagtcagaagtgaaaacccagggcttaactctgggactgcttttgaaactgtcagactggagtgcaggagaggtaagcggaattcctagtgtagcggtgaaatgcgtagatattaggaggaacatcagtggcgaaggcggcttactggactgaaactgacactgaggcacgaaagcgtggggagcaaacaggattagataccctggtagtccacgccgtaaacgatgaatactaggtgtcggggccgtagaggcttcggtgccgcagccaacgcagtaagtattccacctggggagtacgttcgcaagaatgaaactcaaaggaattgacggggacccgcacaagcggtggagcatgtggtttaattcgaagcaacgcgaagaaccttacctggtcttgacatccttctgaccggtccttaaccggacctttccttcgggacaggagagacaggtggtgcatggttgtcgtcagctcgtgtcgtgagatgttgggttaagtcccgcaacgagcgcaacccctatctttagtagccagcatataaggtgggcactctagagagactgccagggataacctggaggaaggtggggacgacgtcaaatcatcatgccccttatgaccagggctacacacgtgctacaatggcgtaaacagagggaagcagcctcgtgagagtgagcaaatcccaaaaataacgtctcagttcggattgtagtctgcaactcgactacatgaagctggaatcgctagtaatcgcgaatcagaatgtcgcggtgaatacgttcccgggtcttgtacacaccgcccgtcacaccatgggagtcagtaacgcccgaagtcagtgacccaaccgtaaggagggagctgccgaaggcgggaccgataactggggtgaagtcgtaacaaggtagccgtatcggaaggtgcggctggatcacctccttt

SEQ ID NO: 1023 - DNA, 1529 bp, artificial sequence
  STR02203_Anaerostipes_hadrus
atgagagtttgatcctggctcaggatgaacgctggcggcgtgcttaacacatgcaagtcgaacgaaacaccttatttgattttcttcggaactgaagatttggtgattgagtggcggacgggtgagtaacgcgtgggtaacctgccctgtacagggggataacagtcagaaatgactgctaataccgcataagaccacagcaccgcatggtgcaggggtaaaaactccggtggtacaggatggacccgcgtctgattagctggttggtgaggtaacggctcaccaaggcgacgatcagtagccggcttgagagagtgaacggccacattgggactgagacacggcccaaactcctacgggaggcagcagtggggaatattgcacaatgggggaaaccctgatgcagcgacgccgcgtgagtgaagaagtatctcggtatgtaaagctctatcagcagggaagaaaatgacggtacctgactaagaagccccggctaactacgtgccagcagccgcggtaatacgtagggggcaagcgttatccggaattactgggtgtaaagggtgcgtaggtggtatggcaagtcagaagtgaaaacccagggcttaactctgggactgcttttgaaactgtcagactggagtgcaggagaggtaagcggaattcctagtgtagcggtgaaatgcgtagatattaggaggaacatcagtggcgaaggcggcttactggactgaaactgacactgaggcacgaaagcgtggggagcaaacaggattagataccctggtagtccacgccgtaaacgatgaatactaggtgtcggggccgtagaggcttcggtgccgcagccaacgcagtaagtattccacctggggagtacgttcgcaagaatgaaactcaaaggaattgacggggacccgcacaagcggtggagcatgtggtttaattcgaagcaacgcgaagaaccttacctggtcttgacatccttctgaccggtccttaaccggacctttccttcgggacaggagagacaggtggtgcatggttgtcgtcagctcgtgtcgtgagatgttgggttaagtcccgcaacgagcgcaacccctatctttagtagccagcatataaggtgggcactctagagagactgccagggataacctggaggaaggtggggacgacgtcaaatcatcatgccccttatgaccagggctacacacgtgctacaatggcgtaaacagagggaagcagcctcgtgagagtgagcaaatcccaaaaataacgtctcagttcggattgtagtctgcaactcgactacatgaagctggaatcgctagtaatcgcgaatcagaatgtcgcggtgaatacgttcccgggtcttgtacacaccgcccgtcacaccatgggagtcagtaacgcccgaagtcagtgacccaaccgtaaggagggagctgccgaaggcgggaccgataactggggtgaagtcgtaacaaggtagccgtatcggaaggtgcggctggatcacctccttt

SEQ ID NO: 1024 - DNA, 1306 bp, artificial sequence
  STR02266_Anaerostipes_hadrus
actccggtggtacaggatggacccgcgtctgattagctggttggtgaggtaacggctcaccaaggcgacgatcagtagccggcttgagagagtgaacggccacattgggactgagacacggcccaaactcctacgggaggcagcagtggggaatattgcacaatgggggaaaccctgatgcagcgacgccgcgtgagtgaagaagtatctcggtatgtaaagctctatcagcagggaagaaaatgacggtacctgactaagaagccccggctaactacgtgccagcagccgcggtaatacgtagggggcaagcgttatccggaattactgggtgtaaagggtgcgtaggtggtatggcaagtcagaagtgaaaacccagggcttaactctgggactgcttttgaaactgtcagactggagtgcaggagaggtaagcggaattcctagtgtagcggtgaaatgcgtagatattaggaggaacatcagtggcgaaggcggcttactggactgaaactgacactgaggcacgaaagcgtggggagcaaacaggattagataccctggtagtccacgccgtaaacgatgaatactaggtgtcggggccgtagaggcttcggtgccgcagccaacgcagtaagtattccacctggggagtacgttcgcaagaatgaaactcaaaggaattgacggggacccgcacaagcggtggagcatgtggtttaattcgaagcaacgcgaagaaccttacctggtcttgacatccttctgaccggtccttaaccggacctttccttcgggacaggagtgacaggtggtgcatggttgtcgtcagctcgtgtcgtgagatgttgggttaagtcccgcaacgagcgcaacccctatctttagtagccagcatttcaggtgggcactctagagagactgccagggataacctggaggaaggtggggacgacgtcaaatcatcatgccccttatgaccagggctacacacgtgctacaatggcgtaaacagagggaagcagcctcgtgagagtgagcaaatcccaaaaataacgtctcagttcggattgtagtctgcaactcgactacatgaagctggaatcgctagtaatcgcgaatcagaatgtcgcggtgaatacgttcccgggtcttgtacacaccgcccgtcacaccatgggagtcagtaacgcccgaagtcagtgacccaaccgtaaggagggagctgccgaaggcgggaccgataactggggtgaagtcgtaacaaggtagccgtatcggaaggtgcggctggatcacctccttt

SEQ ID NO: 1025 - DNA, 1529 bp, artificial sequence; identical to SEQ ID NO: 1018
  STR02517_Anaerostipes_hadrus

SEQ ID NO: 1026 - DNA, 1529 bp, artificial sequence; identical to SEQ ID NO: 1018
  STR02537_Anaerostipes_hadrus

SEQ ID NO: 1027 - DNA, 1478 bp, artificial sequence
  GCA_900066705_02834_Anaerostipes_hadrus
atccgtttgatcctggcggaggccactgctattgggtttcgattaagccatgcaagtcgaacgatccttcggggtcgtggcgtacggctcagtaacacgtggataacctaaccttaggaccgggataaccctgggaaactggggataataccggatatgtagggctgcctggaattggttccctattgaaatgttccgacgcctaaggatggatctgcggcagattaggtagttggcggggtaactgcccaccaagcctgtaatctgtacgggttgtgagagcaagagcccggagatggaacctgagacaaggttccaggccctacggggcgcagcaggcgcgaaacctccgcaatgcacgaaagtgcgacgggggaaacccaagtgccactcttaacggggtggcttttcttaagtgtaaaaagcttttggaataagagctgggcaagaccggtgccagccgccgcggtaacaccggcagctcaagtggtggccgtttttattgggcctaaagcgttcgtagccggcttgataagtctctggtgaaatcccgcagcttaactgtgtggaattgctggagatactattaggcttgaggccgggagaggttagcggtactcccggggtaggggtgaaatcctataatcccgggaggaccacctgtggcgaaggcggctaactggaacggacctgacggtgagtaacgaaagccaggggcgcgaaccggattagatacccgggtagtcctggccgtaaacgatgtggacttggtgttgggatggctccgagctgccccagtgccgaagggaagctgttaagtccaccgcctgggaagtacggtcgcaagactgaaacttaaaggaattggcgggggagcaccacaacgcgtggagcctgcggtttaattggattcaacgccggacatctcaccaggggcgacagcagaatgattgccaggttgatgaccttgcttgacaagctgagaggaggtgcatggccgccgtcagctcgtaccgtgaggcgtcctgttaagtcaggcaacgagcgagacccacgcccttagttaccagcgggtcctttgggatgccgggcacactaaggggaccgccagtgataaactggaggaaggagtggacgacggtaggtccgtatgccccgaatcccctgggctacacgcgggctacaatggttaggacaatgggttccgacactgaaaggtggaggtaatctcctaaacctggccttagttcggattgagggctgtaactcgccctcatgaagctggaatgcgtagtaatcgcgtgtcataatcgcgcggtgaatacgtccctgctccttgcacacaccgcccgtcacgccacccaaaaagggtttggatgaggccatagtctattggttatggtcgaatctaggttctttgaggagggcgaagtcgtaacaaggtagccgtaggggaacctgcggctggatcacctcct

SEQ ID NO: 1028 - DNA, 1529 bp, artificial sequence
  GCF_000154545.1_00575_Anaerostipes_hadrus
acgaagagtttgatcctggctcaggattaacgctggcggcgtgcctaatacatgcaagtcgaacggaagtttaagcaattaaactttagtggcgaacgggtgagtaacgcgtaagcaatctgcccctaagacgaggataacagttggaaactactgctaagaccggataggagacaagaaggcatcttcttgtttttaaaagacctagcaataggtatgcttagggaggagcttgcgtcacattagttagttggtggggtaaaggcctaccaagactatgatgtgtagccgggctgagaggttgaacggccacattgggactgagacacggcccaaactcctacgggaggcagcagtagggaattttcggcaatggaggaaactctgaccgagcaacgccgcgtgaacgatgaagtatttcggtacgtaaagttcttttattagggaagaataaatgatggaaaaatcattctgacggtacctaatgaataagccccggctaactatgtgccagcagccgcggtaatacatagggggcaagcgttatccggaattattgggcgtaaagggtgcgtaggcggttaaataagtttatggtctaagtgcaatgctcaacattgtgatgctataaaaactgtttagctagagtaagatagaggcaagtggaattccatgtgtagtggtaaaatgcgtaaatatatggaggaacaccagtagcgaaggcggcttgctgggtctttactgacgctgaggcacgaaagcgtggggagcaaacaggattagataccctggtagtccacgccgtaaacgatgagtactaaacgttgggtaaaaccagtgttgaagttaacacattaagtactccgcctgagtagtacgtacgcaagtatgaaacttaaaggaattgacgggactccgcacaagcggtggatcatgttgtttaattcgaaggtacccgaaaaacctcaccaggtcttgacatgcttctgcaaagctgtagaaacacagtggaggttatcagttgcacaggtggtgcatggttgtcgtcagctcgtgtcgtgagatgttgggttaagtcccgcaacgagcgcaacccttattgttagttaccagcacgtaatggtggggactttagcaagactgccagtgataaattggaggaaggtggggacgacgtcaaatcatcatgccccttatgacctgggctacaaacgtgatacaatggctgttacaaagggtagctgaagcgcaagtttttggcgaatctcaaaaaaacagtctcagttcggattgaagtctgcaactcgacttcatgaagttggaatcgctagtaatcgcgaatcagcatgtcgcggtgaatacgttctcggggtttgtacacaccgcccgtcaaaccacgaaagttggcaatacccaaagccggcggcctaacttcgcaagaagagggaaccgtctaaggtagggtcgatgattggggttaagtcgtaacaaggtatccctaccggaaggtggggatggatcacctcctt

SEQ ID NO: 1029 - DNA, 1532 bp, artificial sequence
  GCF_000154545.1_01243_Anaerostipes_hadrus
tgaagagtttgatcatggctcagattgaacgctggcggcaggcctaacacatgcaagtcgagcggatgagaagagcttgctcttcgattcagcggcggacgggtgagtaatacctaggaatctgcctggtagtgggggacaacgtttcgaaaggaacgctaataccgcatacgccctacgggggaaagcaggggaccttcgggccttgcgctatcagatgagcctaggtcggattagctagttggtgaggtaatggctcaccaaggcgacgatccgtaactggtctgagaggatgatcagtcacactggaactgagacacggtccagactcctacgggaggcagcagtggggaatattggacaatgggcgaaagcctgatccagccatgccgcgtgtgtgaagaaggtcttcggattgtaaagcactttaagttgggaggaagggtacttacctaatacgtgagtatcttgacgttaccgacagaataagcaccggctaactctgtgccagcagccgcggtaatacagagggtgcaagcgttaatcggaattactgggcgtaaagcgcgcgtaggtggttcgttaagttggatgtgaaatccccgggctcaacctgggaactgcatccaaaactggcgagctagagtagggcagagggtggtggaatttcctgtgtagcggtgaaatgcgtagatataggaaggaacaccagtggcgaaggcgaccacctgggctcatactgacactgaggtgcgaaagcgtggggagcaaacaggattagataccctggtagtccacgccgtaaacgatgtcaactagccgttggaatccttgagattttagtggcgcagctaacgcattaagttgaccgcctggggagtacggccgcaaggttaaaactcaaatgaattgacgggggcccgcacaagcggtggagcatgtggtttaattcgaagcaacgcgaagaaccttaccaggccttgacatgcagagaactttccagagatggattggtgccttcgggaactctgacacaggtgctgcatggctgtcgtcagctcgtgtcgtgagatgttgggttaagtcccgtaacgagcgcaacccttgtccttagttaccagcacgtaatggtgggcactctaaggagactgccggtgacaaaccggaggaaggtggggatgacgtcaagtcatcatggcccttacggcctgggctacacacgtgctacaatggtcggtacagagggttgccaagccgcgaggtggagctaatctcacaaaaccgatcgtagtccggatcgcagtctgcaactcgactgcgtgaagtcggaatcgctagtaatcgcgaatcagaatgtcgcggtgaatacgttcccgggccttgtacacaccgcccgtcacaccatgggagtgggttgcaccagaagtagctagtctaaccttcgggaggacggttaccacggtgtgattcatgactggggtgaagtcgtaacaaggtagccgtaggggaacctgcggctggatcacctcctt

SEQ ID NO: 1030 - DNA, 1532 bp, artificial sequence
  GCF_000154545.1_02931_Anaerostipes_hadrus
tgaagagtttgatcatggctcagattgaacgctggcggcaggcctaacacatgcaagtcgagcggatgagaagagcttgctcttcgattcagcggcggacgggtgagtaatacctaggaatctgcctggtagtggggggcaacgtttcgaaaggaacgctaataccgcatacgccctacgggggaaagcaggggaccttcgggccttgcgctatcagatgagcctaggtcggattagctagttggtgaggtaatggctcaccaaggcgacgatccgtaactggtctgagaggatgatcagtcacactggaactgagacacggtccagactcctacgggaggcagcagtggggaatattggacaatgggcgaaagcctgatccagccatgccgcgtgtgtgaagaaggtcttcggattgtaaagcactttaagttgggaggaagggtacttacctaatacgtgagtatcttgacgttaccgacagaataagcaccggctaactctgtgccagcagccgcggtaatacagagggtgcaagcgttaatcggaattactgggcgtaaagcgcgcgtaggtggttcgttaagttggatgtgaaatccccgggctcaacctgggaactgcatccaaaactggcgagctagagtagggcagagggtggtggaatttcctgtgtagcggtgaaatgcgtagatataggaaggaacaccagtggcgaaggcgaccacctgggctcatactgacactgaggtgcgaaagcgtggggagcaaacaggattagataccctggtagtccacgccgtaaacgatgtcaactagccgttggaatccttgagattttagtggcgcagctaacgcattaagttgaccgcctggggagtacggccgcaaggttaaaactcaaatgaattgacgggggcccgcacaagcggtggagcatgtggtttaattcgaagcaacgcgaagaaccttaccaggccttgacatgcagagaactttccagagatggattggtgccttcgggaactctgacacaggtgctgcatggctgtcgtcagctcgtgtcgtgagatgttgggttaagtcccgtaacgagcgcaacccttgtccttagttaccagcacgtaatggtgggcactctaaggagactgccggtgacaaaccggaggaaggtggggatgacgtcaagtcatcatggcccttacggcctgggctacacacgtgctacaatggtcggtacagagggttgccaagccgcgaggtggagctaatctcacaaaaccgatcgtagtccggatcgcagtctgcaactcgactgcgtgaagtcggaatcgctagtaatcgcgaatcagaatgtcgcggtgaatacgttcccgggccttgtacacaccgcccgtcacaccatgggagtgggttgcaccagaagtagctagtctaaccttcgggaggacggttaccacggtgtgattcatgactggggtgaagtcgtaacaaggtagccgtaggggaacctgcggctggatcacctcctt

SEQ ID NO: 1031 - DNA, 1532 bp, artificial sequence
  GCF_000154545.1_02932_Anaerostipes_hadrus
tgaagagtttgatcatggctcagattgaacgctggcggcaggcctaacacatgcaagtcgagcggatgagaagagcttgctcttcgattcagcggcggacgggtgagtaatacctaggaatctgcctggtagtgggggacaacgtttcgaaaggaacgctaataccgcatacgccctacgggggaaagcaggggaccttcgggccttgcgctatcagatgagcctaggtcggattagctagttggtgaggtaatggctcaccaaggcgacgatccgtaactggtctgagaggatgatcagtcacactggaactgagacacggtccagactcctacgggaggcagcagtggggaatattggacaatgggcgaaagcctgatccagccatgccgcgtgtgtgaagaaggtcttcggattgtaaagcactttaagttgggaggaagggtacttacctaatacgtgagtattttgacgttaccgacagaataagcaccggctaactctgtgccagcagccgcggtaatacagagggtgcaagcgttaatcggaattactgggcgtaaagcgcgcgtaggtggttcgttaagttggatgtgaaatccccgggctcaacctgggaactgcatccaaaactggcgagctagagtagggcagagggtggtggaatttcctgtgtagcggtgaaatgcgtagatataggaaggaacaccagtggcgaaggcgaccacctgggctcatactgacactgaggtgcgaaagcgtggggagcaaacaggattagataccctggtagtccacgccgtaaacgatgtcaactagccgttggaatccttgagattttagtggcgcagctaacgcattaagttgaccgcctggggagtacggccgcaaggttaaaactcaaatgaattgacgggggcccgcacaagcggtggagcatgtggtttaattcgaagcaacgcgaagaaccttaccaggccttgacatgcagagaactttccagagatggattggtgccttcgggaactctgacacaggtgctgcatggctgtcgtcagctcgtgtcgtgagatgttgggttaagtcccgtaacgagcgcaacccttgtccttagttaccagcacgtaatggtgggcactctaaggagactgccggtgacaaaccggaggaaggtggggatgacgtcaagtcatcatggcccttacggcctgggctacacacgtgctacaatggtcggtacagagggttgccaagccgcgaggtggagctaatctcacaaaaccgatcgtagtccggatcgcagtctgcaactcgactgcgtgaagtcggaatcgctagtaatcgcgaatcagaatgtcgcggtgaatacgttcccgggccttgtacacaccgcccgtcacaccatgggagtgggttgcaccagaagtagctagtctaaccttcgggaggacggttaccacggtgtgattcatgactggggtgaagtcgtaacaaggtagccgtaggggaacctgcggctggatcacctcctt

SEQ ID NO: 1032 - DNA, 1532 bp, artificial sequence; identical to SEQ ID NO: 1031
  GCF_000154545.1_03091_Anaerostipes_hadrus

SEQ ID NO: 1033 - DNA, 1532 bp, artificial sequence
  GCF_000154545.1_03092_Anaerostipes_hadrus
tgaagagtttgatcatggctcagattgaacgctggcggcaggcctaacacatgcaagtcgagcggatgagaagagcttgctcttcgattcagcggcggacgggtgagtaatacctaggaatctgcctggtagtgggggacaacgtttcgaaaggaacgctaataccgcatacgccctacgggggaaagcaggggaccttcgggccttgcgctatcagatgagcctaggtcggattagctagttggtgaggtaatggctcaccaaggcgacgatccgtaactggtctgagaggatgatcagtcacactggaactgagacacggtccagactcctacgggaggcagcagtggggaatattggacaatgggcgaaagcctgatccagccatgccgcgtgtgtgaagaaggtcttcggattgtaaagcactttaagttgggaggaagggtacttacctaatacgtgagtattttgacgttaccgacagaataagcaccggctaactctgtgccagcagccgcggtaatacagagggtgcaagcgttaatcggaattactgggcgtaaagcgcgcgtaggtggttcgttaagttggatgtgaaatccccgggctcaacctgggaactgcatccaaaactggcgagctagagtagggcagagggtggtggaatttcctgtgtagcggtgaaatgcgtagatataggaaggaacaccagtggcgaaggcgaccacctgggctcatactgacactgaggtgcgaaagcgtggggagcaaacaggattagataccctggtagtccacgccgtaaacgatgtcaactagccgttggaatccttgagattttagtggcgcagctaacgcattaagttgaccgcctggggagtacggccgcaaggttaaaactcaaatgaattgacgggggcccgcacaagcggtggagcatgtggtttaattcgaagcaacgcgaagaaccttaccaggccttgacatgcagagaactttccagagatggattggtgccttcgggaactctgacacaggtgctgcatggctgtcgtcagctcgtgtcgtgagatgttgggttaagtcccgtaacgagcgcaacccttgtccttagttaccagcacgttatggtgggcactctaaggagactgccggtgacaaaccggaggaaggtggggatgacgtcaagtcatcatggcccttacggcctgggctacacacgtgctacaatggtcggtacagagggttgccaagccgcgaggtggagctaatctcacaaaaccgatcgtagtccggatcgcagtctgcaactcgactgcgtgaagtcggaatcgctagtaatcgcgaatcagaatgtcgcggtgaatacgttcccgggccttgtacacaccgcccgtcacaccatgggagtgggttgcaccagaagtagctagtctaaccttcgggaggacggttaccacggtgtgattcatgactggggtgaagtcgtaacaaggtagccgtaggggaacctgcggctggatcacctcctt

SEQ ID NO: 1034 - DNA, 1547 bp, artificial sequence
  GCF_000185525.1_03113_Anaerostipes_hadrus
tatggagagtttgatcctggctcaggacgaacgctggcggcgtgcctaatacatgcaagtcgagcggagagaagaagcttgcttcttcttttagcggcggacgggtgagtaacacgtgggcaacctaccttgtagattgggataactccgggaaaccggggctaataccaaataatccattttgcttcatggcgaaatgttgaaaggcggcttcggctgtcactacaagatgggcccgcggcgtattagctagttggtagggtaatggcctaccaaggcgacgatacgtagccgacctgagagggtgatcggccacactgggactgagacacggcccagactcctacgggaggcagcagtagggaatcttccacaatggacgaaagtctgatggagcaacgccgcgtgagtgaagaaggttttcggatcgtaaaactctgttgtaagggaagaacacgtacgagagtaactgctcgtaccttgacggtaccttattagaaagccacggctaactacgtgccagcagccgcggtaatacgtaggtggcaagcgttgtccggaattattgggcgtaaagcgcgcgcaggcggtcctttaagtccgatgtgaaagcccacggctcaaccgtggagggtcattggaaactgggggacttgagtacagaagaggaaagcggaattccacgtgtagcggtgaaatgcgtagagatgtggaggaacaccagtggcgaaggcggctttctggtctgtaactgacgctgaggcgcgaaagcgtggggagcaaacaggattagataccctggtagtccacgccgtaaacgatgagtgctaagtgttagggggtttccgccccttagtgctgcagctaacgcattaagcactccgcctggggagtacggccgcaaggctgaaactcaaaggaattgacgggggcccgcacaagcggtggagcatgtggtttaattcgaagcaacgcgaagaaccttaccaggtcttgacatcccactgaccggtttagagataagcctttcccttcggggacagtggtgacaggtggtgcatggttgtcgtcagctcgtgtcgtgagatgttgggttaagtcccgcaacgagcgcaacccttgatcttagttgccagcattcagttgggcactctaaggtgactgccggtgataaaccggaggaaggtggggatgacgtcaaatcatcatgccccttatgacctgggctacacacgtgctacaatggacgatacaaagggctgcaaacccgcgagggggagccaatcccataaaatcgttctcagttcggattgtaggctgcaactcgcctacatgaagccggaatcgctagtaatcgcggatcagcatgccgcggtgaatacgttcccgggccttgtacacaccgcccgtcacaccacgagagtttgtaacacccgaagtcggtgaggtaacccttgtggagccagccgccgaaggtgggacagatgattggggtgaagtcgtaacaaggtagccgtatcggaaggtgcggctggatcacctccttt

SEQ ID NO: 1035 - DNA, 1510 bp, artificial sequence
  GCF_000332875.2_00536_Anaerostipes_hadrus
atgaagagtttgatcctggctcaggatgaacgctagcggcaggcctaacacatgcaagtcgagggagaagccctttcgggggcagaaaccggcgcacgggtgcgtaacgcgtatgcaacctacctttcacagggggatagcccgaagaaatttggattaataccccataatattattggatggcatcatttgataattaaaactgaggtggtgaaagatgggcatgcgtcctattagctagttggagtggtaacggcaccccaaggctacgataggtaggggtcctgagagggagatcccccacactggtactgagacagggaccagactcctacgggaggcagcagtgaggaatattggtcaatggtcggaagactgaaccagccatgccgcgtgcaggaagaatgccttatgggttgtaaactgcttttatatgggaagaataaggcgtacgtgtacgttgatgacggtaccatatgaataagcatcggctaactccgtgccagcagccgcggtaatacggaggatgcgagcgttattcggaatcattgggtttaaagggtctgtaggcgggctattaagtcaggggtgaaaggtttcagcttaactgagaaattgcctttgatactggtagtcttgaatatctgtgaagttcttggaatgtgtagtgtagcggtgaaatgcttagatattacacagaacaccgattgcgaaggcaggggactaacagacaattgacgctgagagacgaaagcgtggggagcgaacaggattagataccctggtagtccacgctgtaaacgatggatactagctgtttggcgcaagctgagtggctaagcgaaagtgataagtatcccacctggggagtacgcacgcaagtgtgaaactcaaaggaattgacgggggcccgcacaagcggtggagcatgtggtttaattcgatgatacgcgaggaaccttaccaaggtttaaatggagactgacaggtgtagagatacgcccttcttcggacagttttcaaggtgctgcatggttgtcgtcagctcgtgccgtgaggtgtcaggttaagtcctataacgagcgcaacccctattgttagttaccagcaagtaaagttggggactctagcaagactgccggtgtaaaccgtgaggaaggtggggatgacgtcaaatcatcacggcccttacatcttgggctacacacgtgctacaatggtcgttacagagagcagccactgcgcgagcaggagcgaatctataaagacggtcacagttcggatcggagtctgcaactcgactccgtgaagctggaatcgctagtaatcggatatcagccatgatccggtgaatacgttcccgggccttgtacacaccgcccgtcaagccatggaagctgggagtacctgaagtcggtcaccgcaaggagctgcctagggtaaaaccagtgactggggctaagtcgtaacaaggtagccgtaccggaaggtgtggctggaacacctcctt

SEQ ID NO: 1036 - DNA, 1522 bp, artificial sequence
  GCF_000876135.1_03543_Anaerostipes_hadrus
ttggagagtttgatcctggctcaggacgaacgctggcggcgtgcttaacacatgcaagtcgaacggaaaggccctgcttttgtggggtgctcgagtggcgaacgggtgagtaacacgtgagtaacctgcccttgactttgggataacttcaggaaactggggctaataccggataggagctcctgctgcatggtgggggttggaaagtttcggcggttggggatggactcgcggcttatcagcttgttggtggggtagtggcttaccaaggctttgacgggtagccggcctgagagggtgaccggccacattgggactgagatacggcccagactcctacgggaggcagcagtggggaatattgcacaatgggcggaagcctgatgcagcaacgccgcgtgcgggatgacggccttcgggttgtaaaccgctttcgcctgtgacgaagcgtgagtgacggtaatgggtaaagaagcaccggctaactacgtgccagcagccgcggtgatacgtagggtgcgagcgttgtccggatttattgggcgtaaagggctcgtaggtggttgatcgcgtcggaagtgtaatcttggggcttaaccctgagcgtgctttcgatacgggttgacttgaggaaggtaggggagaatggaattcctggtggagcggtggaatgcgcagatatcaggaggaacaccagtggcgaaggcggttctctgggcctttcctgacgctgaggagcgaaagcgtggggagcgaacaggcttagataccctggtagtccacgctgtaaacggtgggtactaggtgtggggtccattccacgggttccgtgccgtagctaacgctttaagtaccccgcctggggagtacggccgcaaggctaaaactcaaaggaattgacggggccccgcacaagcggcggagcatgcggattaattcgatgcaacgcgtagaaccttacctgggtttgacatggatcgggagtgctcagagatgggtgtgcctcttttggggtcggttcacaggtggtgcatggctgtcgtcagctcgtgtcgtgagatgttgggttaagtcccgcaacgagcgcaacccttgttcactgttgccagcacgttatggtggggactcagtggagaccgccggggtcaactcggaggaaggtggggatgacgtcaagtcatcatgccccttatgtccagggcttcacgcatgctacaatggctggtacagagagtggcgagcctgtgagggtgagcgaatctcggaaagccggtctcagttcggattggggtctgcaactcgacctcatgaagtcggagtcgctagtaatcgcagatcagcaacgctgcggtgaatacgttcccggggcttgtacacaccgcccgtcaagtcatgaaagttggtaacacccgaagccggtggcctaaccgttgtgggggagccgtcgaaggtgggactggtgattaggactaagtcgtaacaaggtagccgtaccggaaggtgcggctggatcacctccttt

SEQ ID NO: 1037 - DNA, 1558 bp, artificial sequence
  GCF_001404655.1_01547_Anaerostipes_hadrus
tatgagagtttgatcctggctcaggacgaacgctggcggcgtgcctaatacatgcaagtcgaacgcttctttcctcccgagtgcttgcactcaattggaaagaggagtggcggacgggtgagtaacacgtgggtaacctacccatcagagggggataacacttggaaacaggtgctaataccgcataacagtttatgccgcatggcataagagtgaaaggcgctttcgggtgtcgctgatggatggacccgcggtgcattagctagttggtgaggtaacggctcaccaaggccacgatgcatagccgacctgagagggtgatcggccacactgggactgagacacggcccagactcctacgggaggcagcagtagggaatcttcggcaatggacgaaagtctgaccgagcaacgccgcgtgagtgaagaaggttttcggatcgtaaaactctgttgttagagaagaacaaggacgttagtaactgaacgtcccctgacggtatctaaccagaaagccacggctaactacgtgccagcagccgcggtaatacgtaggtggcaagcgttgtccggatttattgggcgtaaagcgagcgcaggcggtttcttaagtctgatgtgaaagcccccggctcaaccggggagggtcattggaaactgggagacttgagtgcagaagaggagagtggaattccatgtgtagcggtgaaatgcgtagatatatggaggaacaccagtggcgaaggcggctctctggtctgtaactgacgctgaggctcgaaagcgtggggagcaaacaggattagataccctggtagtccacgccgtaaacgatgagtgctaagtgttggagggtttccgcccttcagtgctgcagcaaacgcattaagcactccgcctggggagtacgaccgcaaggttgaaactcaaaggaattgacgggggcccgcacaagcggtggagcatgtggtttaattcgaagcaacgcgaagaaccttaccaggtcttgacatcctttgaccactctagagatagagctttcccttcggggacaaagtgacaggtggtgcatggttgtcgtcagctcgtgtcgtgagatgttgggttaagtcccgcaacgagcgcaacccttattgttagttgccatcatttagttgggcactctagcgagactgccggtgacaaaccggaggaaggtggggatgacgtcaaatcatcatgccccttatgacctgggctacacacgtgctacaatgggaagtacaacgagtcgctagaccgcgaggtcatgcaaatctcttaaagcttctctcagttcggattgcaggctgcaactcgcctgcatgaagccggaatcgctagtaatcgcggatcagcacgccgcggtgaatacgttcccgggccttgtacacaccgcccgtcacaccacgagagtttgtaacacccgaagtcggtgaggtaacctttttggagccagccgcctaaggtgggatagatgattggggtgaagtcgtaacaaggtagccgtatcggaaggtgcggctggatcacctccttt

SEQ ID NO: 1038 - DNA, 1558 bp, artificial sequence; identical to SEQ ID NO: 1037
  GCF_001404835.1_01194_Anaerostipes_hadrus

SEQ ID NO: 1039 - DNA, 1486 bp, artificial sequence
  GCF_001405635.1_02744_Anaerostipes_hadrus
cttgagagtttgatcctggctcagaacgaacgctggcggcatgcctaacacatgcaagtcgaacgagaccttcgggtctagtggcgcacgggtgcgtaacgcgtgggaatctgcccttgggttcggaataacagtgagaaattactgctaataccggatgatgtcttcggaccaaagatttatcgcccagggatgagcccgcgtaggattaggtagttggtggggtaatggcctaccaagccgacgatccttagctggtctgagaggatgatcagccacactgggactgagacacggcccagactcctacgggaggcagcagtggggaatattggacaatgggcgaaagcctgatccagcaatgccgcgtgagtgatgaaggccttagggttgtaaagctcttttacccgggatgataatgacagtaccgggagaataagctccggctaactccgtgccagcagccgcggtaatacggagggagctagcgttgttcggaattactgggcgtaaagcgcgcgtaggcggttactcaagtcagaggtgaaagcccggggctcaaccccggaactgcctttgaaactaggtaactagaatcttggagaggtcagtggaattccgagtgtagaggtgaaattcgtagatattcggaagaacaccagtggcgaaggcgactgactggacaagtattgacgctgaggtgcgaaagcgtggggagcaaacaggattagataccctggtagtccacgccgtaaacgatgataactagctgtccgggtacttggtacttgggtggcgcagctaacgcattaagttatccgcctggggagtacggtcgcaagattaaaactcaaaggaattgacgggggcctgcacaagcggtggagcatgtggtttaattcgaagcaacgcgcagaaccttaccagcgtttgacatcctcatcgcggattagagagatcttttccttcagttcggctggatgagtgacaggtgctgcatggctgtcgtcagctcgtgtcgtgagatgttgggttaagtcccgcaacgagcgcaaccctcgtccttagttgccatcatttagttgggcactctaaggaaactgccggtgataagccggaggaaggtggggatgacgtcaagtcctcatggcccttacacgctgggctacacacgtgctacaatggcggtgacagtgggcagcaagcacgcgagtgtgagctaatctccaaaagccgtctcagttcggattgttctctgcaactcgagagcatgaaggcggaatcgctagtaatcgcggatcagcatgccgcggtgaatacgttcccaggccttgtacacaccgcccgtcacaccatgggagttggattcactcgaaggcgttgagctaacccgcaagggaggcaggcgaccacagtgggtttagcgactggggtgaagtcgtaacaaggtagccgtaggggaacctgcggctggatcacctccttt

SEQ ID NO: 1040 - DNA, 1513 bp, artificial sequence
  GCF_001405715.1_03038_Anaerostipes_hadrus
atggagagtttgatcctggctcaggacgaacgctggcggcgtgcttaacacatgcaagtcgagcggtaaggcccttcggggtacacgagcggcgaacgggtgagtaacacgtgggtaacctgccctgcactttgggataacctcgggaaaccggggctaataccggatatgacatgccatcgcatggtggtgtgtggaaagttccggcggtgtgggatgggcccgcggcctatcagcttgttggtggggtgatggcctaccaaggcgacgacgggtagccggcctgagagggcgaccggccacactgggactgagacacggcccagactcctacgggaggcagcagtggggaatattgcgcaatgggcgaaagcctgacgcagcgacgccgcgtgagggatgactgccttcgggttgtaaacctctttcagcgccgaagaagcgaaagtgacggtaggcgcagaagaagcaccggctaactacgtgccagcagccgcggtaatacgtagggtgcgagcgttgtccggaattattgggcgtaaagagctcgtaggcggtttgtcgcgtcggctgtgaaaacctggggcttaaccccgggcgtgcagtcgatacgggcagacttgagttcggcaggggagactggaattcctggtgtagcggtgaaatgcgcagatatcaggaggaacaccggtggcgaaggcgggtctctgggccgatactgacgctgaggagcgaaagcgtggggagcgaacaggattagataccctggtagtccacgccgtaaacggtgggcgctaggtgtgggggatttccacgtcctccgtgccgtagctaacgcattaagcgccccgcctggggagtacggccgcaaggctaaaactcaaaggaattgacgggggcccgcacaagcggcggagcatgtggattaattcgatgcaacgcgaagaaccttacctgggtttgacatgcaccggacagcctcagagatggggtttccgcaaggtcggtgtacaggtggtgcatggctgtcgtcagctcgtgtcgtgagatgttgggttaagtcccgcaacgagcgcaacccttattccatgttgccagcacgtaatggtggggactcatgggagactgccggggtcaactcggaggaaggtggggacgacgtcaagtcatcatgccccttatgtccagggcttcacacatgctacaatggccggtacaaagggctgctaagccgtgaggtggagcgaatcccagaaagccggtctcagttcggatcggggtctgcaactcgaccccgtgaagtcggagtcgctagtaatcgcagatcagcaacgctgcggtgaatacgttcccgggccttgtacacaccgcccgtcacgtcacgaaagtcggtaacacccgaagcccatggcccaacccgtgagggggggagtggtcgaaggtgggactggcgattgggacgaagtcgtaacaaggtagccgtaccggaaggtgcggctggatcacctccttt

SEQ ID NO: 1041 - DNA, 1528 bp, artificial sequence
  GCF_001998765.1_00003_Anaerostipes_hadrus
atgagagtttgatcctggctcaggatgaacgctggcggcgtgcctaacacatgcaagtcgaacgaagcgattaagatgaagttttcggatggaatcttgattgactgagtggcggacgggtgagtaacgcgtggataacctgcctcacactgggggataacagttagaaatgactgctaataccgcataagcgcacagtgccgcatggcagtgtgtgaaaaactccggtggtgtgagatggatccgcgtctgattagccagttggcggggtaacggcccaccaaagcgacgatcagtagccgacctgagagggtgaccggccacattgggactgagacacggcccaaactcctacgggaggcagcagtggggaatattgcacaatgggcgaaagcctgatgcagcgacgccgcgtgagtgaagaagtatttcggtatgtaaagctctatcagcagggaagaaaatgacggtacctgactaagaagccccggctaactacgtgccagcagccgcggtaatacgtagggggcaagcgttatccggatttactgggtgtaaagggagcgtagacggcgaagcaagtctgaagtgaaaacccagggctcaaccctgggactgctttggaaactgttttgctagagtgtcggagaggtaagtggaattcctagtgtagcggtgaaatgcgtagatattaggaggaacaccagtggcgaaggcggcttactggacgataactgacgttgaggctcgaaagcgtggggagcaaacaggattagataccctggtagtccacgccgtaaacgatgaatgctaggtgttggggggcaaagcccttcggtgccgccgcaaacgcagtaagcattccacctggggagtacgttcgcaagaatgaaactcaaaggaattgacggggacccgcacaagcggtggagcatgtggtttaattcgaagcaacgcgaagaaccttaccaagtcttgacatccccctggcgggccggtaacgcggcctttccttcgggacaggggagacaggtggtgcatggttgtcgtcagctcgtgtcgtgagatgttgggttaagtcccgcaacgagcgcaacccttatccttagtagccagcacgtgaaggtgggcactctagggagactgccagggataacctggaggaaggtggggatgacgtcaaatcatcatgccccttatgatttgggctacacacgtgctacaatggcgtaaacaaagggaagcgagacagtgatgtggagcaaatcccaaaaataacgtcccagttcggactgtagtctgcaacccgactacacgaagctggaatcgctagtaatcgcgaatcagaatgtcgcggtgaatacgttcccgggtcttgtacacaccgcccgtcacaccatgggagtcagcaacgcccgaagtcagtgacccaaccgaaaggagggagttgccgaaggcggggcaggtaactggggtgaagtcgtaacaaggtagccgtatcggaaggtgcggctggatcacctccttt

SEQ ID NO: 1042 - DNA, 1528 bp, artificial sequence
  GCF_001998765.1_00008_Anaerostipes_hadrus
atgagagtttgatcctggctcaggatgaacgctggcggcgtgcctaacacatgcaagtcgaacgaagcgattaagatgaagttttcggatggaatcttgattgactgagtggcggacgggtgagtaacgcgtggataacctgcctcacactgggggataacagttagaaatgactgctaataccgcataagcgcacagtgccgcatggcagtgtgtgaaaaactttggtggtgtgagatggatccgcgtctgattagccagttggcggggtaacggcccaccaaagcgacgatcagtagccgacctgagagggtgaccggccacattgggactgagacacggcccaaactcctacgggaggcagcagtggggaatattgcacaatgggcgaaagcctgatgcagcgacgccgcgtgagtgaagaagtatttcggtatgtaaagctctatcagcagggaagaaaatgacggtacctgactaagaagccccggctaactacgtgccagcagccgcggtaatacgtagggggcaagcgttatccggatttactgggtgtaaagggagcgtagacggcgaagcaagtctgaagtgaaaacccagggctcaaccctgggactgctttggaaactgttttgctagagtgtcggagaggtaagtggaattcctagtgtagcggtgaaatgcgtagatattaggaggaacaccagtggcgaaggcggcttactggacgataactgacgttgaggctcgaaagcgtggggagcaaacaggattagataccctggtagtccacgccgtaaacgatgaatgctaggtgttggggggcaaagcccttcggtgccgccgcaaacgcagtaagcattccacctggggagtacgttcgcaagaatgaaactcaaaggaattgacggggacccgcacaagcggtggagcatgtggtttagttcgaagcaacgcgaagaaccttaccaagtcttgacatccccctggcgggccggtaacgcggcctttccttcgggacaggggagacaggtggtgcatggttgtcgtcagctcgtgtcgtgagatgttgggttaagtcccgcaacgagcgcaacccttatccttagtagccagcacgtgaaggtgggcactctagggagactgccagggataacctggaggaaggtggggatgacgtcaaatcatcatgccccttatgatttgggctacacacgtgctacaatggcgtaaacaaagggaagcgagacagtgatgtggagcaaatcccaaaaataacgtcccagttcggactgtagtctgcaacccgactacacgaagctggaatcgctagtaatcgcgaatcagaatgtcgcggtgaatacgttcccgggtcttgtacacaccgcccgtcacaccatgggagtcagcaacgcccgaagtcagtgacccaaccgaaaggagggagctgccgaaggcggggcaggtaactggggtgaagtcgtaacaaggtagccgtatcggaaggtgcggctggatcacctccttt

SEQ ID NO: 1043 - DNA, 1537 bp, artificial sequence
  GCF_001998765.1_00375_Anaerostipes_hadrus
atggagagtttgatcctggctcaggatgaacgctggcggcatgcctaatacatgcaagtcgaacgaagtttcgaggaagcttgcttccaaagagacttagtggcgaacgggtgagtaacacgtaggtaacctgcccatgtgtccgggataactgctggaaacggtagctaaaaccggataggtatacggagcgcatgctctgtatattaaagcgcccatcaaggcgtgaacatggatggacctgcggcgcattagctagttggtgaggtaacggcccaccaaggcgatgatgcgtagccggcctgagagggtaaacggccacattgggactgagacacggcccaaactcctacgggaggcagcagtagggaattttcgtcaatgggggaaaccctgaacgagcaatgccgcgtgagtgaagaaggtcttcggatcgtaaagctctgttgtaagtgaagaacggctcatagaggaaatgctatgggagtgacggtagcttaccagaaagccacggctaactacgtgccagcagccgcggtaatacgtaggtggcaagcgttatccggaatcattgggcgtaaagggtgcgtaggtggcgtactaagtctgtagtaaaaggcaatggctcaaccattgtaagctatggaaactggtatgctggagtgcagaagagggcgatggaattccatgtgtagcggtaaaatgcgtagatatatggaggaacaccagtggcgaaggcggtcgcctggtctgtaactgacactgaggcacgaaagcgtggggagcaaataggattagataccctagtagtccacgccgtaaacgatgagaactaagtgttggaggaattcagtgctgcagttaacgcaataagttctccgcctggggagtatgcacgcaagtgtgaaactcaaaggaattgacgggggcccgcacaagcggtggagtatgtggtttaattcgaagcaacgcgaagaaccttaccaggccttgacatggaaacaaataccctagagatagggggataattatggatcacacaggtggtgcatggttgtcgtcagctcgtgtcgtgagatgttgggttaagtcccgcaacgagcgcaacccttgtcgcatgttaccagcatcaagttggggactcatgcgagactgccggtgacaaaccggaggaaggtggggatgacgtcaaatcatcatgccccttatggcctgggctacacacgtactacaatggcgaccacaaagagcagcgacttggtgacaagaagcgaatctcataaaggtcgtctcagttcggattgaagtctgcaactcgacttcatgaagtcggaatcgctagtaatcgcagatcagcatgctgcggtgaatacgttctcgggccttgtacacaccgcccgtcaaaccatgggagtcagtaatacccgaagccggtggcataaccgtaaggagtgagccgtcgaaggtaggaccgatgactggggttaagtcgtaacaaggtatccctacgggaacgtggggatggatcacctccttt

SEQ ID NO: 1044 - DNA, 998 bp, artificial sequence
  GCF_001998765.1_00382_Anaerostipes_hadrus
atggagagtttgatcctggctcaggatgaacgctggcggcatgcctaatacatgcaagtcgaacgaagtttcgaggaagcttgcttccaaagagacttagtggcgaacgggtgagtaacacgtaggtaacctgcccatgtgtccgggataactgctggaaacggtagctaaaaccggataggtatacagagcgcatgctcagtatattaaagcgcccatcaaggcgtgaacatggatggacctgcggcgcattagctagttggtgaggtaacggcccaccaaggcgatgatgcgtagccggcctgagagggtaaacggccacattgggactgagacacggcccaaactcctacgggaggcagcagtagggaattttcgtcaatgggggaaaccctgaacgagcaatgccgcgtgagtgaagaaggtcttcggatcgtaaagctctgttgtaagtgaagaacggctcatagaggaaatgctatgggagtgacggtagcttaccagaaagccacggctaactacgtgccagcagccgcggtaatacgtaggtggcaagcgttatccggaatcattgggcgtaaagggtgcgtaggtggcgtactaagtctgtagtaaaaggcaatggctcaaccattgtaagctatggaaactggtatgctggagtgcagaagagggcgatggaattccatgtgtagcggtaaaatgcgtagatatatggaggaacaccagtggcgaaggcggtcgcctggtctgtaactgacactgaggcacgaaagcgtggggagcaaataggattagataccctagtagtccacgccgtaaacgatgagaactaagtgttggaggaattcagtgctgcagttaacgcaataagttctccgcctggggagtatgcacgcaagtgtgaaactcaaaggaattgacgggggcccgcacaagcggtggagtatgtggtttaattcgaagcaacgcgaagaaccttaccaggccttgacatg

SEQ ID NO: 1045 - DNA, 1507 bp, artificial sequence
  GCF_001998765.1_01444_Anaerostipes_hadrus
attaagagtttgatcctggctcaggacgaacgctggcggcgtgcttaacacatgcaagtcgagcgatgaagctccttcgggagtggattagcggcggacgggtgagtaacacgtgggtaacctacctcaaagagggggatagcctcccgaaagggagattaataccgcataataatcagttttcacatggagactgatttaaaggagtaatccgctttgagatggacccgcggcgcattagctagttggtagggtaacggcctaccaaggcgacgatgcgtagccgacctgagagggtgatcggccacattggaactgagagacggtccagactcctacgggaggcagcagtggggaatattgcacaatgggcgaaagcctgatgcagcaacgccgcgtgagtgaagaaggttttcggattgtaaagctctgtctttggggacgataatgacggtacccaaggaggaagccacggctaactacgtgccagcagccgcggtaatacgtaggtggcgagcgttgtccggaattactgggcgtaaagagtgcgtaggcggatatttaagtgagatgtgaaatacccgggcttaacccgggcactgcatttcaaactggatatctagagtgcgggagaggagaatggaattcctagtgtagcggtgaaatgcgtagagattaggaagaacaccagtggcgaaggcgattctctggaccgtaactgacgctgaggcacgaaagcgtgggtagcaaacaggattagataccctggtagtccacgccgtaaacgatgagtactaggtgtaggaggtatcgaccccttctgtgccgcagtaaacacaataagtactccgcctgggaagtacgatcgcaagattaaaactcaaaggaattgacgggggcccgcacaagcagcggagcatgtggtttaattcgaagcaacgcgaagaaccttacctggacttgacataccctgaatatcttagagataagagaagcccttcggggcagggatacaggtggtgcatggttgtcgtcagctcgtgtcgtgagatgttaggttaagtcctgcaacgagcgcaacccctgttgttagttgctaacatttagttgagcactctagcaagactgccgcggttaacgcggaggaaggtggggatgacgtcaaatcatcatgccccttatgtccagggcaacacacgtgctacaatgggcagtacagagagaagcaagaccgcaaggtggagcaaacctcaaaaactgcccccagttcggattgcaggctgaaactcgcctacatgaagttggagttgctagtaatcgcgaatcagaatgtcgcggtgaatacgttcccgggccttgtacacaccgcccgtcacaccatgagagctggcaacacccgaagtccgtagtctaacttaggaggacgcggccgaaggtggggttagtaattggggtgaagtcgtaacaaggtagccgtaggagaacctgcggctggatcacctccttt

SEQ ID NO: 1046 - DNA, 1507 bp, artificial sequence; identical to SEQ ID NO: 1045
  GCF_001998765.1_01500_Anaerostipes_hadrus

SEQ ID NO: 1047 - DNA, 1507 bp, artificial sequence
  GCF_001998765.1_01951_Anaerostipes_hadrus
attaagagtttgatcctggctcaggacgaacgctggcggcgtgcttaacacatgcaagtcgagcgatgaagctccttcgggagtggattagcggcggacgggtgagtaacacgtgggtaacctacctcaaagagggggatagcctcccgaaagggagattaataccgcataataatcggttttcacatggagactgatttaaaggagtaatccgctttgagatggacccgcggcgcattagctagttggtagggtaacggcctaccaaggcgacgatgcgtagccgacctgagagggtgatcggccacattggaactgagagacggtccagactcctacgggaggcagcagtggggaatattgcacaatgggcgaaagcctgatgcagcaacgccgcgtgagtgaagaaggttttcggattgtaaagctctgtctttggggacgataatgacggtacccaaggaggaagccacggctaactacgtgccagcagccgcggtaatacgtaggtggcgagcgttgtccggaattactgggcgtaaagagtgcgtaggcggatatttaagtgagatgtgaaatacccgggcttaacccgggcactgcatttcaaactggatatctagagtgcgggagaggagaatggaattcctagtgtagcggtgaaatgcgtagagattaggaagaacaccagtggcgaaggcgattctctggaccgtaactgacgctgaggcacgaaagcgtgggtagcaaacaggattagataccctggtagtccacgccgtaaacgatgagtactaggtgtaggaggtatcgaccccttctgtgccgcagtaaacacaataagtactccgcctgggaagtacgatcgcaagattaaaactcaaaggaattgacgggggcccgcacaagcagcggagcatgtggtttaattcgaagcaacgcgaagaaccttacctggacttgacataccctgaatatcttagagataagagaagcccttcggggcagggatacaggtggtgcatggttgtcgtcagctcgtgtcgtgagatgttaggttaagtcctgcaacgagcgcaacccctgttgttagttgctaacatttagttgagcactctagcaagactgccgcggttaacgcggaggaaggtggggatgacgtcaaatcatcatgccccttatgtccagggcaacacacgtgctacaatgggcagtacagagagaagcaagaccgcaaggtggagcaaacctcaaaaactgcccccagttcggattgcaggctgaaactcgcctacatgaagttggagttgctagtaatcgcgaatcagaatgtcgcggtgaatacgttcccgggccttgtacacaccgcccgtcacaccatgagagctggcaacacccgaagtccgtagtctaacttaggaggacgcggccgaaggtggggttagtaattggggtgaagtcgtaacaaggtagccgtaggagaacctgcggctggatcacctccttt

SEQ ID NO: 1048 - DNA, 1507 bp, artificial sequence; identical to SEQ ID NO: 1045
  GCF_001998765.1_02295_Anaerostipes_hadrus

SEQ ID NO: 1049 - DNA, 1507 bp, artificial sequence; identical to SEQ ID NO: 1045
  GCF_001998765.1_03149_Anaerostipes_hadrus

SEQ ID NO: 1050 - DNA, 1530 bp, artificial sequence
  GCF_003461705.1_00960_Anaerostipes_hadrus
tgaagagtttgatcatggctcagattgaacgctggcggcaggcttaacacatgcaagtcgagcggtaacaggagaagcttgcttcttgctgacgagcggcggacgggtgagtaatacttaggaatctgcccagtagtgggggatagctcggggaaactcgaattaataccgcatacaccctacggggaaaagggggcgcttgcgctctcgctattggatgagcctaagtcggattagctagttggtggggtaaaggcctaccaaggcgacgatctgtagctggtctgagaggatgatcagccacaccgggactgagacacggcccggactcctacgggaggcagcagtggggaatattggacaatggggggaaccctgatccagccatgccgcgtgtgtgaagaaggccttttggttgtaaagcactttaagcagtgaagaagactctatggttaatacccatagacgatgacattagctgcagaataagcaccggctaactctgtgccagcagccgcggtaatacagagggtgcaagcgttaatcggaattactgggcgtaaagcgagcgtaggtggcttaataagtcagatgtgaaatccccgggcttaacctgggaactgcatctgatactgttaggctagagtaggtgagagggaggtagaatttcaggtgtagcggtgaaatgcgtagagatctgaaggaataccgatggcgaaggcagcctcctggcatcatactgacactgaggttcgaaagcgtgggtagcaaacaggattagataccctggtagtccacgccgtaaacgatgtctactagtcgttggggaacttgattccttagtgacgcagctaacgcaataagtagaccgcctggggagtacggccgcaaggttaaaactcaaatgaattgacgggggcccgcacaagcggtggagcatgtggtttaattcgatgcaacgcgaagaaccttacctggtcttgacatatctagaatcctgcagagatgcgggagtgccttcgggaattagaatacaggtgctgcatggctgtcgtcagctcgtgtcgtgagatgttgggttaagtcccgcaacgagcgcaacccttttccttagttaccagcggtttggccggggactctaaggatactgccagtgacaaactggaggaaggcggggacgacgtcaagtcatcatggcccttacgaccagggctacacacgtgctacaatggtaggtacagagggctgctacacagcgatgtgatgcgaatctcaaaaagcctatcgtagtccagattggagtctgcaactcgactccatgaagtcggaatcgctagtaatcgcggatcagaatgccgcggtgaatacgttcccgggccttgtacacaccgcccgtcacaccatgggagttgattgcaccagaagtgggtagcctaacttttagagggcgctcaccacggtgtggtcgatgactggggtgaagtcgtaacaaggtagccgtaggggaacctgcggctggatcacctcctt

SEQ ID NO: 1051 - DNA, 1539 bp, artificial sequence
  GCF_003473625.1_01437_Anaerostipes_hadrus
ttgaagagtttgatcatggctcagattgaacgctggcggcaggcctaacacatgcaagtcgagcggcagcgcaagggagtttacttctgaggcggcgagcggcggacgggtgagtaatacctagggatctgcccagtcgagggggataacagttggaaacgactgctaataccgcatacgccctacgggggaaagaaggggaccttcgggcctttcgcgattggatgaacctaggtgggattagctagttggtgaggtaatggctcaccaaggcgacgatccctagctgttctgagaggatgatcagccacactgggactgagacacggcccagactcctacgggaggcagcagtggggaatattggacaatgggggcaaccctgatccagccatgccgcgtgtgtgaagaaggccttcgggttgtaaagcactttcagtagggaggaaaggtagcgtgttaatagcccgttactgtgacgttacctacagaagaaggaccggctaactccgtgccagcagccgcggtaatacggagggtccgagcgttaatcggaattactgggcgtaaagcgtgcgcaggcggtttgttaagcaagatgtgaaagccccgggctcaacctgggaattgcattttgaactggcgaactagagtcttgtagaggggggtagaattccaggtgtagcggtgaaatgcgtagagatctggaggaataccggtggcgaaggcggccccctggacaaagactgacgctcaggcacgaaagcgtggggagcaaacaggattagataccctggtagtccacgccgtaaacgatgtctactcggagtttggtgtcttgaacactgggctctcaagctaacgcattaagtagaccgcctggggagtacggccgcaaggttaaaactcaaatgaattgacgggggcccgcacaagcggtggagcatgtggtttaattcgatgcaacgcgaagaaccttacctactcttgacatccacagaagagaccagagatggacttgtgccttcgggaactgtgagacaggtgctgcatggctgtcgtcagctcgtgttgtgaaatgttgggttaagtcccgcaacgagcgcaacccctatccttatttgccagcacgtaatggtgggaactctagggagactgccggtgataaaccggaggaaggtggggacgacgtcaagtcatcatggcccttacgagtagggctacacacgtgctacaatggcgagtacagagggttgcaaagccgcgaggtggagctaatctcacaaagctcgtcgtagtccggattggagtctgcaactcgactccatgaagtcggaatcgctagtaatcgtgaatcagaatgtcacggtgaatacgttcccgggccttgtacacaccgcccgtcacaccatgggagtgggctgcaaaagaagtgggtagcttaaccttcgggggggcgctcaccactttgtggttcatgactggggtgaagtcgtaacaaggtagccctaggggaacctggggctggatcacctcctt

SEQ ID NO: 1052 - DNA, 1505 bp, artificial sequence
  GCF_003473725.1_02843_Anaerostipes_hadrus
atggagagtttgatcctggctcagagtgaacgctggcggcgtgcttaacacatgcaagtcgaacggatgaaataagcttgcttatttcgttagtggcgcacgggtgagtaatgtatagctaacctgccctttagtgggggacaacagttggaaacgactgctaataccccatactccagcctatcaaaaggtaggttgggaaagatttattgctaaaggatggggctttatggtatcagctagttggtggggtaacggcctaccaaggcaatgacgcctacctggtctgagaggatgatcaggcacactggaactgagacacggtccagactcctacgggaggcagcagtggggaatattgcacaatgggggaaaccctgatgcagcaacgccgcgtggaggatgacgcatttcggtgtgtaaactccttttataagggaagataatgacggtaccttatgaataagcaccggctaactccgtgccagcagccgcggtaatacggagggtgcaagcgttactcggaatcactgggcgtaaaggatgcgtaggctgtaatataagtcagaagtgaaatccaacggcttaaccgttgaactgcttttgaaactgttttactagaatatgggagaggtagatggaattggtggtgtaggggtaaaatccgtagatatcaccaggaataccgattgcgaaggcgatctactggaacattattgacgctgaggcatgaaagcgtggggagcaaacaggattagataccctggtagtccacgccctaaacgatgcacactagttgttgcgatgctagtcattgcagtaatgcacttaacagattaagtgtgccgcctggggagtacggtcgcaagattaaaactcaaaggaatagacggggacccgcacaagcggtggagcatgtggtttaattcgaagatacacgaagaaccttacctgggcttgatatccttggaatcttgtagagatacgagagtgctagtttactagaaccaagagacaggtgctgcacggctgtcgtcagctcgtgtcgtgagatgttgggttaagtcccgcaacgagcgcaaccctcgtgattagttgctaacagttcggctgagcactctaatcagactgccttcgcaaggaggaggaaggtgaggacgacgtcaagtcatcatggcccttatgcccagggctacacacgtgctacaatggcgcgtacaaagagaggcgataccgcgaggtggagcaaatcttaaaaacgcgtctcagttcggattggagtctgcaactcgactccatgaagctggaatcgctagtaatcgtagatcagatatgctacggtgaatacgttcccgggtcttgtactcaccgcccgtcacaccatgggagttgaattcacccgaagccggaatactaaactagttaccgaccacggtgggttcagcgactggggtgaagtcgtaacaaggtaaccgtaggagaacctgcggttggatcacctcctt

SEQ ID NO: 1053 - DNA, 1516 bp, artificial sequence
  GCF_003477415.1_02336_Anaerostipes_hadrus
tacggagagtttgatcctggctcaggacgaacgctggcggcgtgcttaacacatgcaagtcgaacggtgaagcccagcttgctgggtggatcagtggcgaacgggtgagtaacacgtgagcaacctgccctccacttcgggataagccttggaaacggggtctaataccggatatgagtgcctgctgcatggtgggtgctggaaagtttttcggtgggggatgggctcgcggcctatcagcttgttggtggggtaatggcctaccaaggcgtcgacgggtagccggcctgagagggcgaccggccacactgggactgagacacggcccagactcctacgggaggcagcagtggggaatattgcacaatgggcgaaagcctgatgcagcgacgccgcgtgagggatgacggccttcgggttgtaaacctctttcagcagggaagaagcgcaagtgacggtacctgcagaagaagcgccggctaactacgtgccagcagccgcggtaatacgtagggcgcaagcgttgtccggaattattgggcgtaaagagctcgtaggcggtttgtcgcgtctggtgtgaaaacctcaggctcaacctggggcgtgcatcgggtacgggcagactagagtgcggtaggggagactggaattcctggtgtagcggtggaatgcgcagatatcaggaggaacaccgatggcgaaggcaggtctctgggccgcaactgacgctgaggagcgaaagcatggggagcgaacaggattagataccctggtagtccatgccgtaaacgttgggcactaggtgtggggctcattccacgagttccgtgccgcagctaacgcattaagtgccccgcctggggagtacggccgcaaggctaaaactcaaaggaattgacgggggcccgcacaagcggcggagcatgcggattaattcgatgcaacgcgaagaaccttaccaaggcttgacatgcaccggaaacactcagagatgggtgccccgcaaggtcggtgcacaggtggtgcatggttgtcgtcagctcgtgtcgtgagatgttgggttaagtcccgcaacgagcgcaaccctcgtcccatgttgccagcgggttatgccggggactcatgggagactgccggggtcaactcggaggaaggcggggatgacgtcaaatcatcatgccccttatgtcttgggcttcacgcatgctacaatggccggtacagagggctgcgataccgtaaggtggagcgaatcccaaaaagccggtctcagttcggattggggtctgcaactcgaccccatgaagtcggagtcgctagtaatcgcagatcagcaacgctgcggtgaatacgttcccgggccttgtacacaccgcccgtcaagtcacgaaagttggtaacacccgaagcccatggcccaaccctttggggggagtggtcgaaggtgggaccggcgattgggactaagtcgtaacaaggtagccgtaccggaaggtgcggctggatcacctccttt

SEQ ID NO: 1054 - DNA, 1520 bp, artificial sequence
  GCF_003480775.1_00171_Anaerostipes_hadrus
atcggagagtttgatcctggctcaggacgaacgctggcggcgtgcttaacacatgcaagtcgaacgatgagatggtgcttgcaccgttgattagtggcgaacgggtgagtaacacgtgagtaacctgcccatcactctgggataactccgggaaaccggtgctaatactggatatgactctcgcccgcatgggtagggggtggaaagatttatcggtggtggatggactcgcggcctatcagcttgttggtggggtaatggcctaccaaggcgacgacgggtagccggcctgagagggtgaccggccacactgggactgagacacggcccagactcctacgggaggcagcagtggggaatattgcacaatgggcggaagcctgatgcagcgacgccgcgtgcgggatgacggccttcgggttgtaaaccgctttcagctctgacgaagcttttgtgacggtaggagcagaagaagcaccggctaactacgtgccagcagccgcggtaatacgtagggtgcgagcgttgtccggaattattgggcgtaaagagcttgtaggcggcttgtcgcgtctgctgtgaaagcccggggcttaaccccgggtctgcagtgggtacgggcaggctagagtgtggtaggggagactggaattcctggtgtagcggtggaatgcgcagatatcaggaggaacaccgatggcgaaggcaggtctctgggccattactgacgctgagaagcgaaagcgtggggagcgaacaggattagataccctggtagtccacgccgtaaacgttgggcgctaggtgtgggtcccattccacggggtccgtgccgcagctaacgcattaagcgccccgcctggggagtacggccgcaaggctaaaactcaaaggaattgacgggggcccgcacaagcggcggagcatgcggattaattcgatgcaacgcgaagaaccttaccaaggcttgacatgtaccggaaaccctcggagacgggggccccgcaaggctggtacacaggtggtgcatggttgtcgtcagctcgtgtcgtgagatgttgggttaagtcccgcaacgagcgcaaccctcgttctatgttgccagcggttcggccggggactcataggagactgccggggtcaactcggaggaaggtggggatgacgtcaaatcatcatgccccttacgtcttgggcttcacgcatgctacaatggccggtacagagggctgcgataccgcgaggtggagcgaatcccttaaagctggtctcagttcggattggggtctgcaactcgaccccatgaagtcggagtcgctagtaatcgcagatcagcaacgctgcggtgaatacgttcccgggccttgtacacaccgcccgtcaagtcacgaaagtcggtaacacccgaagccggtggcccaaccccttgtgggggggagccgtcgaaggtgggactggtgattgggactaagtcgtaacaaggtagccgtaccggaaggtgcggctggatcacctccttt

SEQ ID NO: 1055 - DNA, 1146 bp, artificial sequence
  GCF_003480825.1_02520_Anaerostipes_hadrus
gagtaatgcctaggaatctgcctagtagtgggggataacgtccggaaacgggcgctaataccgcatacgtcctacgggagaaagtgggggatcttcggacctcacgctattagatgagcctaggtcggattagctagttggtgaggtaatggctcaccaaggctacgatccgtaactggtctgagaggatgatcagtcacactggaactgagacacggtccagactcctacgggaggcagcagtggggaatattggacaatgggcgaaagcctgatccagccatgccgcgtgtgtgaagaaggtcttcggattgtaaagcactttaagttgggaggaagggcagttacctaatacgtgattgttttgacgttaccgacagaataagcaccggctaactctgtgccagcagccgcggtaatacagagggtgcaagcgttaatcggaattactgggcgtaaagcgcgcgtaggtggtttgttaagttgaatgtgaaagccccgggctcaacctgggaactgcatccaaaactggcaagctagagtatggtagagggtggtggaatttcctgtgtagcggtgaaatgcgtagatataggaaggaacaccagtggcgaaggcgaccacctggactgatactgacactgaggtgcgaaagcgtggggagcaaacaggattagataccctggtagtccacgccgtaaacgatgtcaactagccgttgggagccttgagctcttagtggcgcagctaacgcattaagttgaccgcctggggagtacggccgcaaggttaaaactcaaatgaattgacgggggcccgcacaagcggtggagcatgtggtttaattcgaagcaacgcgaagaaccttaccaggccttgacatccaatgaactttctagagatagattggtgccttcgggagcattgagacaggtgctgcatggctgtcgtcagctcgtgtcgtgagatgttgggttaagtcccgtaacgagcgcaacccttgtccttagttaccagcacgttatggtgggcactctaaggagactgccggtgacaaaccggaggaaggtggggatgacgtcaagtcatcatggcccttacggcctgggctacacacgtgctacaatggtcggtacaaagggttgc

SEQ ID NO: 1056 - DNA, 1538 bp, artificial sequence
  GCF_003481105.1_02656_Anaerostipes_hadrus
  misc_feature (1131)..(1131): n is a, c, g, or t
  misc_feature (1133)..(1134): n is a, c, g, or t
  misc_feature (1137)..(1137): n is a, c, g, or t
ttgaagagtttgatcatggctcagattgaacgctggcggcaggcctaacacatgcaagtcgagcggcagcgggggaaagcttgctttcccgccggcgagcggcggacgggtgagtaatgtctgggaaactgcctgatggagggggataactactggaaacggtagctaataccgcataacgtcttcggaccaaagtgggggaccttcgggcctcatgccatcagatgtgcccagatgggattagctagtaggtggggtaacggctcacctaggcgacgatccctagctggtctgagaggatgaccagccacactggaactgagacacggtccagactcctacgggaggcagcagtggggaatattgcacaatgggcgcaagcctgatgcagccatgccgcgtgtatgaagaaggccttcgggttgtaaagtactttcagcggggaggaaggtgttgtggttaataaccgcagcaattgacgttacccgcagaagaagcaccggctaactccgtgccagcagccgcggtaatacggagggtgcaagcgttaatcggaattactgggcgtaaagcgcacgcaggcggtctgtcaagtcggatgtgaaatccccgggctcaacccgggaactgcatccgaaactggcaggcttgagtcttgtagaggggggtagaattccaggtgtagcggtgaaatgcgtagagatctggaggaataccggtggcgaaggcggccccctggacaaagactgacgctcaggtgcgaaagcgtggggagcaaacaggattagataccctggtagtccacgccgtaaacgatgtcgacttggaggttgtgcccttgaggcgtggcttccggagctaacgcgttaagtcgaccgcctggggagtacggccgcaaggttaaaactcaaatgaattgacgggggcccgcacaagcggtggagcatgtggtttaattcgatgcaacgcgaagaaccttacctggtcttgacatccacggaagttttcagagatgagaatgtgccttcgggaaccgtgagacaggtgctgcatggctgtcgtcagctcgtgttgtgaaatgttgggttaagtcccgcaacgagcgcaacccttatcctttgttgccagcgntnnggncgggaactcaaaggagactgccagtgataaactggaggaaggtggggatgacgtcaagtcatcatggcccttacgaccagggctacacacgtgctacaatggcatatacaaagagaagcgacctcgcgagagcaagcggacctcataaagtatgtcgtagtccggactggagtctgcaactcgactccacgaagtcggaatcgctagtaatcgtggatcagaatgccacggtgaatacgttcccgggccttgtacacaccgcccgtcacaccatgggagtgggttgcaaaagaagtaggtagcttaaccttcgggagggcgcttaccactttgtgattcatgactggggtgaagtcgtaacaaggtaaccgtaggggaacctgcggttggatcacctcctt

SEQ ID NO: 1057 - DNA, 1538 bp, artificial sequence
  GCF_003481805.1_02615_Anaerostipes_hadrus
ttgaagagtttgatcatggctcagattgaacgctggcggcaggcctaacacatgcaagtcgagcggcagcgggggaaagcttgctttcccgccggcgagcggcggacgggtgagtaatgtctgggaaactgcctgatggagggggataactactggaaacggtagctaataccgcataacgtcttcggaccaaagtgggggaccttcgggcctcatgccatcagatgtgcccagatgggattagctagtaggtggggtaacggctcacctaggcgacgatccctagctggtctgagaggatgaccagccacactggaactgagacacggtccagactcctacgggaggcagcagtggggaatattgcacaatgggcgcaagcctgatgcagccatgccgcgtgtatgaagaaggccttcgggttgtaaagtactttcagcggggaggaaggtgttgtggttaataaccgcagcaattgacgttacccgcagaagaagcaccggctaactccgtgccagcagccgcggtaatacggagggtgcaagcgttaatcggaattactgggcgtaaagcgcacgcaggcggtctgtcaagtcggatgtgaaatccccgggctcaacccgggaactgcatccgaaactggcaggcttgagtcttgtagaggggggtagaattccaggtgtagcggtgaaatgcgtagagatctggaggaataccggtggcgaaggcggccccctggacaaagactgacgctcaggtgcgaaagcgtggggagcaaacaggattagataccctggtagtccacgccgtaaacgatgtcgacttggaggttgtgcccttgaggcgtggcttccggagctaacgcgttaagtcgaccgcctggggagtacggccgcaaggttaaaactcaaatgaattgacgggggcccgcacaagcggtggagcatgtggtttaattcgatgcaacgcgaagaaccttacctggtcttgacatccacggaagttttcagagatgagaatgtgccttcgggaaccgtgagacaggtgctgcatggctgtcgtcagctcgtgttgtgaaatgttgggttaagtcccgcaacgagcgcaacccttatcctttgttgccagcggtccggccgggaactcaaaggagactgccagtgataaactggaggaaggtggggatgacgtcaagtcatcatggcccttacgaccagggctacacacgtgctacaatggcatatacaaagagaagcgacctcgcgagagcaagcggacctcataaagtatgtcgtagtccggactggagtctgcaactcgactccacgaagtcggaatcgctagtaatcgtggatcagaatgccacggtgaatacgttcccgggccttgtacacaccgcccgtcacaccatgggagtgggttgcaaaagaagtaggtagcttaaccttcgggagggcgcttaccactttgtgattcatgactggggtgaagtcgtaacaaggtaaccgtaggggaacctgcggttggatcacctcctt

SEQ ID NO: 1058 - DNA, 1529 bp, artificial sequence
  STR00464_Anaerotignum_lactatifermentans
taagagtttgatcctggctcaggatgaacgctggcggcgtgcttaacacatgcaagtcgaacgaagatatttagaatgagagcttcggcaggatttctttctatcttagtggcggacgggtgagtaacgtgtgggcaacctgccctgtactggggaataatcattggaaacgatgactaataccgcatgtggtcctcggaaggcatcttctgaggaagaaaggatttattcggtacaggatgggcccgcatctgattagctagttggtgagataacagcccaccaaggcgacgatcagtagccgacctgagagggtgatcggccacattgggactgagacacggcccaaactcctacgggaggcagcagtggggaatattgcacaatgggcgaaagcctgatgcagcaacgccgcgtgaaggatgaagggtttcggctcgtaaacttctatcaatagggaagaaagaaatgacggtacctaaataagaagccccggctaactacgtgccagcagccgcggtaatacgtagggggcaagcgttatccggaattactgggtgtaaagggagcgtaggcggcatggtaagccagatgtgaaagccttgggcttaacccgaggattgcatttggaactatcaagctagagtacaggagaggaaagcggaattcctagtgtagcggtgaaatgcgtagatattaggaagaacaccagtggcgaaggcggctttctggactgaaactgacgctgaggctcgaaagcgtggggagcaaacaggattagataccctggtagtccacgccgtaaacgatgagtgctaggtgtcggggaggaatcctcggtgccgcagctaacgcaataagcactccacctggggagtacgaccgcaaggttgaaactcaaaggaattgacgggggcccgcacaagcggtggagcatgtggtttaattcgaagcaacgcgaagaaccttaccaaggcttgacatcccgatgaccgctctagagatagagcttctcttcggagcatcggtgacaggtggtgcatggttgtcgtcagctcgtgtcgtgagatgttgggttaagtcccgcaacgagcgcaacccttatcttcagtagccatcatttagttgggcactctggagagactgccgtggataacacggaggaaggtggggatgacgtcaaatcatcatgccccttatgtcttgggctacacacgtgctacaatggctggtaacaaagtgacgcaagacggcgacgttaagcaaatcacaaaaacccagtcccagttcggattgtagtctgcaactcgactacatgaagctggaatcgctagtaatcgcgaatcagcatgtcgcggtgaatacgttcccgggccttgtacacaccgcccgtcacaccatgggagttggaagcacccgaagtcggtgacctaaccgtaaggaaggagccgccgaaggtgaagccagtgactggggtgaagtcgtaacaaggtagccgtatcggaaggtgcggctggatcacctccttt

SEQ ID NO: 1059 - DNA, 1364 bp, artificial sequence
  STR00465_Anaerotignum_lactatifermentans
ggaaacgatgactaataccgcatgtggtcctcggaaggcatcttctgaggaagaaaggatttattcggtacaggatgggcccgcatctgattagctagttggtgagataacagcccaccaaggcgacgatcagtagccgacctgagagggtgatcggccacattgggactgagacacggcccaaactcctacgggaggcagcagtggggaatattgcacaatgggcgaaagcctgatgcagcaacgccgcgtgaaggatgaagggtttcggctcgtaaacttctatcaatagggaagaaagaaatgacggtacctaaataagaagccccggctaactacgtgccagcagccgcggtaatacgtagggggcaagcgttatccggaattactgggtgtaaagggagcgtaggcggcatggtaagccagatgtgaaagccttgggcttaacccgaggattgcatttggaactatcaagctagagtacaggagaggaaagcggaattcctagtgtagcggtgaaatgcgtagatattaggaagaacaccagtggcgaaggcggctttctggactgaaactgacgctgaggctcgaaagcgtggggagcaaacaggattagataccctggtagtccacgccgtaaacgatgagtgctaggtgtcggggaggaatcctcggtgccgcagctaacgcaataagcactccacctggggagtacgaccgcaaggttgaaactcaaaggaattgacgggggcccgcacaagcggtggagcatgtggtttaattcgaagcaacgcgaagaaccttaccaaggcttgacatcccgatgaccgctctagagatagagcttctcttcggagcatcggtgacaggtggtgcatggttgtcgtcagctcgtgtcgtgagatgttgggttaagtcccgcaacgagcgcaacccttatcttcagtagccatcatttagttgggcactctggagagactgccgtggataacacggaggaaggtggggatgacgtcaaatcatcatgccccttatgtcttgggctacacacgtgctacaatggctggtaacaaagtgacgcaagacggcgacgttaagcaaatcacaaaaacccagtcccagttcggattgtagtctgcaactcgactacatgaagctggaatcgctagtaatcgcgaatcagcatgtcgcggtgaatacgttcccgggccttgtacacaccgcccgtcacaccatgggagttggaagcacccgaagtcggtgacctaaccgtaaggaaggagccgccgaaggtgaagccagtgactggggtgaagtcgtaacaaggtagccgtatcggaaggtgcggctggatcacctccttt

SEQ ID NO: 1060 - DNA, 1249 bp, artificial sequence
  GCF_001304995.1_03123_Anaerotignum_lactatifermentans
tatggagagtttgatcctggctcaggatgaacgctggcggcgtgcctaatacatgcaagtcgagcgaacagataaggagcttgctcctttgacgttagcggcggacgggtgagtaacacgtgggtaacctacctataagactggaataactccgggaaaccggggctaatgccggataacatttagaaccgcatggttctaaagtgaaagatggttttgctatcacttatagatggacccgcgccgtattagctagttggtaaggtaacggcttaccaaggcaacgatacgtagccgacctgagagggtgatcggccacactggaactgagacacggtccagactcctacgggaggcagcagtagggaatcttccgcaatgggcgaaagcctgacggagcaacgccgcgtgagtgatgaaggtcttcggatcgtaaaactctgttattagggaagaacaaatgtgtaagtaactgtgcacgtcttgacggtacctaatcagaaagccacggctaactacgtgccagcagccgcggtaatacgtaggtggcaagcgttatccggaattattgggcgtaaagcgcgcgtaggcggtttcttaagtctgatgtgaaagcccacggctcaaccgtggagggtcattggaaactgggaaacttgagtgcagaagaggaaagtggaattccatgtgtagcggtgaaatgcgcagagatatggaggaacaccagtggcgaaggcgactttctggtctgtaactgacgctgatgtgcgaaagcgtggggatcaaacaggattagataccctggtagtccacgccgtaaacgatgagtgctaagtgttagggggtttccgccccttagtgctgcagctaacgcattaagcactccgcctggggagtacgaccgcaaggttgaaactcaaaggaattgacggggacccgcacaagcggtggagcatgtggtttaattcgaagcaacgcgaagaaccttaccaaatcttgacatcctttgacaactctagagatagagccttccccttcgggggacaaagtgacaggtggtgcatggttgtcgtcagctcgtgtcgtgagatgttgggttaagtcccgcaacgagcgcaacccttaagcttagttgccagcattaagttgggcactctaagttgactaccggtgacaaaccggaggaaggtggggatgacgtcaaatcatcatgccccttatgatttgggctacacacgtgctacaatgg

SEQ ID NO: 1061 - DNA, 1551 bp, artificial sequence
  GCF_002161375.1_00593_Anaerotignum_lactatifermentans
ctggagagtttgatcctggctcagattgaacgctggcggcgtgcttaacacatgcaagtcgagcgagaaagttctcttcggagaatgagtagagcggcgcacgggtgagtaacgcgtggataatctgccccgaagatcgggataacagttggaaacgactgctaataccgaatgttctgcatatttaactttatgtggtaaagatggcctctatttataagctatcgctttgggatgagtccgcgtctcattagatagttggtggggtaatggcctaccaagtcaacgatgagtagctggtctgagaggatgatcagccacactgggactgaaacacggcccagactcctacgggaggcagcagtggggaatattgcgcaatgggggaaaccctgacgcagcgacgccgcgtgcgggaagaaggccttcgggtcgtaaaccgctgtcaggagggaagaaactgttggagtcgaataggctctttcactgacggtacctccagaggaagcaccggctaactccgtgccagcagccgcggtaatacggagggtgcgagcgttaatcggaatcactgggcgtaaagcgtacgtaggtggcaaagtcagtcaggcgtgaaagccctcggctcaaccgaggaattgcgtttgatactactttgctagagtctcggagaggttggcggaattccaggtgtaggagtgaaatccgtagatatctggaggaacaccagtggcgaaggcggccaactggacgagtactgacactgaggtacgaaagcgtgggtagcaaacaggattagataccctggtagtccacgccgtaaacgatggatattaggtgtcgggggtaacccttcggtgccgtagttaacgcgttaaatatcccgcctggggagtacggtcgcaaggctgaaactcaaaggaattgacgggggcccgcacaagcggtggagtatgtggtttaattcgatgcaacgcgaagaaccttacctaggcttgacatcctgagaacctcttttaaacgagagggtgcccttcggggaattcagtgacaggtgctgcatggctgtcgtcagctcgtgccgtgaggtgttgggttaagtcccgcaacgagcgcaacccctattgttagttgccatcacataatggtgggcactctaatgagactgcccgggtcaaccgggaggaaggtggggacgacgtcaagtcatcatggcccttacgcctagggctacacacgtactacaatggtgcatacaaagggcagcgagaccgcgaggtggagctaatcccaaaaaatgcatcccagtccggatcggagtctgcaactcgactccgtgaagttggaatcgctagtaatcccggatcagcatgccggggtgaatacgttcccgggccttgtacacaccgcccgtcacaccacgaaagctggttctacccgataacggcagactaaccctttgggaggtagtcgtctacggtagggctggtaattggggtgaagtcgtaacaaggtagccgtaggggaacctgcggctggatcacctccttt

SEQ ID NO: 1062 - DNA, 1551 bp, artificial sequence; identical to SEQ ID NO: 1061
  GCF_002161375.1_01306_Anaerotignum_lactatifermentans

SEQ ID NO: 1063 - DNA, 1532 bp, artificial sequence
  GCF_002161375.1_02260_Anaerotignum_lactatifermentans
tgaagagtttgatcctggctcagattgaacgctggcggcatgctttacacatgcaagtcgaacggtaacaggggagcttgctcccgctgacgagtggcgaacgggtgagtaatgcatcggaacgtgccgaatagtggggataacgcaccgaaaggtgtgctaataccgcatacgccctgagggggaaagtgggggaccgcaaggcctcacgctaatcgagcggccgatgtcggattagctagttggtggggtaaaggctcaccaaggcgacgatccgtagcgggtctgagaggatgatccgccacactgggactgagacacggcccagactcctacgggaggcagcagtggggaattttggacaatgggggaaaccctgatccagccatgccgcgtgtctgaagaaggccttcgggttgtaaaggacttttgtccgggaggaaaccctgatcgttaatagcggtcgggactgacagtaccggaagaataagcaccggctaactacgtgccagcagccgcggtaatacgtagggtgcaagcgttaatcggaattactgggcgtaaagcgtgcgcaggcggtgagataagtcagctgtgaaagccccgggctcaacctgggaactgcggccgaaactgtctcgctagagtacgtcagagggggtggaattccacgtgtagcagtgaaatgcgtagagatgtggaggaacaccaatggcgaaggcagccccctgggatgatactgacgctcatgcacgaaagcgtggggagcaaacaggattagataccctggtagtccacgccctaaacgatgtcgactagccgttggagacctcggtctttggtggcgcagctaacgcgtgaagtcgaccgcctggggagtacggtcgcaagattaaaactcaaaggaattgacgggggcccgcacaagcggtggatgatgtggattaattcgatgcaacgcgaaaaaccttacctacccttgacatgccaggaacctcccggagatgggagggtgcccgaaagggaacctgggcacaggtgctgcatggctgtcgtcagctcgtgtcgtgagatgttgggttaagtcccgcaacgagcgcaacccttgccattagttgccatcattaagttgggcactttaatgggactgccggtgacaaaccggaggaaggtggggatgacgtcaagtcctcatggcccttatgggtagggcttcacacgtcatacaatggtcggtacagagggttgcgaagccgcgaggtgaagctaatcccagaaaaccgatcgtagtccggatcgcagtctgcaactcgactgcgtgaagtcggaatcgctagtaatcgcggatcagcatgccgcggtgaatacgttcccgggccttgtacacaccgcccgtcacaccatgggagtggaatccgccagaagtgggtagggtaaccgtaaggagcccgcttaccacggtaggtttcatgactggggtgaagtcgtaacaaggtagccgtaggggaacctgcggctggatcacctccttt

SEQ ID NO: 1064 - DNA, 1531 bp, artificial sequence
  GCF_002161375.1_02524_Anaerotignum_lactatifermentans
tgaagagtttgatcctggctcagattgaacgctggcggcatgctttacacatgcaagtcgaacggtaacaggggagcttgctcccgctgacgagtggcgaacgggtgagtaatgcatcggaacgtgccgaatagtggggataacgcaccgaaaggtgtgctaataccgcatacgccctgaggggaaagtgggggaccgcaaggcctcacgctaatcgagcggccgatgtcggattagctagttggtggggtaaaggctcaccaaggcgacgatccgtagcgggtctgagaggatgatccgccacactgggactgagacacggcccagactcctacgggaggcagcagtggggaattttggacaatgggggaaaccctgatccagccatgccgcgtgtctgaagaaggccttcgggttgtaaaggacttttgtccgggaggaaaccctgatcgttaatagcggtcgggactgacagtaccggaagaataagcaccggctaactacgtgccagcagccgcggtaatacgtagggtgcaagcgttaatcggaattactgggcgtaaagcgtgcgcaggcggtgagataagtcagctgtgaaagccccgggctcaacctgggaactgcggccgaaactgtctcgctagagtacgtcagagggggtggaattccacgtgtagcagtgaaatgcgtagagatgtggaggaacaccaatggcgaaggcagccccctgggatgatactgacgctcatgcacgaaagcgtggggagcaaacaggattagataccctggtagtccacgccctaaacgatgtcgactagccgttggagacctcggtctttggtggcgcagctaacgcgtgaagtcgaccgcctggggagtacggtcgcaagattaaaactcaaaggaattgacgggggcccgcacaagcggtggatgatgtggattaattcgatgcaacgcgaaaaaccttacctacccttgacatgccaggaacctcccggagatgggagggtgcccgaaagggaacctgggcacaggtgctgcatggctgtcgtcagctcgtgtcgtgagatgttgggttaagtcccgcaacgagcgcaacccttgccattagttgccatcattaagttgggcactttaatgggactgccggtgacaaaccggaggaaggtggggatgacgtcaagtcctcatggcccttatgggtagggcttcacacgtcatacaatggtcggtacagagggttgcgaagccgcgaggtgaagctaatcccagaaaaccgatcgtagtccggatcgcagtctgcaactcgactgcgtgaagtcggaatcgctagtaatcgcggatcagcatgccgcggtgaatacgttcccgggccttgtacacaccgcccgtcacaccatgggagtggaatccgccagaagtgggtagggtaaccgtaaggagcccgcttaccacggtaggtttcatgactggggtgaagtcgtaacaaggtagccgtaggggaacctgcggctggatcacctccttt

SEQ ID NO: 1065 - DNA, 1541 bp, artificial sequence
  GCF_900142265.1_01794_Anaerotignum_lactatifermentans
ttgaagagtttgatcatggctcagattgaacgctggcggcaggcctaacacatgcaagtcgagcggcagcgggaagatagcttgctatctttgccggcgagcggcggacgggtgagtaatgcctagggatctgcccagtcgagggggataacagttggaaacgactgctaataccgcatacgccctacgggggaaaggaggggaccttcgggccttccgcgattggatgaacctaggtgggattagctagttggtgaggtaatggctcaccaaggcgacgatccctagctgttctgagaggatgatcagccacactgggactgagacacggcccagactcctacgggaggcagcagtggggaatattgcacaatgggggaaaccctgatgcagccatgccgcgtgtgtgaagaaggccttcgggttgtaaagcactttcagtagggaggaaaggtagcagcttaatacgctgttgctgtgacgttacctacagaagaaggaccggctaactccgtgccagcagccgcggtaatacggagggtccgagcgttaatcggaattactgggcgtaaagcgtgcgcaggcggtttgttaagcgagatgtgaaagccccgggctcaacctgggaattgcatttcgaactggcgaactagagtcttgtagaggggggtagaattccaggtgtagcggtgaaatgcgtagagatctggaggaataccggtggcgaaggcggccccctggacaaagactgacgctcaggcacgaaagcgtggggagcaaacaggattagataccctggtagtccacgccgtaaacgatgtctactcggagtttggtgtcttgaacactgggctctcaagctaacgcattaagtagaccgcctggggagtacggccgcaaggttaaaactcaaatgaattgacgggggcccgcacaagcggtggagcatgtggtttaattcgatgcaacgcgaagaaccttacctactcttgacatccacggaattcgctagagatagcttagtgccttcgggaaccgtgagacaggtgctgcatggctgtcgtcagctcgtgttgtgaaatgttgggttaagtcccgcaacgagcgcaacccctatccttatttgccagcacgtaatggtgggaactctagggagactgccggtgataaaccggaggaaggtggggacgacgtcaagtcatcatggcccttacgagtagggctacacacgtgctacaatggcgagtacagagggttgcaaagccgcgaggtggagctaatctcacaaagctcgtcgtagtccggattggagtctgcaactcgactccatgaagtcggaatcgctagtaatcgtggatcagaatgccacggtgaatacgttcccgggccttgtacacaccgcccgtcacaccatgggagtgggctgcaaaagaagtgggtagcttaaccttcgggggggcgctcaccactttgtggttcatgactggggtgaagtcgtaacaaggtagccctaggggaacctggggctggatcacctcctt

SEQ ID NO: 1066 - DNA, 1522 bp, artificial sequence
  STR00338_Anaerotruncus_colihominis
tcaaagagtttgatcctggctcaggacgaacgctggcggcgcgcctaacacatgcaagtcgaacggagcttacgttttgaagttttcggatggatgaatgtaagcttagtggcggacgggtgagtaacacgtgagcaacctgcctttcagagggggataacagccggaaacggctgctaataccgcatgatgttgcgggggcacatgcccctgcaaccaaaggagcaatccgctgaaagatgggctcgcgtccgattagccagttggcggggtaacggcccaccaaagcgacgatcggtagccggactgagaggttgaacggccacattgggactgagacacggcccagactcctacgggaggcagcagtgggggatattgcacaatgggcgaaagcctgatgcagcgacgccgcgtgagggaagacggtcttcggattgtaaacctctgtctttggggaagaaaatgacggtacccaaagaggaagctccggctaactacgtgccagcagccgcggtaatacgtagggagcaagcgttgtccggaattactgggtgtaaagggagcgtaggcgggatggcaagtagaatgttaaatccatcggctcaaccggtggctgcgttctaaactgccgttcttgagtgaagtagaggcaggcggaattcctagtgtagcggtgaaatgcgtagatattaggaggaacaccagtggcgaaggcggcctgctgggctttaactgacgctgaggctcgaaagcgtggggagcaaacaggattagataccctggtagtccacgccgtaaacgatgattactaggtgtggggggactgaccccttccgtgccgcagttaacacaataagtaatccacctggggagtacggccgcaaggttgaaactcaaaggaattgacgggggcccgcacaagcagtggagtatgtggtttaattcgaagcaacgcgaagaaccttaccaggtcttgacatcggatgcatagcctagagataggtgaagcccttcggggcatccagacaggtggtgcatggttgtcgtcagctcgtgtcgtgagatgttgggttaagtcccgcaacgagcgcaacccttattattagttgctacgcaagagcactctaatgagactgccgttgacaaaacggaggaaggtggggatgacgtcaaatcatcatgccccttatgacctgggctacacacgtactacaatggcactaaaacagagggcggcgacaccgcgaggtgaagcgaatcccgaaaaagtgtctcagttcagattgcaggctgcaacccgcctgcatgaagtcggaattgctagtaatcgcggatcagcatgccgcggtgaatacgttcccgggccttgtacacaccgcccgtcacaccatgggagtcggtaacacccgaagccagtagcctaaccgcaaggggggcgctgtcgaaggtgggattgatgactggggtgaagtcgtaacaaggtagccgtatcggaaggtgcggctggatcacctccttt

SEQ ID NO: 1067 - DNA, 1522 bp, artificial sequence; identical to SEQ ID NO: 1066
  STR00351_Anaerotruncus_colihominis

SEQ ID NO: 1068 - DNA, 1522 bp, artificial sequence; identical to SEQ ID NO: 1066
  STR00360_Anaerotruncus_colihominis

SEQ ID NO: 1069 - DNA, 1522 bp, artificial sequence; identical to SEQ ID NO: 1066
  STR00954_Anaerotruncus_colihominis

SEQ ID NO: 1070 - DNA, 1522 bp, artificial sequence; identical to SEQ ID NO: 1066
  STR01007_Anaerotruncus_colihominis

SEQ ID NO: 1071 - DNA, 1522 bp, artificial sequence; identical to SEQ ID NO: 1066
  STR01007.1_Anaerotruncus_colihominis

SEQ ID NO: 1072 - DNA, 1522 bp, artificial sequence; identical to SEQ ID NO: 1066
  STR02516_Anaerotruncus_colihominis

SEQ ID NO: 1073 - DNA, 1522 bp, artificial sequence; identical to SEQ ID NO: 1066
  STR02520_Anaerotruncus_colihominis

SEQ ID NO: 1074 - DNA, 1495 bp, artificial sequence
  ERR1022453_03665_Anaerotruncus_colihominis
atccggttgatcctgccggacccgaccgctatcggggtggggctaagccatgggagtcgtacgctcccgggcaagggagcgtggcggacggctgagtaacacgtggctaacctaccctgaggagggagataaccccgggaaactggggataatctcccataggcgaggagtcctggaacggttcctcgctgaaaggctcatgggctattccccgctcatgagcgcctcaggatggggctgcggcccatcaggtagttgggggggtaagggccccccaagcctataacgggtaggggccgtgagagcgggagcccccagttgggcactgagacaagggcccaggccctacggggcgcaccaggcgcgaaacgtccccaatgcgcggaagcgtgagggcgccaccccgagtgctcccgtaagggagcttttccccgctctacaaaggcgggggaataagcggggggcaagtctggtgtcagccgccgcggtaataccagccccgcgagtggtcgggactcttactgggcctaaagcgcccgtagccggcccgacaagtcactccttaaagaccccggctcaaccgggggaatgggggtgatactgtcgggctagggggcgggagaggccagcggtactcccggagtaggggcgaaatcctcagatctcgggaggaccaccagtggcgaaagcggctggctagaacgcgcccgacggtgaggggcgaaagccggggcagcaaaagggattagatacccctgtagtcccggctgtaaacaatgcaggctaggtgtcacatgggcttagagcccatgtggtgccgcagggaagccgttaagcctgccgcctggggagtacggtcgcaagactgaaacttaaaggaattggcgggggagcaccacaaggggtggaacctgcggctcaattggagtcaacgcctggaatcttaccaggggagaccgcaggatgacggccaggctaacgaccttgcctgactcgcggagaggaggtgcatggccgtcgccagctcgtgttgtgaaatgtcctgttaagtcaggcaacgagcgagacccccaccactagttggtatcctggtctccgggccgggaccacactagtgggactgccggcgtaagccggaggagggagggggccacggcaggtcagcatgccccgaaacccctgggccgcacgcgggttacaatggcagggacagcgggattccgaccccgaaaggggaaggtaatcccttaaaccctgccgcagttgggatcgagggctgaaactcgccctcgtgaacgaggaatccctagtaaccgcagatcaacaatctgcggtgaatacgtccctgctccttgcacacaccgcccgtcgctccacccgagtaggagaggggtgaggccccttgcctttgggtggggggtcgagcttctctcctgcaaggggggagaagtcgtaacaaggtagccgtaggggaacctgcggctggatcacctca

SEQ ID NO: 1075 - DNA, 1468 bp, artificial sequence
  ERR171260_03717_Anaerotruncus_colihominis
ctccggttgatcctgccggcggccactgctatcaagttccgactaagccatgcgagtcaaggtatcgtaagatgccggcacactgctcagtaacacgtggataatctaaccttgagtaagggataacttcgggaaactgaaggtaataccttataattgcttaaaactggaatgtttttgcaataaaagttacgacgctcaaggatgagtctgcgacctatcaggtagtaggtggtgtaatggaccacctagcctcagacgggtacgggccctgggaggggtagcccggagatggactctgagacataagtccaggccctacggggcgcagcaggcgcgaacactgtgcaatgcgcgaaagcgcgacacggggagcttgagtgtcttggcatagccaagacttttctcattcctaaaaagcatgaggaataagtgctgggtaagacgggtgccagccgccgcggtaacacccgcagcacgagtagtggtcacttttattgagcctaaagcgttcgtagccggttttgtaaatcttcagataaagcctgaagcttaactccagaaagtctgaagagactgcaagacttgagatcgggtgaggttaaacgtactttcagggtaggggtaaaatcctgtaatcccggaaggacgaccagtggcgaaagcgtttaactagaacgaatctgacggtaaggaacgaaggctagggtagcaaaccggattagatacccgggtagtcctagctgtaaacattgcccatttgatgttgcttttccgttgagggaaggcagtgtcggagcgaaggtgttaaatgggccgcttgggaagtatggtcgcaagactgaaacttaaaggaattggcgggggagcaccgcaacgggaggaatgtgcggtttaattggattcaacgccggaaaactcaccgggaacgacctgtgcatgagagtcaacctgacgagcttactcgatagcaggagaggtggtgcatggccgtcgtcagctcgtaccgtagggcgttcacttaagtgtgataacgagcgagacccacatctttaattgcaaatgtatatgagaatatgcatgcactttagagaaaccgccagcgctaagctggaggaaggagtggtcgacggcaggtcagtacgccccgaatttcccgggctacacgcgcattacaaagaacgggacaatacgttgcaacctcgaaagaggaagctaatcgcgaaacccgtccatagttaggattgagggctgtaactcgccctcatgaatctggattccgtagtaatcgcgggtcaacaacccgcggtgaacatgcccctgctccttgcacacaccgcccgtcaaaccatccgagttggtgttggatgaggtttaattcgagagggttaaatcaaatctgatgtcggtgaggagggttaagtcgtaacaaggtatccgtaggggaacctgcggatggatcacctcc

SEQ ID NO: 1076 - DNA, 1532 bp, artificial sequence
  GCF_000154565.1_00246_Anaerotruncus_colihominis
tgaagagtttgatcatggctcagattgaacgctggcggcaggcctaacacatgcaagtcgagcggatgagaggagcttgctcttcgattcagcggcggacgggtgagtaatacctaggaatctgcctggtagtgggggacaacgtttcgaaaggaacgctaataccgcatacgccctacgggggaaagcaggggaccttcgggccttgcgctatcagatgagcctaggtcggattagctagttggtgaggtaatggctcaccaaggcgacgatccgtaactggtctgagaggatgatcagtcacactggaactgagacacggtccagactcctacgggaggcagcagtggggaatattggacaatgggcgaaagcctgatccagccatgccgcgtgtgtgaagaaggtcttcggattgtaaagcactttaagttgggaggaagggtacttacctaatacgtgagtattttgacgttaccgacagaataagcaccggctaactctgtgccagcagccgcggtaatacagagggtgcaagcgttaatcggaattactgggcgtaaagcgcgcgtaggtggttcgttaagttggatgtgaaatccccgggctcaacctgggaactgcatccaaaactggcgagctagagtagggcagagggtggtggaatttcctgtgtagcggtgaaatgcgtagatataggaaggaacaccagtggcgaaggcgaccacctgggctcatactgacactgaggtgcgaaagcgtggggagcaaacaggattagataccctggtagtccacgccgtaaacgatgtcaactagccgttggaatccttgagattttagtggcgcagctaacgcattaagttgaccgcctggggagtacggccgcaaggttaaaactcaaatgaattgacgggggcccgcacaagcggtggagcatgtggtttaattcgaagcaacgcgaagaaccttaccaggccttgacatgcagagaactttccagagatggattggtgccttcgggaactctgacacaggtgctgcatggctgtcgtcagctcgtgtcgtgagatgttgggttaagtcccgtaacgagcgcaacccttgtccttagttaccagcacgtaatggtgggcactctaaggagactgccggtgacaaaccggaggaaggtggggatgacgtcaagtcatcatggcccttacggcctgggctacacacgtgctacaatggtcggtacagagggttgccaagccgcgaggtggagctaatctcacaaaaccgatcgtagtccggatcgcagtctgcaactcgactgcgtgaagtcggaatcgctagtaatcgcgaatcagaatgtcgcggtgaatacgttcccgggccttgtacacaccgcccgtcacaccatgggagtgggttgcaccagaagtagctagtctaaccttcgggaggacggttaccacggtgtgattcatgactggggtgaagtcgtaacaaggtagccgtaggggaacctgcggctggatcacctcctt

SEQ ID NO: 1077 - DNA, 1532 bp, artificial sequence
  GCF_000154565.1_03425_Anaerotruncus_colihominis
tgaagagtttgatcatggctcagattgaacgctggcggcaggcctaacacatgcaagtcgagcggatgagaggggcttgctcttcgattcagcggcggacgggtgagtaatacctaggaatctgcctggtagtgggggacaacgtttcgaaaggaacgctaataccgcatacgccctacgggggaaagcaggggaccttcgggccttgcgctatcagatgagcctaggtcggattagctagttggtgaggtaatggctcaccaaggcgacgatccgtaactggtctgagaggatgatcagtcacactggaactgagacacggtccagactcctacgggaggcagcagtggggaatattggacaatgggcgaaagcctgatccagccatgccgcgtgtgtgaagaaggtcttcggattgtaaagcactttaagttgggaggaagggtacttacctaatacgtgagtattttgacgttaccgacagaataagcaccggctaactctgtgccagcagccgcggtaatacagagggtgcaagcgttaatcggaattactgggcgtaaagcgcgcgtaggtggttcgttaagttggatgtgaaatccccgggctcaacctgggaactgcatccaaaactggcgagctagagtagggcagagggtggtggaatttcctgtgtagcggtgaaatgcgtagatataggaaggaacaccagtggcgaaggcgaccacctgggctcatactgacactgaggtgcgaaagcgtggggagcaaacaggattagataccctggtagtccacgccgtaaacgatgtcaactagccgttggaatccttgagattttagtggcgcagctaacgcattaagttgaccgcctggggagtacggccgcaaggttaaaactcaaatgaattgacgggggcccgcacaagcggtggagcatgtggtttaattcgaagcaacgcgaagaaccttaccaggccttgacatgcagagaactttccagagatggattggtgccttcgggaactctgacacaggtgctgcatggctgtcgtcagctcgtgtcgtgagatgttgggttaagtcccgtaacgagcgcaacccttgtccttagttaccagcacgtaatggtgggcactctaaggagactgccggtgacaaaccggaggaaggtggggatgacgtcaagtcatcatggcccttacggcctgggctacacacgtgctacaatggtcggtacagagggttgccaagccgcgaggtggagctaatctcacaaaaccgatcgtagtccggatcgcagtctgcaactcgactgcgtgaagtcggaatcgctagtaatcgcgaatcagaatgtcgcggtgaatacgttcccgggccttgtacacaccgcccgtcacaccatgggagtgggttgcaccagaagtagctagtctaaccttcgggaggacggttaccacggtgtgattcatgactggggtgaagtcgtaacaaggtagccgtaggggaacctgcggctggatcacctcctt

SEQ ID NO: 1078 - DNA, 1570 bp, artificial sequence
  GCF_000154565.1_03488_Anaerotruncus_colihominis
atgagagtttgatcctggctcaggatgaacgctggcggcgtgcctaatacatgcaagtcgaacgctttgtctttaattgatctgacgagcttgctctgaagtgattttatctgacaaagagtggcgaacgggtgagtaacacgtgggtaacctacctcttagcaggggataacatttggaaacaagtgctaataccgtataataccaacaaccgcatggttgttggttgaaagatggttctgctatcactaagagatggacccgcggtgcattagctagttggtaaggtaacggcttaccaaggcaatgatgcatagccgagttgagagactgatcggccacaatgggactgagacacggcccatactcctacgggaggcagcagtagggaatcttccacaatgggcgcaagcctgatggagcaacgccgcgtgtgtgatgaagggtttcggctcgtaaaacactgttataagagaagaacggcactgagagtaactgttcagtgtgtgacggtatcttaccagaaaggaacggctaaatacgtgccagcagccgcggtaatacgtatgttccaagcgttatccggatttattgggcgtaaagcgagcgcagacggttatttaagtctgaagtgaaagccctcagctcaactgaggaatggctttggaaactggatgacttgagtgcagtagaggaaagtggaactccatgtgtagcggtgaaatgcgtagatatatggaagaacaccagtggcgaaggcggctttctggactgtaactgacgttgaggctcgaaagtgtgggtagcaaacaggattagataccctggtagtccacaccgtaaacgatgagtgctagatgttcgagggtttccgcccttgagtgtcgcagctaacgcattaagcactccgcctggggagtacgaccgcaaggttgaaactcaaaggaattgacggggacccgcacaagcggtggagcatgtggtttaattcgaagcaacgcgaagaaccttaccaggtcttgacatcccttgctaatcctagaaataggacgttcccttcggggacaaggtgacaggtggtgcatggttgtcgtcagctcgtgtcgtgagatgttgggttaagtcccgcaacgagcgcaacccttattattagttgccagcattcagttgggcactctagtgagactgccggtgacaaaccggaggaaggtggggatgacgtcaaatcatcatgccccttatgacctgggctacacacgtgctacaatggcatatacaacgagtcgccaacccgcgagggtgcgctaatctcttaaagtatgtctcagttcggattgtaggctgcaactcgcctacatgaagtcggaatcgctagtaatcgcggatcagcacgccgcggtgaatacgttcccgggtcttgtacacaccgcccgtcacaccatgagagtttgtaacacccaaagccggtggggtaaccttttaggagccagccgtctaaggtgggacagatgattagggtgaagtcgtaacaaggtagccgtaggagaacctgcggctggatcacctcctt

SEQ ID NO: 1079 - DNA, 1570 bp, artificial sequence; identical to SEQ ID NO: 1078
  GCF_000154565.1_03644_Anaerotruncus_colihominis

SEQ ID NO: 1080 - DNA, 1518 bp, artificial sequence
  GCF_000509005.1_00016_Anaerotruncus_colihominis
atggagagtttgatcctggctcaggacgaacgctggcggcgtgcgtaatacatgcaagtcgagcggaccttcgggtcagcggcggacgggtgaggaacacgtgagtgatcgggctgtgagtgggggatatcgggccgaaaggcgcggcaatcccgcatacgttccggggaaccggaagaaagcttggcaacaggcgctcacaggggagctcgcggcccattagctagttggggggggtaatggcctcccaaggcgacgatgggtagccggcctgagagggtgaacggccacactgggactgagacacggcccagactcctacgggaggcagcagtagggaatcttccacaatgggcgcaagcctgatggagcaacgccgcgtgagtgaagacggccttcgggttgtaaagctctgtctgtcgggacgaagaccggcccggaagggccggggagccggtaccgacggaggaagcccctgcaaactacgtgccagcagccgcggtaagacgtagggggcaagcgttgtccggaattactgggcgtaaagggcgtgtaggcggtgcgatacgtagcggttttaagcctccggctcacccggaggagggcggctaaacggtcgcgctagagggcaggagaggtgcgtggaattcctggtggagcggtgaaatgcgtagagatcaggaagaacacccgtggcgaaggcggcgcactggcctggccctgacgctgaggcgcgacagcgtggggagcgaacgggattagataccccggtagtccacgccgtaaacgatgggtactaggtgtcgcccgggtccaccgggcggtgccggagctaacgcactaagtaccccgcctggggagtacggccgcaaggttgaaactcaaaggaattgacgggggcccgcacaagcagtggagcatgtggtttaattcgacgcaacgcgcagaaccttaccaggactggacacgctcgtgagcgccgcgaaagcggcgggcccttcggggagcgagcgcaggtgctgcatggttgtcgtcagctcgtgtcgtgagatgttgggttaagtcccgcaacgagcgcaacccttgtcgtgtgttgccagcggttcggccgggcactcacacggaaactgccggtgacaaaccggaggaaggtggggatgacgtcaaatccgcatggccttgatgttctgggctacacacgtgctacaatggtcccgacaacgggatgcgacggcgcgagccggagccaatccttcaaacgggatctcagttcggattgcaggctgcaactcgcctgcatgaagccggaattgctagtaatcgcccatcagcatggggcggtgaattcgttcccgggccttgtacacaccgcccgtcacaccacgagagtcggccacaccccgaagccgggcgatccaaccgcagatgcggagggtcccgtcgacggtggggtcggtgattggggtgaagtcgtaacaaggtagccgtatcggaaggtgcggctggatcacctccttt

SEQ ID NO: 1081 - DNA, 1558 bp, artificial sequence; identical to SEQ ID NO: 1037
  GCF_001404495.1_02072_Anaerotruncus_colihominis

SEQ ID NO: 1082 - DNA, 1529 bp, artificial sequence
  GCF_002159815.1_01369_Anaerotruncus_colihominis
ttgaagagtttgatcatggctcagattgaacgctggcggcaggcctaacacatgcaagtcgaacggaaacatgtctagcttgctagatgatgtcgagtggcggacgggtgagtaatgcctgggaatttgccttagtgtgggggataactattggaaacgatagctaataccgcataatacctacgggtcaaagggggcttcggctcccgcgctaagagaagcccaggtgagattagcttgttggtgaggtaaaggctcaccaaggcgacgatctctagctgttctgagaggaagatcagccacactggaactgagacacggtccagactcctacgggaggcagcagtggggaatattgcacaatggaggaaactctgatgcagccatgccgcgtgtgtgaagaaggccttcgggttgtaaagcactttcagttgtgaggaaaggttagtagttaatacctgctagctgtgacgttaacaacagaagaagcaccggctaactccgtgccagcagccgcggtaatacggagggtgcaagcgttaatcggaattactgggcgtaaagcgcacgcaggcggtctgttaagctagatgtgaaagccccgcgctcaacgtgggatggtcatttagaactggcagactagagttttggagaggagagtggaattccaggtgtagcggtgaaatgcgtagatatctggaggaacatcagtggcgaaggcgactctctggtcaataactgacgctcatgtgcgaaagtgtgggtagcgaacgggattagataccccggtagtccacaccgtaaacgctgtctactaactgtttgtggatttaatccgtgagtagtgaagctaacgcgataagtagaccgcctggggagtacggccgcaaggttaaaactcaaatgaattgacgggggcccgcacaagcggtggagcatgtggtttaattcgatgcaacgcgaagaaccttacctactcttgacatactagaaacttttcagagatgaattggtaccttcggggatctagatacaggtgctgcatggctgtcgtcagctcgtgtcgtgagatgttgggttaagtcccgcaacgagcgcaacccttgtccttatttgccagcattaagttgggtactctaaggagactgccggtgacaaaccggaggaaggtggggacgacgtcaagtcatcatggcccttacgagtagggctacacacgtgctacaatggcgagtacaaagggatgcaaactggtgacagtaagcggaccccttaaagctcgtcgtagtccggattggagtctgcaactcgactccatgaagtcggaatcgctagtaatcgtaggtcagcatactacggtgaatacgttcccgggccttgtacacaccgcccgtcacaccatgggagtgggatgcaaaagaagtagttagtctaaccttcgggaggacgattaccactttgtgtttcatgactggggtgaagtcgtaacaaggtaaccctaggggaacctggggttggatcacctcctt

SEQ ID NO: 1083 - DNA, 1497 bp, artificial sequence
  GCF_002160445.1_01778_Anaerotruncus_colihominis
tatggagagtttgatcctggctcagagtgaacgctggcggcgtgcctaatacatgcaagtcgaacgatgaagcctagcttgctaggcggattagtggcgcacgggtgagtaacgcatagatgacatgccctttagtttgggatagccactagaaatggtgattaataccaaataccaccctacgggggaaagatttatcgctaaaggattggtctatgtcctatcagcttgttggcggggtaagagcccaccaaggcaatgacgggtatccggcctgagagggtgaacggacacactggaactgagacacggtccagactcctacgggaggcagcagtagggaatattgctcaatgggcgcaagcctgaagcagcaacgccgcgtggaggatgaaggttttaggattgtaaactccttttgtgagagaagataatgacggtatctcacgaataagcaccggctaactccgtgccagcagccgcggtaatacggagggtgcaagcgttactcggaatcactgggcgtaaagagtgcgtaggcgggattgtaagtcagatgtgaaatcctatggcttaaccatagaactgcatttgaaactacaactctggagtgtgggagaggtaggtggaattcttggtgtaggggtaaaatccgtagagatcaagaggaatactcattgcgaaggcgacctgctggaacaatactgacgctgattgcacgaaagcgtggggagcaaacaggattagataccctggtagtccacgccctaaacgatggatgctagttgttggggggctttgtccccccagtaatgcagctaacgccttaagcatcccgcctggggagtacggtcgcaagattaaaactcaaaggaatagacggggacccgcacaagcggtggagcatgtggtttaattcgaagatacacgaagaaccttacctaggcttgacattgaaggaattccctagaaataggggagtgtctagcttgctagaccctgaaaacaggtgctgcacggctgtcgtcagctcgtgtcgtgagatgttgggttaagtcccgcaacgagcgcaaccctctttcttagttgctaacaggtagtgctgagctctctaagaatactgcctgcgtaagcaggaggaaggtgaggacgacgtcaagtcatcatggcccttacgcctagggctacacacgtgctacaatggggcgcacaaagagatgcaatgctgcgaagctgagccaatcttaaaaacgcctctcagttcggattgcaggctgcaactcgcctgcatgaagctggaatcgctagtaatcgcaaatcagccatgttgcggtgaatacgttcccgggtcttgtactcaccgcccgtcacaccatgggagttgtgtttgccttaagtcaggatgctaaagtagctactgcccacggcacacacagcgactggggtgaagtcgtaacaaggtaaccgtaggtgaacctgcggttggatcacctcctt

SEQ ID NO: 1084 - DNA, 1497 bp, artificial sequence
  GCF_002160465.1_03807_Anaerotruncus_colihominis
tatggagagtttgatcctggctcagagtgaacgctggcggcgtgcctaatacatgcaagtcgaacgatgaagcctagcttgctaggtggattagtggcgcacgggtgagtaacgcatagatgacatgccctttagtttgggatagccactagaaatggtgattaataccaaatactaccctacgggggaaagatttatcgctaaaggattggtctatgtcctatcagcttgttggtgaggtaaaggctcaccaaggcgatgacgggtatccggcctgagagggtgaacggacacactggaactgagacacggtccagactcctacgggaggcagcagtagggaatattgctcaatgggcgcaagcctgaagcagcaacgccgcgtggaggatgaaggttttaggattgtaaactccttttgtcagagaagataatgacggtatctgacgaataagcaccggctaactccgtgccagcagccgcggtaatacggagggtgcaagcgttactcggaatcactgggcgtaaagagtgcgtaggcggggttgtaagtcagatgtgaaatcctatggcttaaccatagaactgcatttgaaactacaactctggagtgtgggagaggtaggtggaattcttggtgtaggggtaaaatccgtagagatcaagaggaatactcattgcgaaggcgacctgctggaacaatactgacgctgattgcacgaaagcgtggggagcaaacaggattagataccctggtagtccacgccctaaacgatggatgctagttgttggggggctttgtccccccagtaatgcagctaacgccttaagcatcccgcctggggagtacggtcgcaagattaaaactcaaaggaatagacggggacccgcacaagcggtggagcatgtggtttaattcgaagatacacgaagaaccttacctaggcttgacattgaaggaattccctagaaataggggagtgtctagcttgctagaccctgaaaacaggtgctgcacggctgtcgtcagctcgtgtcgtgagatgttgggttaagtcccgcaacgagcgcaaccctctttcttagttgctaacaggttaagctgagctctctaagaatactgcctgcgtaagcaggaggaaggtgaggacgacgtcaagtcatcatggcccttacgcctagggctacacacgtgctacaatggggtgcacaaagagatgcaatgccgcgaggctgagccaatcttaaaaacatctctcagttcggattgcaggctgcaactcgcctgcatgaagctggaatcgctagtaatcgcaaatcagccatgttgcggtgaatacgttcccgggtcttgtactcaccgcccgtcacaccatgggagttgtgtttgccttaagtcaggatgctaaagtagctactgcccacggcacacacagcgactggggtgaagtcgtaacaaggtaaccgtaggtgaacctgcggttggatcacctcctt

SEQ ID NO: 1085 - DNA, 1536 bp, artificial sequence
  GCF_003435515.1_01643_Anaerotruncus_colihominis
taagagtttgatcctggctcagattgaacgctggcggcatgctttacacatgcaagtcggacggcagcacagagaagcttgcttcttgggtggcgagtggcgaacgggtgagtaatgcatcggaacgtaccgagtagtgggggataactgtccgaaaggatggctaataccgcatacgctttgagaaggaaagcaggggctcttcggaccttgcgctattcgagcggccgatgtctgattagctggttggtggggtaaaggcctaccaaggcgacgatcagtagcgggtctgagaggatgatccgccacactgggactgagacacggcccagactcctacgggaggcagcagtggggaattttggacaatgggcgcaagcctgatccagccatgccgcgtgtctgaagaaggccttcgggttgtaaaggacttttgtcagggaagaaaaggttgtggttaatacccatgactgatgacggtacctgaagaataagcaccggctaactacgtgccagcagccgcggtaatacgtagggtgcgagcgttaatcggaattactgggcgtaaagcgggcgcagacggttacttaagtcagatgtgaaatccccgggctcaacctgggaactgcgtttgaaactgggtgactagagtatgtcagaggggggtagaattccacgtgtagcagtgaaatgcgtagagatgtggaggaataccgatggcgaaggcagccccctgggataatactgacgttcatgcccgaaagcgtgggtagcaaacaggattagataccctggtagtccacgccctaaacgatgtcaattagctgttgggcaacttgattgcttagtagcgtagctaacgcgtgaaattgaccgcctggggagtacggtcgcaagattaaaactcaaaggaattgacggggacccgcacaagcggtggatgatgtggattaattcgatgcaacgcgaagaaccttacctggtcttgacatgtacggaatcctccagagacggaggagtgccttcgggagccgtaacacaggtgctgcatggctgtcgtcagctcgtgtcgtgagatgttgggttaagtcccgcaacgagcgcaacccttgtcattagttgccatcatttggttgggcactctaatgagactgccggtgacaagccggaggaaggtggggatgacgtcaagtcctcatggcccttatgaccagggcttcacacgtcatacaatggtcggtacagagggtagccaagccgcgaggtggagccaatcccacaaaaccgatcgtagtccggattgcactctgcaactcgagtgcatgaagtcggaatcgctagtaatcgcaggtcagcatactgcggtgaatacgttcccgggtcttgtacacaccgcccgtcacaccatgggagtgggggataccagaagtaggtagggtaaccgcaaggagcccgcttaccacggtatgcttcatgactggggtgaagtcgtaacaaggtagccgtaggggaacctgcggctggatcacctccttt

SEQ ID NO: 1086 - DNA, 1472 bp, artificial sequence
  GCA_900066665_02901_Bacteroides_cellulosilyticus
attccggttgatcctgccggaggccattgctatcggagtccgatttagccatgctagtcgcacgggttcagacccgtggcatatagctcagtaacacgtggccaaactaccctgtggacggagataacctcgggaaactgaggctaatatccgatacgactcgccagctggagtgcggcgagtcggaaacgttgcggcgccacaggatgtggctgcggccgattaggtagacggtggggtaacggcccaccgtgcccataatcggtacaggtcatgagagtgagagcctggagacggtatctgagacaagatgccgggccctacggggcgcagcaggcgcgaaacctttacactgcacgacagtgcgatagggggactccgagtgcgagggcatatagtcctcgcttttctgtaccgtaaggtggtacaggaataagggctgggcaagaccggtgccagccgccgcggtaataccggcagcccgagtgatggccgctattattgggcctaaagcgtccgtagccggccagacaagtccgttgggaaatccacgcgcttaacgcgtggacgtccggcggaaactgtctggcttggggccggaagatctgaggggtacgtccggggtaggagtgaaatcccgtaatcctggacggaccgccggtggcgaaagcgcctcagaaagacggacccgacggtgagggacgaaagctagggtctcgaaccggattagatacccgggtagtcctagctgtaaacgatgctcgctaggtgtgccgcaggctacgagcctgcgctgtgccgtagggaagccgtgaagcgagccgcctgggaagtacgtctgcaaggatgaaacttaaaggaattggcgggggagcactacaaccggaggagcctgcggtttaattggactcaacgccggacatctcaccagcaccgacaatgtgcagtgaaagtcaggttgatgaccttactggagccattgagaggaggtgcatggccgccgtcagctcgtaccgtgaggcgtcctgttaagtcaggcaacgagcgagacccgcactcttagttgccagcagcatcttgcgatggctgggtacactaggaggactgccgctgccaaagcggaggaaggaacgggcaacggtaggtcagtatgccccgaatgtgctgggctacacgcgggctacaatggccgggacagtgggacgccagtccgagaggacgcgctaatccccgaaacccggtcgtagttcggattgagggctgaaacccgccctcatgaagctggattcggtagtaatcgcgtgtcagaagcgcgcggtgaatccgtccctgctccttgcacacaccgcccgtcaaagcacccgagtggggtccggatgaggccgtcatgcgacggtcgaatctgggctccgcaagggggcttaagtcgtaacaaggtagccgtaggggaatctgcggctggatcacctcct

SEQ ID NO: 1087 - DNA, 1555 bp, artificial sequence
  GCF_000158035.1_02667_Bacteroides_cellulosilyticus
tatggagagtttgatcctggctcaggacgaacgctggcggcgtgcctaatacatgcaagtcgaacggatcttgtttagaagcttgcttctaaacttggttagtggcggacgggtgagtaacacgtaggcaacctgcccataagatcgggataacattcggaaacgaatgctaagaccggataaacaatttgatcgcatggtcgaattgggaaacgcggagcaatctgcggcttgtggatgggcctgcggcgcattagctagttggtggggtaatggctcaccaaggcgacgatgcgtagccgacctgagagggtgaacggccacactgggactgagacacggcccagactcctacgggaggcagcagtagggaatcttccacaatgggcgaaagcctgatggagcaacgccgcgtgagtgaggaaggctttcgggtcgtaaagctctgttgccagggaagaataagggtgagagtaactgctcatctgatgacggtacctgagaagaaagccccggctaactacgtgccagcagccgcggtaatacgtagggggcaagcgttgtccggatttattgggcgtaaagcgcgcgcaggcggttctttaagtctggtgtctaagtgcggggctcaaccccgtgatgcactggaaactggggaacttgagtgcagaagaggagagcggaattccacgtgtagcggtgaaatgcgtagagatgtggaggaacaccagtggcgaaggcggctctctggactgtaactgacgctgaggcgcgaaagcgtggggagcaaacaggattagataccctggtagtccacgctgtaaacgatgagtgctaggtgttgggggtatcatgccctcggtgccgaagttaacacattaagcactccgcctggggagtacggtcgcaagactgaaactcaaaggaattgacggggacccgcacaagcagtggagtatgtggtttaattcgaagcaacgcgaagaaccttaccaggtcttgacatccctctgaatcctctagagatagaggcggccttcgggacagaggagacaggtggtgcatggttgtcgtcagctcgtgtcgtgagatgttgggttaagtcccgcaacgagcgcaacccctaaacttagttgccagcaggttaagctgggcactctaggttgactgccggtgacaaaccggaggaaggcggggatgacgtcaaatcatcatgccccttatgacctgggctacacacgtactacaatggccggtacaacgggctgcgaaaccgcgaggtggagccaatcccaacaaagccggtctcagttcggattgcaggctgcaactcgcctgcatgaagtcggaattgctagtaatcgcggatcagcatgccgcggtgaatacgttcccgggtcttgtacacaccgcccgtcacaccacgagagtttacaacacccgaagtcggtggggtaacccgcaagggagccagccgccgaaggtggggtagatgattggggtgaagtcgtaacaaggtagccgtatcggaaggtgcggctggatcacctccttt

SEQ ID NO: 1088 - DNA, 1539 bp, artificial sequence
  GCF_000273015.1_01598_Bacteroides_cellulosilyticus
ttgaagagtttgatcatggctcagattgaacgctggcggcaggcctaacacatgcaagtcgagcggtaacagaaagtagcttgctactttgctgacgagcggcggacgggtgagtaatgcctagggatctgcccagtcgagggggataacagttggaaacgactgctaataccgcatacgccctacgggggaaaggaggggaccttcgggcctttcgcgattggatgaacctaggtgggattagctagttggtgaggtaatggctcaccaaggcgacgatccctagctgttctgagaggatgatcagccacactgggactgagacacggcccagactcctacgggaggcagcagtggggaatattgcacaatgggggaaaccctgatgcagccatgccgcgtgtgtgaagaaggccttcgggttgtaaagcactttcagtagggaggaaaggtagcgtgttaatagcacgctgctgtgacgttacctacagaagaaggaccggctaacttcgtgccagcagccgcggtaatacgaggggtccgagcgttaatcggaattactgggcgtaaagcgtacgcaggcggttcattaagctagatgtgaaatccccgggctcaacctgggaattgcatttagaactggtgaactagagtcttgtagaggggggtagaatttcaggtgtagcggtgaaatgcgtagagatctgaaggaataccggtggcgaaggcggccccctggacaaagactgacgctcatgtacgaaagcgtggggagcaaacaggattagataccctggtagtccacgccgtaaacgatgtctactcggagtttggtgacttagtcactgggctcccaagctaacgcattaagtagaccgcctggggagtacggccgcaaggttaaaactcaaatgaattgacgggggcccgcacaagcggtggagcatgtggtttaattcgatgcaacgcgaagaaccttacctactcttgacatccacagaagccggaagagattctggtgtgccttcgggaactgtgagacaggtgctgcatggctgtcgtcagctcgtgttgtgaaatgttgggttaagtcccgcaacgagcgcaacccctatccttatttgccagcacgtaatggtgggaactctagggagactgccggtgataaaccggaggaaggtggggacgacgtcaagtcatcatggcccttacgagtagggctacacacgtgctacaatggcgtatacagagggttgcaaagccgcgaggtggagctaatctcacaaagtacgtcgtagtccggattggagtctgcaactcgactccatgaagtcggaatcgctagtaatcgtagatcagaatgctacggtgaatacgttcccgggccttgtacacaccgcccgtcacaccatgggagtgggctgcaaaagaagtgggtagtttaaccttcgggagaacgctcaccactttgtggttcatgactggggtgaagtcgtaacaaggtagccctaggggaacctggggctggatcacctcctt

SEQ ID NO: 1089 - DNA, 1523 bp, artificial sequence
  GCF_000273015.1_02579_Bacteroides_cellulosilyticus
tacggagagtttgatcctggctcaggatgaacgctggcggcgtgcttaacacatgcaagtcgaacggtgaacacggagcttgctctgtgggatcagtggcgaacgggtgagtaacacgtgagcaacctgcccctgactctgggataagcgctggaaacggcgtctaatactggatacgagtagcgaccgcatggtcagttactggaaagatttattggttggggatgggctcgcggcctatcagcttgttggtgaggtaatggctcaccaaggcgtcgacgggtagccggcctgagagggtgaccggccacactgggactgagacacggcccagactcctacgggaggcagcagtggggaatattgcacaatgggcgcaagcctgatgcagcaacgccgcgtgagggatgacggccttcgggttgtaaacctcttttagcagggaagaagcgaaagtgacggtacctgcagaaaaagcgccggctaactacgtgccagcagccgcggtaatacgtagggcgcaagcgttatccggaattattgggcgtaaagagctcgtaggcggtttgtcgcgtctgctgtgaaatccggaggctcaacctccggcctgcagtgggtacgggcagactagagtgcggtaggggagattggaattcctggtgtagcggtggaatgcgcagatatcaggaggaacaccgatggcgaaggcagatctctgggccgtaactgacgctgaggagcgaaagggtggggagcaaacaggcttagataccctggtagtccaccccgtaaacgttgggaactagttgtggggtccattccacggattccgtgacgcagctaacgcattaagttccccgcctggggagtacggccgcaaggctaaaactcaaaggaattgacggggacccgcacaagcggcggagcatgcggattaattcgatgcaacgcgaagaaccttaccaaggcttgacatatacgagaacgggccagaaatggtcaactctttggacactcgtaaacaggtggtgcatggttgtcgtcagctcgtgtcgtgagatgttgggttaagtcccgcaacgagcgcaaccctcgttctatgttgccagcacgtaatggtgggaactcatgggatactgccggggtcaactcggaggaaggtggggatgacgtcaaatcatcatgccccttatgtcttgggcttcacgcatgctacaatggccggtacaaagggctgcaataccgcgaggtggagcgaatcccaaaaagccggtcccagttcggattgaggtctgcaactcgacctcatgaagtcggagtcgctagtaatcgcagatcagcaacgctgcggtgaatacgttcccgggtcttgtacacaccgcccgtcaagtcatgaaagtcggtaacacctgaagccggtggcctaacccttgtggagggagccgtcgaaggtgggatcggtaattaggactaagtcgtaacaaggtagccgtaccggaaggtgcggctggatcacctccttt

SEQ ID NO: 1090 - DNA, 1523 bp, artificial sequence; identical to SEQ ID NO: 1089
  GCF_000273015.1_05908_Bacteroides_cellulosilyticus

SEQ ID NO: 1091 - DNA, 1541 bp, artificial sequence
  GCF_000463315.1_05275_Bacteroides_cellulosilyticus
tgaagagtttgatcctggctcagagtgaacgctggcggcaggcctaacacatgcaagtcggacggcagcacattggtagtaataccatgggtggcgagtggcggacgggtgaggaatacatcggaatctaccttatcgtgggggacaacgtagggaaacttacgctaataccgcatacgacctacgggtgaaagcaggggaccttagggccttgtgcgattggatgagccgatgtccgattagctagttggtgaggtaaaggctcaccaaggcgacgatcggtagctggtctgagaggatgatcagccacactggaactgagacacggtccagactcctacgggaggcagcagtggggaatattggacaatgggcgcaagcctgatccagctatgccgcgtgggtgaagaatgccttcgggttgtaaagcccttttgttggggaagaaaggcaattggttaatacctagttgttatgacggtacccaaagaataagcaccggctaacttcgtgccagcagccgcggtaatacgaagggtgcaagcgttactcggaattactgggcgtaaagggtgcgtaggtggttatttaagtctgttgtgaaagccctgggcttaacctgggaatggcagtggatactggatagctagagtgtggtagagggtagcggaattcctggtgtagcagtgaaatgcgtagagatcaggaggaacatccgtggcgaaggcggctacctgggccaacactgacactgaggcacgaaagcgtggggagcaaacaggattagataccctggtagtccacgccctaaacgatgcgaactggatgttgagtgcaaattggcactcagtatcgaagctaacgcgttaagttcgccgcctggggagtacggtcgcaagactgaaactcaaaggaattgacgggggcccgcacaagcggtggagtatgtggtttaattcgatgcaacgcgaagaaccttacctggtcttgacatctgcggaactttccagagatggattggtgccttcgggagccgtgagacaggtgctgcatggctgtcgtcagctcgtgtcgtgagatgttgggttaagtcccgcaacgagcgcaacccttgtccttagttgccagcacgtaatggtgggaactttaaggagactgccggtgacaaatcggaggaaggtggggatgacgtcaagtcatcatggcccttacgaccagggctacacacgtactacaatggtagggacagagggctgcaatctcgcgagggtgagctaatcccagaaaccctatctcagtccggattggagtctgcaactcgactccatgaagtcggaatcgctagtaatcgcagatcagcattgctgcggtgaatacgttcccgggccttgtacacaccgcccgtcacaccatgggagtttgttgcaccagaagcaggtagcttaaccgcgaggagggcgcttgccacggtgtggccgatgactggggtgaagtcgtaacaaggtagccgtatcggaaggtgcggctggatcacctccttt

SEQ ID NO: 1092 - DNA, 1541 bp, artificial sequence
  GCF_000463315.1_05354_Bacteroides_cellulosilyticus
tgaagagtttgatcctggctcagagtgaacgctggcggcaggcctaacacatgcaagtcggacggcagcacattggtagtaataccatgggtggcgagtggcggacgggtgaggaatacatcggaatctaccttatcgtgggggataacgtagggaaacttacgctaataccgcatacgacctacgggtgaaagcaggggaccttagggccttgtgcgattggatgagccgatgtccgattagctagttggtgaggtaaaggctcaccaaggcgacgatcggtagctggtctgagaggatgatcagccacactggaactgagacacggtccagactcctacgggaggcagcagtggggaatattggacaatgggcgcaagcctgatccagctatgccgcgtgggtgaagaatgccttcgggttgtaaagcccttttgttggggaagaaaagcaattggttaatacctagttgttatgacggtacccaaagaataagcaccggctaacttcgtgccagcagccgcggtaatacgaagggtgcaagcgttactcggaattactgggcgtaaagggtgcgtaggtggttatttaagtctgttgtgaaagccctgggcttaacctgggaatggcagtggatactggatagctagagtgtggtagagggtagcggaattcctggtgtagcagtgaaatgcgtagagatcaggaggaacatccgtggcgaaggcggctacctgggccaacactgacactgaggcacgaaagcgtggggagcaaacaggattagataccctggtagtccacgccctaaacgatgcgaactggatgttgagtgcaaattggcactcagtatcgaagctaacgcgttaagttcgccgcctggggagtacggtcgcaagactgaaactcaaaggaattgacgggggcccgcacaagcggtggagtatgtggtttaattcgatgcaacgcgaagaaccttacctggtcttgacatctgcggaactttccagagatggattggtgccttcgggagccgtgagacaggtgctgcatggctgtcgtcagctcgtgtcgtgagatgttgggttaagtcccgcaacgagcgcaacccttgtccttagttgccagcacgtaatggtgggaactttaaggagactgccggtgacaaatcggaggaaggtggggatgacgtcaagtcatcatggcccttacgaccagggctacacacgtactacaatggtagggacagagggctgcgatctcgcgagggtgagctaatcccagaaaccctatctcagtccggattggagtctgcaactcgactccatgaagtcggaatcgctagtaatcgcagatcagcattgctgcggtgaatacgttcccgggccttgtacacaccgcccgtcacaccatgggagtttgttgcaccagaagcaggtagcttaaccgcgaggagggcgcttgccacggtgtggccgatgactggggtgaagtcgtaacaaggtagccgtatcggaaggtgcggctggatcacctccttt

SEQ ID NO: 1093 - DNA, 1541 bp, artificial sequence
  GCF_000463315.1_05536_Bacteroides_cellulosilyticus
tgaagagtttgatcctggctcagagtgaacgctggcggcaggcctaacacatgcaagtcggacggcagcacgttggtagtaataccatgggtggcgagtggcggacgggtgaggaatacatcggaatctaccttatcgtgggggataacgtagggaaacttacgctaataccgcatacgacctacgggtgaaagcaggggaccttagggccttgtgcgattggatgagccgatgtccgattagctagttggtgaggtaaaggctcaccaaggcgacgatcggtagctggtctgagaggatgatcagccacactggaactgagacacggtccagactcctacgggaggcagcagtggggaatattggacaatgggcgcaagcctgatccagctatgccgcgtgggtgaagaatgccttcgggttgtaaagcccttttgttggggaagaaaagcaattggttaatacctagttgttatgacggtacccaaagaataagcaccggctaacttcgtgccagcagccgcggtaatacgaagggtgcaagcgttactcggaattactgggcgtaaagggtgcgtaggtggttatttaagtctgttgtgaaagccctgggcttaacctgggaatggcagtggatactggatagctagagtgtggtagagggtagcggaattcctggtgtagcagtgaaatgcgtagagatcaggaggaacatccgtggcgaaggcggctacctgggccaacactgacactgaggcacgaaagcgtggggagcaaacaggattagataccctggtagtccacgccctaaacgatgcgaactggatgttgagtgcaaattggcactcagtatcgaagctaacgcgttaagttcgccgcctggggagtacggtcgcaagactgaaactcaaaggaattgacgggggcccgcacaagcggtggagtatgtggtttaattcgatgcaacgcgaagaaccttacctggtcttgacatctgcggaactttccagagatggattggtgccttcgggagccgtgagacaggtgctgcatggctgtcgtcagctcgtgtcgtgagatgttgggttaagtcccgcaacgagcgcaacccttgtccttagttgccagcacgtaatggtgggaactttaaggagactgccggtgacaaatcggaggaaggtggggatgacgtcaagtcatcatggcccttacgaccagggctacacacgtactacaatggtagggacagagggctgcaatctcgcgagggtgagctaatcccagaaaccctatctcagtccggattggagtctgcaactcgactccatgaagttggaatcgctagtaatcgcagatcagcattgctgcggtgaatacgttcccgggccttgtacacaccgcccgtcacaccatgggagtttgttgcaccagaagcaggtagcttaaccgcgaggagggcgcttgccacggtgtggccgatgactggggtgaagtcgtaacaaggtagccgtatcggaaggtgcggctggatcacctccttt

SEQ ID NO: 1094 - DNA, 1556 bp, artificial sequence
  GCF_000526555.1_00323_Bacteroides_cellulosilyticus
ttgaagagtttgatcatggctcagattgaacgctggcggcaggcctaacacatgcaagtcgagcggtaacaggaaggaagcttgctttctttgctgacgagcggcggacgggtgagtaatgcctgggaaattgccctgatgtgggggataaccattggaaacgatggctaataccgcatgatgcccttgtttataatgaacagggaccaaagagggggaccttcgggcctctcgcgtcaggatatgcccaggtgggattagctagttggtgaggtaatggctcaccaaggcgacgatccctagctggtctgagaggatgatcagccacactggaactgagacacggtccagactcctacgggaggcagcagtggggaatattgcacaatgggcgcaagcctgatgcagccatgccgcgtgtatgaagaaggccttcgggttgtaaagtactttcagtcgtgaggaagggggtatcgttaatagcggtattctttgacgttagcgacagaagaagcaccggctaactccgtgccagcagccgcggtaatacggagggtgcgagcgttaatcggaattactgggcgtaaagcgcatgcaggtggtttgttaagtcagatgtgaaagcccggggctcaacctcggagttgcatttgaaactggcaggctagagtactgtagaggggggtagaatttcaggtgtagcggtgaaatgcgtagagatctgaaggaataccggtggcgaaggcggccccctggacagatactgacactcagatgcgaaagcgtggggagcaaacaggattagataccctggtagtccacgctgtaaacgatgtctacttggaggttgtggccttgagccgtggctttcggagctaacgcgttaagtagaccgcctggggagtacggtcgcaagattaaaactcaaatgaattgacgggggcccgcacaagcggtggagcatgtggtttaattcgatgcaacgcgaagaaccttacctactcttgacatctacaggatcctgcggagacgcgggagtgccttcgggaactgtaagacaggtgctgcatggctgtcgtcagctcgtgttgtgaaatgttgggttaagtcccgcaacgagcgcaacccttatccttgtttgccagcgagtaatgtcgggaactccagggagactgccggtgataaaccggaggaaggtggggacgacgtcaagtcatcatggcccttacgagtagggctacacacgtgctacaatggcgcatacagagggcggcgagctagcgatagtgagcgaatcccaaaaagtgcgtcgtagtccggattggagtctgcaactcgactccatgaagtcggaatcgctagtaatcgtggatcagaatgccacggtgaatacgttcccgggccttgtacacaccgcccgtcacaccatgggagtgggctgcaaaagaagcaggtagtttaaccttcgggaggacgcttgccactttgtggttcatgactggggtgaagtcgtaacaaggtagcgctaggggaacctggcgctggatcacctcctt

SEQ ID NO: 1095 - DNA, 1556 bp, artificial sequence; identical to SEQ ID NO: 1094
  GCF_000526555.1_00803_Bacteroides_cellulosilyticus

SEQ ID NO: 1096 - DNA, 1554 bp, artificial sequence
  GCF_000526555.1_02768_Bacteroides_cellulosilyticus
ttgaagagtttgatcatggctcagattgaacgctggcggcaggcctaacacatgcaagtcgagcggtaacaggaagaaagcttgctttctttgctgacgagcgcggacgggtgagtaatgcctgggaaattgccctgatgtgggggataaccattggaaacgatggctaataccgcatgatgcccttgtttataatgaacagggaccaaagagggggaccttcgggcctctcgcgtcaggatatgcccaggtgggattagctagttggtgaggtaatggctcaccaaggcgacgatccctagctggtctgagaggatgatcagccacactggaactgagacacggtccagactcctacgggaggcagcagtggggaatattgcacaatgggcgcaagcctgatgcagccatgccgcgtgtatgaagaaggccttcgggttgtaaagtactttcagtcgtgaggaagggggtatcgttaatagcggtattctttgacgttagcgacagaagaagcaccggctaactccgtgccagcagccgcggtaatacggagggtgcgagcgttaatcggaattactgggcgtaaagcgcatgcaggtggtttgttaagtcagatgtgaaagcccggggctcaacctcggagttgcatttgaaactggcaggctagagtactgtagaggggggtagaatttcaggtgtagcggtgaaatgcgtagagatctgaaggaataccggtggcgaaggcggccccctggacagatactgacactcagatgcgaaagcgtggggagcaaacaggattagataccctggtagtccacgctgtaaacgatgtctacttggaggttgtggccttgagccgtggctttcggagctaacgcgttaagtagaccgcctggggagtacggtcgcaagattaaaactcaaatgaattgacgggggcccgcacaagcggtggagcatgtggtttaattcgatgcaacgcgaagaaccttacctactcttgacatccagagaatctggcggagacgctagagtgccttcgggagctctgagacaggtgctgcatggctgtcgtcagctcgtgttgtgaaatgttgggttaagtcccgcaacgagcgcaacccttatccttgtttgccagcgagtaatgtcgggaactccagggagactgccggtgataaaccggaggaaggtggggacgacgtcaagtcatcatggcccttacgagtagggctacacacgtgctacaatggcgcatacagagggcggcgagctagcgatagtgagcgaatcccaaaaagtgcgtcgtagtccggattggagtctgcaactcgactccatgaagtcggaatcgctagtaatcgtggatcagaatgccacggtgaatacgttcccgggccttgtacacaccgcccgtcacaccatgggagtgggctgcaaaagaagcaggtagtttaaccttcgggaggacgcttgccactttgtggttcatgactggggtgaagtcgtaacaaggtagcgctagggaacctggcgctggatcacctcctt

SEQ ID NO: 1097 - DNA, 1445 bp, artificial sequence
  GCF_000526555.1_05431_Bacteroides_cellulosilyticus
gtcgagcggcggacgggtgagtaatgcctgggaaattgccctgatgtgggggataaccattggaaacgatggctaataccgcataatagcttcggctcaaagagggggaccttcgggcctctcgcgtcaggatatgcccaggtgggattagctagttggtgaggtaaaggctcaccaaggcgacgatccctagctggtctgagaggatgatcagccacactggaactgagacacggtccagactcctacgggaggcagcagtggggaatattgcacaatgggcgcaagcctgatgcagccatgccgcgtgtgtgaagaaggccttcgggttgtaaagcactttcagcagtgaggaagggtgtgtatttaatagatgcacattttgacgttagctgcagaagaagcaccggctaactccgtgccagcagccgcggtaatacggagggtgcgagcgttaatcggaattactgggcgtaaagcgcatgcaggtggtttgttaagtcagatgtgaaagcccggggctcaacctcggaactgcatttgaaactggcaggctagagtactgtagaggggggtagaatttcaggtgtagcggtgaaatgcgtagagatctgaaggaataccggtggcgaaggcggccccctggacagatactgacactcagatgcgaaagcgtggggagcaaacaggattagataccctggtagtccacgccgtaaacgatgtctacttggaggttgtggccttgagccgtggctttcggagctaacgcgttaagtagaccgcctggggagtacggtcgcaagattaaaactcaaatgaattgacgggggcccgcacaagcggtggagcatgtggtttaattcgatgcaacgcgaagaaccttacctactcttgacatccatagaacttagcagagatgctttggtgccttcgggaactatgagacaggtgctgcatggctgtcgtcagctcgtgttgtgaaatgttgggttaagtcccgcaacgagcgcaacccttatccttgtttgccagcacttcgggtgggaactccagggagactgccggtgataaaccggaggaaggtggggacgacgtcaagtcatcatggcccttacgagtagggctacacacgtgctacaatggcgcatacagagggcggccaacttgcgagagtgagcgaatcccaaaaagtgcgtcgtagtccggattggagtctgcaactcgactccatgaagtcggaatcgctagtaatcgtggatcagaatgccacggtgaatacgttcccgggccttgtacacaccgcccgtcacaccatgggagtgggctgcaaaagaagcaggtagtttaaccttcgggaggacgcttgccactttgtggttcatgactggggtgaagtcgtaacaaggtagccctaggggaacctggggctggatcacctcctt

SEQ ID NO: 1098 - DNA, 1546 bp, artificial sequence
  GCF_001318345.1_01475_Bacteroides_cellulosilyticus
aatgagagtttgatcctggctcaggacgaacgctggcggcgtgcctaatacatgcaagtagaacgctgaggactggtgcttgcaccggtccaaggagttgcgaacgggtgagtaacgcgtaggtaacctacctcatagcgggggataactattggaaacgatagctaataccgcataaaagtgtttaacccatgttaaacatttaaaaggtgcaattgcatcactatgagatggacctgcgttgtattagctagttggtgaggtaacggctcaccaaggcgacgatacatagccgacctgagagggtgatcggccacactgggactgagacacggcccagactcctacgggaggcagcagtagggaatcttcggcaatggacggaagtctgaccgagcaacgccgcgtgagtgaagaaggttttcggatcgtaaagctctgttgttagagaagaatgatggtgggagtggaaaatccaccatgtgacggtaactaaccagaaagggacggctaactacgtgccagcagccgcggtaatacgtaggtcccgagcgttgtccggatttattgggcgtaaagcgagcgcaggcggttctttaagtctgaagttaaaggcagtggctcaaccattgtacgctttggaaactggagaacttgagtgcagaaggggagagtggaattccatgtgtagcggtgaaatgcgtagatatatggaggaacaccggtggcgaaagcggctctctggtctgtaactgacgctgaggctcgaaagcgtggggagcaaacaggattagataccctggtagtccacgccgtaaacgatgagtgctaggtgttaggccctttccggggcttagtgccggagctaacgcattaagcactccgcctggggagtacgaccgcaaggttgaaactcaaaggaattgacgggggcccgcacaagcggtggagcatgtggtttaattcgaagcaacgcgaagaaccttaccaggtcttgacatcctcctgaccggtctagagataggctttcccttcggggcaggagtgacaggtggtgcatggttgtcgtcagctcgtgtcgtgagatgttgggttaagtcccgcaacgagcgcaacccctattgttagttgccatcattaagttgggcactctagcgagactgccggtaataaaccggaggaaggtggggatgacgtcaaatcatcatgccccttatgacctgggctacacacgtgctacaatggttggtacaacgagtcgcaagccggtgacggcaagctaatctcttaaagccaatctcagttcggattgtaggctgcaactcgcctacatgaagtcggaatcgctagtaatcgcggatcagcacgccgcggtgaatacgttcccgggccttgtacacaccgcccgtcacaccacgagagtttgtaacacccgaagtcggtgaggtaacctattaggagccagccgcctaaggtgggatagatgattggggtgaagtcgtaacaaggtagccgtatcggaaggtgcggctggatcacctccttt

SEQ ID NO: 1099 - DNA, 1546 bp, artificial sequence; identical to SEQ ID NO: 1098
  GCF_001318345.1_01922_Bacteroides_cellulosilyticus

SEQ ID NO: 1100 - DNA, 1546 bp, artificial sequence; identical to SEQ ID NO: 1098
  GCF_001318345.1_03488_Bacteroides_cellulosilyticus

SEQ ID NO: 1101 - DNA, 1546 bp, artificial sequence
  GCF_001318345.1_05185_Bacteroides_cellulosilyticus
aatgagagtttgatcctggctcaggacgaacgctggcggcgtgcctaatacatgcaagtagaacgctgaggactggtgcttgcaccggtccaaggagttgcgaacgggtgagtaacgcgtaggtaacctacctcatagcgggggataactattggaaacgatagctaataccgcataaaagtgtttaacccatgttaaacatttaaaaggtgcaactgcatcactatgagatggacctgcgttgtattagctagttggtgaggtaacggctcaccaaggcgacgatacatagccgacctgagagggtgatcggccacactgggactgagacacggcccagactcctacgggaggcagcagtagggaatcttcggcaatggacggaagtctgaccgagcaacgccgcgtgagtgaagaaggttttcggatcgtaaagctctgttgttagagaagaatgatggtgggagtggaaaatccaccatgtgacggtaactaaccagaaagggacggctaactacgtgccagcagccgcggtaatacgtaggtcccgagcgttgtccggatttattgggcgtaaagcgagcgcaggcggttctttaagtctgaagttaaaggcagtggctcaaccattgtacgctttggaaactggagaacttgagtgcagaaggggagagtggaattccatgtgtagcggtgaaatgcgtagatatatggaggaacaccggtggcgaaagcggctctctggtctgtaactgacgctgaggctcgaaagcgtggggagcaaacaggattagataccctggtagtccacgccgtaaacgatgagtgctaggtgttaggccctttccggggcttagtgccggagctaacgcattaagcactccgcctggggagtacgaccgcaaggttgaaactcaaaggaattgacgggggcccgcacaagcggtggagcatgtggtttaattcgaagcaacgcgaagaaccttaccaggtcttgacatcctcctggccggtctagagataggctttcccttcggggcaggagtgacaggtggtgcatggttgtcgtcagctcgtgtcgtgagatgttgggttaagtcccgcaacgagcgcaacccctattgttagttgccatcattaagttgggcactctagcgagactgccggtaataaaccggaggaaggtggggatgacgtcaaatcatcatgccccttatgacctgggctacacacgtgctacaatggttggtacaacgagtcgcaagccggtgacggcaagctaatctcttaaagccaatctcagttcggattgtaggctgcaactcgcctacatgaagtcggaatcgctagtaatcgcggatcagcacgccgcggtgaatacgttcccgggccttgtacacaccgcccgtcacaccacgagagtttgtaacacccgaagtcggtgaggtaacctattaggagccagccgcctaaggtgggatagatgattggggtgaagtcgtaacaaggtagccgtatcggaaggtgcggctggatcacctccttt

SEQ ID NO: 1102 - DNA, 1452 bp, artificial sequence
  GCF_001578635.1_00282_Bacteroides_cellulosilyticus
cgggggcatgcctaacacatgcaagtcgaacgatgctttcgggcatagtggcgcacgggtgcgtaacgcgtgggaatctgcccttgggttcggaataacagttagaaatgactgctaataccggatgatgtcgataagaccaaagatttatcgcctgaggatgagcccgcgtaggattagctagttggtgtggtaaaggcgcaccaaggcgacgatccttagctggtctgagaggatgatcagccacactgggactgagacacggcccagactcctacgggaggcagcagtggggaatattggacaatgggcgcaagcctgatccagcaatgccgcgtgagtgatgaaggccttagggttgtaaagctcttttacccgtgatgataatgacagtagcgggagaataagccccggctaactccgtgccagcagccgcggtaatacggagggggctagcgttgttcggaattactgggcgtaaagcgcacgtaggcggctttgtaagttagaggtgaaagcctggagctcaactccagaactgcctttaagactgcatcgcttgaatccaggagaggtgagtggaattccgagtgtagaggtgaaattcgtagatattcggaagaacaccagtggcgaaggcggctcactggactggtattgacgctgaggtgcgaaagcgtggggagcaaacaggattagataccctggtagtccacgccgtaaacgatgataactagctgtccggggacttggtctttgggtggcgcagctaacgcattaagttatccgcctggggagtacggtcgcaagattaaaactcaaaggaattgacgggggcctgcacaagcggtggagcatgtggtttaattcgaagcaacgcgcagaaccttaccagcgtttgacatgtccggacgacttcgagagatcgatttcttcccttcggggactggaacacaggtgctgcatggctgtcgtcagctcgtgtcgtgagatgttgggttaagtcccgcaacgagcgcaaccctcgatcctagttaccatcattaagttgggtactttaggataaccgccggtgataagccggaggaaggtggggatgacgtcaagtcctcatggcccttacgcgctgggctacacacgtgctacaatggcaggtacagtgggcagcaatcccgcgagggtgagctaatctccaaaacctgtctcagttcggattgttctctgcaactcgagagcatgaaggcggaatcgctagtaatcgcggatcagcatgccgcggtgaatacgttcccaggccttgtacacaccgcccgtcacaccatgggagttggattcacccgaaggcgttgcgccaacccgtaagggaagcaggcgaccacggtgggttcagcgactggggtgaagtcgtaacaaggtagccgtaggggaacctgcggctggatcacctccttt

SEQ ID NO: 1103 - DNA, 1528 bp, artificial sequence
  GCF_003457665.1_00124_Bacteroides_cellulosilyticus
ttggagagtttgatcctggctcaggacgaacgctggcggcgtgcttaacacatgcaagtcgaacggaaaggcctcttcggaggtactcgagtggcgaacgggtgagtaacacgtgggcaatctgccctgcacttcgggataagcctgggaaactgggtctaataccggataggacctttagacgcatgtcttttggtggaaagcttttgcggtgtgggatgggcccgcggcctatcagcttgttggtggggtgatggcctaccaaggcgacgacgggtagccggcctgagagggtgtccggccacactgggactgagatacggcccagactcctacgggaggcagcagtggggaatattgcacaatgggcgcaagcctgatgcagcgacgccgcgtgggggatgacggccttcgggttgtaaacctctttcaccatcgacgaaggtccgggttttctcggattgacggtaggtggagaagaagcaccggccaactacgtgccagcagccgcggtaatacgtagggtgcgagcgttgtccggaattactgggcgtaaagagctcgtaggtggtttgtcgcgttgttcgtgaaatctcacggcttaactgtgagcgtgcgggcgatacgggcagactagagtactgcaggggagactggaattcctggtgtagcggtggaatgcgcagatatcaggaggaacaccggtggcgaaggcgggtctctgggcagtaactgacgctgaggagcgaaagcgtggggagcgaacaggattagataccctggtagtccacgccgtaaacggtgggtactaggtgtgggtttccttccttgggatccgtgccgtagctaacgcattaagtaccccgcctggggagtacggccgcaaggctaaaactcaaaggaattgacgggggcccgcacaagcggcggagcatgtggattaattcgatgcaacgcgaagaaccttacctgggtttgacatgcacaggacgcgtctagagataggcgttcccttgtggcctgtgtgcaggtggtgcatggctgtcgtcagctcgtgtcgtgagatgttgggttaagtcccgcaacgagcgcaacccttgtctcatgttgccagcgggtaatgccggggactcgtgagagactgccggggtcaactcggaggaaggtggggatgacgtcaagtcatcatgccccttatgtccagggcttcacacatgctacaatggccggtacaaagggctgcgatgccgtaaggttaagcgaatccttttaaagccggtctcagttcggattggggtctgcaactcgaccccatgaagtcggagtcgctagtaatcgcagatcagcaacgctgcggtgaatacgttcccgggccttgtacacaccgcccgtcacgtcatgaaagtcggtaacacccgaagccagtggcctaaccttttggagggagctgtcgaaggtgggatcggcgattgggacgaagtcgtaacaaggtagccgtaccggaaggtgcggctggatcacctccttt

SEQ ID NO: 1104 - DNA, 1529 bp, artificial sequence
  GCF_003459465.1_04762_Bacteroides_cellulosilyticus
tgaagagtttgatcctggctcagattgaacgctggcggcatgccttacacatgcaagtcgaacggcagcacgggtgcttgcacctggtggcgagtggcgaacgggtgagtaatacatcggaacatgtcctgtagtgggggatagcccggcgaaagccggattaataccgcatacgatctgaggatgaaagcgggggaccttcgggcctcgcgctatagggttggccgatggctgattagctagttggtggggtaaaggcctaccaaggcgacgatcagtagctggtctgagaggacgaccagccacactgggactgagacacggcccagactcctacgggaggcagcagtggggaattttggacaatgggcgcaagcctgatccagcaatgccgcgtgtgtgaagaaggccttcgggttgtaaagcacttttgtccggaaagaaatcctaccgactaatactgggtggggatgacggtaccggaagaataagcaccggctaactacgtgccagcagccgcggtaatacgtagggtgcgagcgttaatcggaattactgggcgtaaagcgtgcgcaggcggtttgttaagaccgatgtgaaatccccgggctcaacctgggaactgcattggtgactggcaagctagagtatggcagaggggggtagaattccacgtgtagcagtgaaatgcgtagagatgtggaggaataccgatggcgaaggcagccccctgggccaatactgacgctcatgcacgaaagcgtggggagcaaacaggattagataccctggtagtccacgccctaaacgatgtcaactagttgttggggattcatttccttagtaacgtagctaacgcgtgaagttgaccgcctggggagtacggtcgcaagattaaaactcaaaggaattgacggggacccgcacaagcggtggatgatgtggattaattcgatgcaacgcgaaaaaccttacctacccttgacatggtcggaatcctgctgagaggtgggagtgctcgaaagagaaccgatacacaggtgctgcatggctgtcgtcagctcgtgtcgtgagatgttgggttaagtcccgcaacgagcgcaacccttgtccttagttgctacgcaagagcactctaaggagactgccggtgacaaaccggaggaaggtggggatgacgtcaagtcctcatggcccttatgggtagggcttcacacgtcatacaatggtcggaacagagggtcgccaacccgcgagggggagccaatcccagaaaaccgatcgtagtccggattgcactctgcaactcgagtgcatgaagctggaatcgctagtaatcgcggatcagcatgccgcggtgaatacgttcccgggtcttgtacacaccgcccgtcacaccatgggagtgggttttaccagaagtggctagtctaaccgcaaggaggacggtcaccacggtaggattcatgactggggtgaagtcgtaacaaggtagccgtatcggaaggtgcggctggatcacctccttt

SEQ ID NO: 1105 - DNA, 1523 bp, artificial sequence
  GCF_003460035.1_02177_Bacteroides_cellulosilyticus
acggagagtttgatcctggctcaggacgaacgctggcggcgtgcttaacacatgcaagtcgaacgatgaagcccttcggggtggattagtggcgaacgggtgagtaacacgtgggcaatctgcccttcactctgggacaagccctggaaacggggtctaataccggatatcactcccactcgcatgggtgggggtcgaaagctccggcggtgaaggatgagcccgcggcctatcagcttgttggtgaggtaatggctcaccaaggcgacgacgggtagccggcctgagagggcgaccggccacactgggactgagacacggcccagactcctacgggaggcagcagtggggaatattgcacaatgggcgaaagcctgatgcagcgacgccgcgtgagggatgacggccttcgggttgtaaacctctttcagcagggaagaagcgaaagtgacggtacctgcagaagaagcgccggctaactacgtgccagcagccgcggtaatacgtagggcgcaagcgttgtccggaattattgggcgtaaagagctcgtaggcggcttgtcacgtcgggtgtgaaagctcggggcttaaccccgagtctgcattcgatacgggctagctagagtgtggtaggggagatcggaattcctggtgtagcggtgaaatgcgcagatatcaggaggaacaccggtggcgaaggcggatctctgggccattactgacgctgaggagcgaaagcgtggggagcgaacaggattagataccctggtagtccacgccgtaaacggtgggaactaggtgttggcgacattccacgtcgtcggtgccgcagctaacgcattaagttccccgcctggggagtacggccgcaaggctaaaactcaaaggaattgacgggggcccgcacaagcagcggagcatgtggcttaattcgacgcaacgcgaagaaccttaccaaggcttgacatacaccggaaagcatcagagatggtgccccccttgtggtcggtgtacaggtggtgcatggctgtcgtcagctcgtgtcgtgagatgttgggttaagtcccgcaacgagcgcaacccttgttctgtgttgccagcatgcccttcggggtgatggggactcacaggagaccgccggggtcaactcggaggaaggtggggacgacgtcaagtcatcatgccccttatgtcttgggctgcacacgtgctacaatggccgatacaatgagctgcgataccgcaaggtggagcgaatctcaaaaagtcggtctcagttcggattggggtctgcaactcgaccccatgaagttggagttgctagtaatcgcagatcagcattgctgcggtgaatacgttcccgggccttgtacacaccgcccgtcacgtcacgaaagtcggtaacacccgaagccggtggcccaaccccttgtgggagggagctgtcgaaggtgggactggcgattgggacgaagtcgtaacaaggtagccgtaccggaaggtgcggctggatcacctccttt

SEQ ID NO: 1106 - DNA, 1545 bp, artificial sequence
  GCF_900624855.1_05704_Bacteroides_cellulosilyticus
cggagagtttgatcctggctcaggacgaacgctggcggcgtgcctaatacatgcaagtcgagcggacagaagggagcttgctcccggatgttagcggcggacgggtgagtaacacgtgggtaacctgcctgtaagactgggataactccgggaaaccggagctaataccggatagttccttgaaccgcatggttcaaggatgaaaggcggtttcggctgtcacttacagatggacccgcggcgcattagctagttggtgaggtaacggctcaccaaggcgacgatgcgtagccgacctgagagggtgatcggccacactgggactgagacacggcccagactcctacgggaggcagcagtagggaatcttccgcaatggacgaaagtctgacggagcaacgccgcgtgagtgatgaaggttttcggatcgtaaagctctgttgttagggaagaacaagtgcaagagtaactgcttgcaccttgacggtacctaaccagaaagccacggctaactacgtgccagcagccgcggtaatacgtaggtggcaagcgttgtccggaattattgggcgtaaagggctcgcaggcggtttcttaagtctgatgtgaaagcccccggctcaaccggggagggtcattggaaactgggaaacttgagtgcagaagaggagagtggaattccacgtgtagcggtgaaatgcgtagagatgtggaggaacaccagtggcgaaggcgactctctggtctgtaactgacgctgaggagcgaaagcgtggggagcgaacaggattagataccctggtagtccacgccgtaaacgatgagtgctaagtgttagggggtttccgccccttagtgctgcagctaacgcattaagcactccgcctggggagtacggtcgcaagactgaaactcaaaggaattgacgggggcccgcacaagcggtggagcatgtggtttaattcgaagcaacgcgaagaaccttaccaggtcttgacatcctctgacaaccctagagatagggttttcccttcggggacagagtgacaggtggtgcatggttgtcgtcagctcgtgtcgtgagatgttgggttaagtcccgcaacgagcgcaacccttgatcttagttgccagcatttagttgggcactctaaggtgactgccggtgacaaaccggaggaaggtggggatgacgtcaaatcatcatgccccttatgacctgggctacacacgtgctacaatggacagaacaaagggctgcgagaccgcaaggtttagccaatcccacaaatctgttctcagttcggatcgcagtctgcaactcgactgcgtgaagctggaatcgctagtaatcgcggatcagcatgccgcggtgaatacgttcccgggccttgtacacaccgcccgtcacaccacgagagtttgcaacacccgaagtcggtgaggtaacctttatggagccagccgccgaaggtggggcagatgattggggtgaagtcgtaacaaggtagccgtatcggaaggtgcggctggatcacctccttt

SEQ ID NO: 1107 - DNA, 1482 bp, artificial sequence
  GCF_000154845.1_00784_Bacteroides_coprocola
cttgagagtttgatcctggctcagagcgaacgctggcggcaggcttaacacatgcaagtcgagcgccccgcaaggggagcggcagacgggtgagtaacacgtgggaacgtaccttttggttcggaacaacacagggaaacttgtgctaataccggataagcccttacggggaaagatttatcgccaaaagatcggcccgcgtctgattagctagttggtggggtaatggcccaccaaggcgacgatcagtagctggtctgagaggatgatcagccacactgggactgagacacggcccagactcctacgggaggcagcagtggggaatattggacaatgggggcaaccctgatccagccatgccgcgtgagtgatgaaggccttagggttgtaaagctctttcgttggggaagataatgacggtacccaaagaagaagccccggctaacttcgtgccagcagccgcggtaatacgaagggggctagcgttgctcggaatcactgggcgtaaagcgcacgtaggcggacttttaagtcaggggtgaaatcctggagctcaactccagaactgcctttgatactggaagtcttgagtccggaagaggtaagtggaactgcgagtgtagaggtgaaattcgtagatattcgcaagaacaccagtggcgaaggcggcttactggtccggtactgacgctgaggtgcgaaagcgtggggagcaaacaggattagataccctggtagtccacgccgtaaacgatgaatgctagccgttggcgggtttacccgtcagtggcgcagctaacgctttaagcattccgcctggggagtacggtcgcaagattaaaactcaaaggaattgacgggggcccgcacaagcggtggagcatgtggttcaattcgaagcaacgcgcagaaccttaccggcccttgacatgtcccgtatggatttcagagatgagatccttcagttcggctggcgggaacacaggtgctgcatggctgtcgtcagctcgtgtcgtgagatgttgggttaagtcccgcaacgagcgcaaccctcgcccctagttgccatcattcagttgggcactctagggggactgccggtgataagccgagaggaaggtggggatgacgtcaagtcctcatggcccttacgggccgggctacacacgtgctacaatggcggtgacaatgggaagcaacacagcaatgtgtagcgaatctcaaaaagccgtctcagttcggattggggtctgcaactcgaccccatgaagttggaatcgctagtaatcgtggatcagcacgccacggtgaatacgttcccgggccttgtacacaccgcccgtcacaccatgggagttgggtttacccgaaggcagtgcgctaaccgcaagggggcagctgaccacggtaggctcagcgactggggtgaagtcgtaacaaggtagccgtaggggaacctgcggctggatcacctccttt

SEQ ID NO: 1108 - DNA, 1482 bp, artificial sequence
  GCF_000154845.1_01126_Bacteroides_coprocola
cttgagagtttgatcctggctcagaacgaacgctggcggcaggcttaacacatgcaagtcgagcgccccgcaaggggagcggcagacgggtgagtaacgcgtgggaatctacccatctctacggaataacgcatggaaacgtgtgctaataccgtatacgtccttttggagaaagatttatcggagatggatgagcccgcgttggattagctagttggtggggtaaaggcctaccaaggcgacgatccatagctggtctgagaggatgatcagccacactgggactgagacacggcccagactcctacgggaggcagcagtggggaatattggacaatgggcgcaagcctgatccagccatgccgcgtgagtgatgaaggccctagggttgtaaagctctttcaccggtgaagataatgacggtaaccggagaagaagccccggctaacttcgtgccagcagccgcggtaatacgaagggggctagcgttgttcggatttactgggcgtaaagcgcacgtaggcggactattaagtcaggggtgaaatcccggggctcaaccccggaactgcctttgatactggtagtcttgagttcgagagaggtgagtggaattccgagtgtagaggtgaaattcgtagatattcggaggaacaccagtggcgaaggcggctcactggctcgatactgacgctgaggtgcgaaagcgtggggagcaaacaggattagataccctggtagtccacgccgtaaactatgagagctagccgtcgggcagtatactgttcggtggcgcagcaaacgcattaagctctccgcctggggagtacggtcgcaagattaaaactcaaaggaattgacgggggcccgcacaagcggtggagcatgtggtttaattcgaagcaacgcgcagaaccttaccagcccttgacatcccgatcgcggttaccagagatggtttccttcagttaggctggatcggtgacaggtgctgcatggctgtcgtcagctcgtgtcgtgagatgttgggttaagtcccgcaacgagcgcaaccctcgcccttagttgccatcattcagttgggcactctaaggggactgccggtgataagccgagaggaaggtggggatgacgtcaagtcctcatggcccttacgggctgggctacacacgtgctacaatggtggtgacagtgggcagcgagaccgcgaggtcgagctaatctccaaaagccatctcagttcggattgcactctgcaactcgagtgcatgaagttggaatcgctagtaatcgtggatcagaatgccacggtgaatacgttcccgggccttgtacacaccgcccgtcacaccatgggagttggttttacccgaaggtgctgtgctaaccgcaaggaggcaggcaaccacggtagggtcagcgactggggtgaagtcgtaacaaggtagccgtaggggaacctgcggctggatcacctccttt

SEQ ID NO: 1109 - DNA, 1525 bp, artificial sequence
  GCF_000154845.1_02071_Bacteroides_coprocola
tttggagagtttgatcctggctcaggacgaacgctggcggcgtgcttaacacatgcaagtcgaacgatgatctggcagcttgctgctggggattagtggcgaacgggtgagtaacacgtgagtaacctgccctggactctgggataaccccgagaaatcggagctaataccggataggacctggaaccgcatggttttgggtggaaagtttttcggtctgggatggactcgcggcctatcagcttgttggtgaggtaatggctcaccaaggcgtcgacgggtagccggcctgagagggtgaccggccacactgggactgagacacggcccagactcctacgggaggcagcagtggggaatattgcacaatgggcgcaagcctgatgcagcaacgccgcgtgagggatgacggccttcgggttgtaaacctcttttagtagggaagaagggcttcggcttgacggtacctgcagaaaaagcaccggctaactacgtgccagcagccgcggtaatacgtagggtgcgagcgttgtccggaattattgggcgtaaagagctcgtaggcggtttgtcacgtctgctgtgaaatcccgaggctcaacctcgggcctgcagtgggtacgggcagactggagtgcggtaggggagaatggaattcctggtgtagcggtggaatgcgcagatatcaggaggaacaccgatggcgaaggcagttctctgggccgtaactgacgctgaggagcgaaagcgtggggagcgaacaggattagataccctggtagtccacgccgtaaacgttgggcgctagatgtggggacctttccacggtttccgtgtcgtagctaacgcattaagcgccccgcctggggagtacggccgcaaggctaaaactcaaaggaattgacgggggcccgcacaagcggcggagcatgcggattaattcgatgcaacgcgaagaaccttaccaaggcttgacataaccgagaacgccgcagaaatgtggaactctttggacactcggttacaggtggtgcatggttgtcgtcagctcgtgtcgtgagatgttgggttaagtcccgcaacgagcgcaaccctcgtcgtatgttgccagcacgtcatggtgggaactcatatgagactgccggggtcaactcggaggaaggtggggatgacgtcaaatcatcatgccccttatgtcttgggcttcacgcatgctacaatggccggtacaaagggctgcgatgtcgtaaggcggagcgaatcccaaaaagccggtctcagttcggattgaggtctgcaactcgacctcatgaagtcggagtcgctagtaatcgcagatcagcaacgctgcggtgaatacgttcccgggccttgtacacaccgcccgtcaagtcatgaaagtcggtaacacccgaagccggtggcctaacccttgtggagggagccgtcgaaggtgggatcggtgattaggactaagtcgtaacaaggtagccgtaccggaaggtgcggctggatcacctccttt

SEQ ID NO: 1110 - DNA, 1527 bp, artificial sequence
  GCF_000154845.1_02209_Bacteroides_coprocola
tgaagagtttgatcctggctcagattgaacgctagcggcatgccttacacatgcaagtcgaacggcagcgcggacttcggtctggcggcgagtggcgaacgggtgagtaatgcatcggaacgtgcccagtagcgggggataactacgcgaaagcgtagctaataccgcatacgccctacgggggaaagggggggatcgcaagacctctcactattggagcggccgatgtcggattagctagttggtggggtaaaggcctaccaaggcgacgatccgtagctggtttgagaggacgaccagccacactgggactgagacacggcccagactcctacgggaggcagcagtggggaattttggacaatgggggcaaccctgatccagccatgccgcgtgtgcgaagaaggccttcgggttgtaaagcacttttggcaggaaagaaacggcgccggataatacctggcgtaactgacggtacctgcagaataagcaccggctaactacgtgccagcagccgcggtaatacgtagggtgcaagcgttaatcggaattactgggcgtaaagcgtgcgcaggcggttcggaaagaaagatgtgaaatcccagggctcaaccttggaactgcatttttaactcccgaactagagtatgtcagaggggggtggaattccacgtgtagcagtgaaatgcgtagatatgtggaggaacaccgatggcgaaggcagccccctgggataatactgacgctcatgcacgaaagcgtggggagcaaacaggattagataccctggtagtccacgccctaaacgatgtcaactagctgttgggttcttcggagcttggtagcgcagctaacgcgtgaagttgaccgcctggggagtacggtcgcaagattaaaactcaaaggaattgacggggacccgcacaagcggtggatgatgtggattaattcgatgcaacgcgaaaaaccttacctacccttgacatgtctggaatcctgaagagatttaggagtgctcgaaagagaaccggaacacaggtgctgcatggccgtcgtcagctcgtgtcgtgagatgttgggttaagtcccgcaacgagcgcaacccttgtcattagttgctacgaaagggcactctaatgagactgccggtgacaaaccggaggaaggtggggatgacgtcaggtcctcatggcccttatgggtagggcttcacacgtcatacaatggtcgggacagagggcagccaacccgcgagggggagccaatcccagaaacccgatcgtagtccggattgcagtctgcaactcgactgcatgaagtcggaatcgctagtaatcgcggatcagcatgtcgcggtgaatacgttcccgggtcttgtacacaccgcccgtcacaccatgggagtgggttctaccagaagtaggtagcctaaccgtaaggagggcgcttaccacggtagggttcatgactggggtgaagtcgtaacaaggtagccgtatcggaaggtgcggctggatcacctccttt

SEQ ID NO: 1111 - DNA, 1519 bp, artificial sequence
  GCF_000154845.1_03021_Bacteroides_coprocola
atggagagtttgatcctggctcaggatgaacgctagcggcaggcctaatacatgcaagtcggacggtatggattctttcggggatcctgagagtggcgcacgggtgcgtaacgcgtatgcaacctaccttatactgggggatagcccggggaaacccggattaataccccatggtattgaatgatggcatcatttttcaattaaagatttatcggtatgagatgggcatgcgtaggattagctagttggcggggtaacggcccaccaaggcgacgatccttaggggttctgagaggaaggtcccccacactggcactgagatacgggccagactcctacgggaggcagcagtagggaatattgggcaatggccggaaggctgacccagccatgccgcgtgcaggaagaaggcgttatgcgttgtaaactgcttttatacgggaagaaaaagcaactgcggttgaaattgccggtaccgtatgaataagcaccggctaactccgtgccagcagccgcggtaatacggagggtgcgagcgttgtccggatttattgggtttaaagggtgcgtaggcggccttataagtcagcggtgaaatacccaggctcaacctggggggtgccgttgatactgtttggcttgagtgcgttccgtgtacatggaatttatggtgtagcggtgaaatgcatagataccataaggaacaccgatagcgaaggcattgtacaggggcgtaactgacgctgaggcacgaaagcacgggtagcgaacaggattagataccctggtagtccgtgccgtaaacgatgatcactcgctgttattctgttatggggtagcggccaagcgaaagcgttaagtgatccacctggggagtacgccggcaacggtgaaactcaaaggaattgacgggggtccgcacaagcggtggagcatgtggtttaattcgatgatacgcgaggaaccttacctgggctagaatgtgaaggaatgatttggagacagatcagtcggcaacgacctgaaacaaggtgctgcatggctgtcgtcagctcgtgccgtgaggtgttgggttaagtcccgcaacgagcgcaacccctattgtcagttgccatcgggtagagccggggactctgacaagactgcctgcgcaagcagagaggaaggaggggacgacgtcaagtcatcatggcccttacgcccagggcgacacacgtgctacaatggcgcatacagcgggtagctacttggcgacaggatgccaacctctaaaagtgcgtctcagttcggattggggtctgcaacccgaccccatgaagctggaatcgctagtaatcgcgcatcagccatggcgcggtgaatacgttcccggaccttgtacacaccgcccgtcaagccatggaagtcgggtagacctgaagacggtaaccgcgaggagccgtttagggtagaaccggtaactggggctaagtcgtaacaaggtagccgtaccggaaggtgcggctggaacacctccttt

SEQ ID NO: 1112 - DNA, 1519 bp, artificial sequence
  GCF_003458565.1_01424_Bacteroides_coprocola
atgaagagtttgatcctggctcaggatgaacgctagcggcaggcctaacacatgcaagtcgaggggtaacatttgtgcttgcacaagatgacgaccggcgcacgggtgcggaacgcgtatggaacctgcccttgtcaggggaatagcccagagaaatttggattaatgccccatggtatccatttgccacatggcatatggattaaagatttatcggacaaggatggccatgcgtaccattagtcagatggtgaggtaacggctcaccataactacgatggttaggggccctgagagggggatcccccacactggtactgagacacggaccagactcctacgggaggcagcagtgaggaatattggacaatgggcgggagcctgatccagccatgccgcgtgcaggatgactgccctatgggttgtaaactgcttttatacgggaagaaacccatctacgtgtagatggctgacggtaccgtaagaataaggaccggctaactccgtgccagcagccgcggtaatacggagggtccgagcgttatccggaatcattgggtttaaagggtccgtaggcgggccattaagtcaggggtgaaagtctgcagctcaactgtagaattgcctttgatactggtggtcttgagtcgttgtgaagtggccggaacatgtggtgtagcggtgaaatgcatagatatcacatagaacaccgattgcgaaggcaggtcactaacaacgtactgacgctgatggacgaaagcgtgggtagcgaacgggattagataccccggtagtccacgccgtaaacgatggatactagctgtcgggacctcggtctcggcggccaagcgaaagtgataagtatcccacctggggagtacgttcgcaagaatgaaactcaaaggaattgacgggggcccgcacaagcggtggagcatgtggtttaattcgatgatacgcgaggaaccttaccagggcttaaatgtagtgtgacaggggtagagatacctttttcttcggacacattacaaggtgctgcatggttgtcgtcagctcgtgccgtgaggtgtcaggttaagtcctataacgagcgcaacccctaccgttagttgccagcatgtaaagatggggactctaacgggactgccggtgcaaaccgtgaggaaggtggggacgacgtcaaatcatcacggcccttacgtcctgggccacacacgtgctacaatggccggtacagagggaagccaccacgcaagtgggcgcggatctataaaaccggtcacagttcggatcggggtctgcaactcgaccccgtgaagctggaatcgctagtaatcggatatcagccatgatccggtgaatacgttcccgggccttgtacacaccgcccgtcaagccatggaagccgggagtgcctgaagtccgtcaccgtaaggagcggcctagggcaaaatcggtaactagggctaagtcgtaacaaggtagccgtaccggaaggtgcggctggaacacctccttt

SEQ ID NO: 1113 - DNA, 1526 bp, artificial sequence
  STR00451_Bacteroides_faecis
atgaagagtttgatcctggctcaggatgaacgctagctacaggcttaacacatgcaagtcgaggggcagcattccagtttgcttgcaaactggagatggcgaccggcgcacgggtgagtaacacgtatccaacctgccgataactcggggatagcctttcgaaagaaagattaatacccgatggcataatagaaccgcatggtttgattattaaagaatttcggttatcgatggggatgcgttccattaggcagttggtggggtaacggcccaccaaaccttcgatggataggggttctgagaggaaggtcccccacattggaactgagacacggtccaaactcctacgggaggcagcagtgaggaatattggtcaatggacgagagtctgaaccagccaagtagcgtgaaggatgactgccctatgggttgtaaacttcttttatatgggaataaagtgatccacgtgtggatttttgtatgtaccatatgaataaggatcggctaactccgtgccagcagccgcggtaatacggaggatccgagcgttatccggatttattgggtttaaagggagcgtaggtggacagttaagtcagttgtgaaagtttgcggctcaaccgtaaaattgcagttgatactggctgtcttgagtacagtagaggtgggcggaattcgtggtgtagcggtgaaatgcttagatatcacgaagaactccgattgcgaaggcagctcactggactgcaactgacactgatgctcgaaagtgtgggtatcaaacaggattagataccctggtagtccacacagtaaacgatgaatactcgctgtttgcgatatacagtaagcggccaagcgaaagcattaagtattccacctggggagtacgccggcaacggtgaaactcaaaggaattgacgggggcccgcacaagcggaggaacatgtggtttaattcgatgatacgcgaggaaccttacccgggcttaaattgcatttgaatatattggaaacagtatagccgtaaggcaaatgtgaaggtgctgcatggttgtcgtcagctcgtgccgtgaggtgtcggcttaagtgccataacgagcgcaacccttatctttagttactaacaggtcatgctgaggactctggagagactgccgtcgtaagatgtgaggaaggtggggatgacgtcaaatcagcacggcccttacgtccggggctacacacgtgttacaatggggggtacagaaggccgctacctggtgacaggatgctaatcccaaaagcctctctcagttcggatcgaagtctgcaacccgacttcgtgaagctggattcgctagtaatcgcgcatcagccatggcgcggtgaatacgttcccgggccttgtacacaccgcccgtcaagccatgaaagccgggggtacctgaagtacgtaaccgcaaggagcgtcctagggtaaaactggtaattggggctaagtcgtaacaaggtagccgtaccggaaggtgcggctggaacacctccttt

SEQ ID NO: 1114 - DNA, 1506 bp, artificial sequence
  ERR1022362_05087_Bacteroides_faecis
ctccggttgatcctgccggacccgaccgctatcggggtgggactaagccatgggagtcgtgcgcccccggatgcgggggcgcggcggacggctgagtaacacgtggctaacctaccctcgggacggggataaccccgggaaactggggctaatccccgataggcgagggggcctggaacgggtccctcgccgaaagggcgcgcggagcttccccgcgcgccgcccgaggatggggctgcggcccatcaggtagttggcggggtaacggcccgccaagccgataacgggtaggggccgtgggagcgggaccccccagatgggcactgagacaagggcccaggccctacggggcgcaccaggcgcgaaacctccgcaatgcgggcaaccgtgacggggtcaccccgagtgccgccgataaggcggctgttccccgctgtaagaaggcgggggagtaagcggggggcaagtctggtgtcagccgccgcggtaataccagccccgcgagcggtcgggatgcttactgggcctaaagcgcccgtagccggcccggtaagtccccccctaaagccccgggctcaacccggggagtgggggggatactaccgggctagggggcgggagaggccgagggtactcccggggtaggggcgaaatccgataatcccgggaggaccaccagtggcgaaggcgctcggctggaacgcgcccgacggtgaggggcgaaagccgggggagcaaaccggattagatacccgggtagtcccggctgtaaacgatgcgggctaggtgttgggcgggcttggagcccgcccagtgccgcagggaagccgttaagcccgccgcctggggagtacggccgcaaggctgaaacttaaaggaattggcgggggagcaccacaaggggtggagcctgcggcttaattggagtcaacgccgggaatcttaccgggggcgacagcaggatgacggccaggctgacgaccttgcccgacgcgctgagaggaggtgcatggccgtcgccagctcgtgccgtgaggtgtccggttaagtccggcaacgagcgagacccccacccctagttgctaccccgggggccaccccgggggcacactagggggactgccgccgtccaaggcggaggaaggagggggccacggcaggtcagcatgccccgaatcccccgggctgcacgcgggctacaatggcggggacagcgggatccgaccccgaaagggggaggcaatcccttaaaccccgccgcagttgggatcgagggctgcaactcgccctcgtgaacgcggaatccctagtaaccgcgcgttagcatcgcgcggtgaatacgtccctgctccttgcacacaccgcccgtcgctccacccgagcgggggaggggtgaggccctgcccctgggggcaaccccgggggtggggtcgaacccctcccccgcgaggggggagaagtcgtaacaaggtagccgtaggggaacctgcggctggatcacctcct

SEQ ID NO: 1115 - DNA, 1511 bp, artificial sequence
  ERR1203949_04992_Bacteroides_faecis
attctggttgatcctgccagaggccgctgctatccggctgggactaagccatgcgagtcatggggcgcaggccgctcttgcggtctgcgcaccggcggacggctcagtaacacgtggacaacctaccctcgggagggggataaccccgggaaactggggctaaacccccataggggataggtgctggaatgccctatccccgaaagtgcacggttgccgtaaggcgccgtgcagcccgaggatgggtctgcggcggattaggtagttggcggggtaacggcccgccaagccgaagatccgtacgggccatgagagtgggagcccggagatggcccctgagacacggggccaggccctacggggcgcagcaggcgcgaaacctccgcaatgcgggaaaccgcgacggggtcagccggagtgcccgcgcatcgcgcgggctgtcggggagcctaaacagctccccatagcaagggccgggcaaggccggtggcagccgccgcggtaataccggcggcccgagtggcggccactattattgggcctaaagcgtccgtagccgggctggtaagtcccccgggaaatctggcggcttaaccgtcagactgccgggggatactgccagcctagggaccgggagaggccgggggtattcccggggtaggggtgaaatcctgtaatcccgggaggaccacctgtggcgaaggcgcccggctggaacgggtccgacggtgagggacgaaggccaggggagcgaaccggattagatacccgggtagtcctggctgtaaacgatgcgggctaggtgtcgggcgagccacgagctcgcccggtgccggagggaagccgttaagcccgccgcctggggagtacggccgcaaggctgaaacttaaaggaattggcgggggagcactacaacgggtggagcctgcggtttaattggattcaacgccgggaagcttaccgggggagacagctcgatgaaggtcgggctgaagaccctaccagagtagctgagaggtggtgcatggccgccgtcagttcgtactgtgaagcatcctgttaagtcaggcaacgagcgagacccgcgcccccagttgccagcgggtcccttcggggacgccgggcacactggggggactgccggcgctaagccggaggaaggtgcgggcaacggcaggtccgtatgccccgaatcccccgggctacacgcgggctacaatggccgggacaatgggtaccgaccccgaaaggggtaggtaatcccctaaacccggcctcacctgggatcgagggctgcaactcgccctcgtgaacctggaatccgtagtaatcgcgcctcaaaatggcgcggtgaatacgtccctgctccttgcacacaccgcccgtcaagccacccgagtgggccaggggcgaggcccgctccttaggggcgggtcgagcccagggtccgcgaggggggctaagtcgtaacaaggtagccgtaggggaatctgcggctggatcacctcct

SEQ ID NO: 1116 - DNA, 1479 bp, artificial sequence
  ERR1204043_04989_Bacteroides_faecis
attccggttgatcctgccggaggccactgctatcggggtccgactaagccatgcgagtcaaggggctcccttcggggagcaccggcgcacggctcagtaacacgtggctaacctaccctcgggtgggggataacctcgggaaactgaggctaatcccccataggggaggaggtctggaatgatccctccccgaaaggcgtaagccgcccgaggatggggctgcggcggattaggtagttggtggggtaacggcccaccaagcctacgatccgtacgggccctgagagggggagcccggagatggacactgagacacgggtccaggccctacggggcgcagcaggcgcgaaacctccgcaatgcgcgaaagcgcgacggggggaccccgagtgcccacgccctgcgtgggcttttccggagtgtaaacagctccgggaataagggctgggcaagtccggtgccagcagccgcggtaataccggcggcccaagtggtggccactgttattgggcctaaagcgtccgtagccggcccggtaagtctctgcttaaatcctgcggctcaaccgcagggctggcagagatactgccgggcttgggaccgggagaggccgggggtaccccaggggtagcggtgaaatgcgttgatccctgggggaccacctgtggcgaaggcgcccggctggaacgggtccgacggtgagggacgaaggccaggggagcaaaccggattagatacccgggtagtcctggctgtaaactctgcggactaggtgtcgcgtcggcttcgggccgacgcggtgccgaagggaagccgttaagtccgccgcctggggagtacggtcgcaagactgaaacttaaaggaattggcgggggagcactacaacgggtggagcctgcggtttaattggattcaacgccgggcatcttaccaggggcgacggcaggatgaaggccaggttgacgaccttgccagacgcgccgagaggtggtgcatggccgtcgtcagctcgtaccgtgaggcgtcctgttaagtcaggtaacgagcgagacccgtgccccatgttgctacctcctcctccgggaggagggcactcatgggggaccgccggcgctaagccggaggaaggtgcgggcaacgacaggtccgcatgccccgaatcccctgggctacacgcgggctacaatggccgggacaatgggacgcgaccccgaaagggggagcgaatcccctaaacccggtcgtagtccggatcgagggctgtaactcgccctcgtgaagccggaatccgtagtaatcgcgcctcaccatggcgcggtgaatgcgtccctgctccttgcacacaccgcccgtcacgccacccgagttgagcccaagtgaggccctgtccgcaagggcagggtcgaacttgggttcagcgaggggggcgaagtcgtaacaaggtagccgtaggggaacctgcggctggatcacctcct

SEQ ID NO: 1117 - DNA, 1474 bp, artificial sequence
  ERR2221133_04643_Bacteroides_faecis
ttctgtttgatcctggcagatgctactgctattgggattcgattaagccatgcaagtcgaacgagtttagactcgtggcgtacggctcagtaacacgtggataacctacccttaggactgggataaccctgggaaactggggataatactggataggcaattattcctgtaatggttttttgtttaaatgttttttcgcctaaggatgggtctgcggccgattaggtagttggttaggtaatggcttaccaagcctttgatcggtacgggttgtgagagcaagagcccggagatggaacctgagacaaggttccaggccctacggggtgcagcaggcgcgaaacctccgcaatgtgagaaatcgcgacggggggatcccaagtgccattcttaacgggatggcttttcattagtgtaaagagcttttggaataagagctgggcaagaccggtgccagccgccgcggtaacaccggcagctctagtggtagcagtttttattgggcctaaagcgtccgtagccggtttaataagtctctggtgaaatcctgcagcttaactgtgggaattgctggagatactattagacttgagatcgggagaggttagaggtactcccagggtagaggtgaaattctgtaatcctgggaggaccgcctgttgcgaaggcgtctgactggaacgattctgacggtgagggacgaaagctaggggcgcgaaccggattagatacccgggtagtcctagctgtaaacgatgcggacttggtgttggggtggctttgagctgtcccagtgccgaagggaagctgttaagtccgccgcctgggaagtacggtcgcaagactgaaacttaaaggaattggcgggggagcaccacaacgcgtggagcctgcggtttaattggattcaacgccggacatctcaccagaggcgacagctgtatgatagccaggttgatgactttgcttgactagctgagaggaggtgcatggccgccgtcagctcgtaccgtgaggcgtcctgttaagtcaggcaacgagcgagacccacgcccttagttaccagcggatcctttttggatgccgggcacactaaggggaccgcctatgataaataggaggaaggagtggacgacggtaggtccgtatgccccgaatcctctgggcaacacgcgggctacaatggctgagacaatgggttccgacgccgaaaggcggaggtaatcctctaaacttagtcgtagttcggattgaggactgtaactcgttctcatgaagctggaatgcgtagtaatcgcgtgtcacaatcgcgcggtgaatacgtccctgctccttgcacacaccgcccgtcacgccacccaaaaagggattggatgaggatgtaatgtttggttatattcgaatctagtttttttaaggagggcgaagtcgtaacaaggtagccgtaggggaacctgcggctggatcacctcct

SEQ ID NO: 1118 - DNA, 1482 bp, artificial sequence
  GCF_000226135.1_00537_Bacteroides_faecis
cttgagagtttgatcctggctcagaacgaacgctggcggcaggcttaacacatgcaagtcgaacgccccgcaaggggagtggcagacgggtgagtaacgcgtgggaacataccctttcctgcggaatagctccgggaaactggaattaataccgcatacgccctacgggggaaagatttatcggggaaggattggcccgcgttggattagctagttggtggggtaaaggcctaccaaggcgacgatccatagctggtctgagaggatgatcagccacattgggactgagacacggcccaaactcctacgggaggcagcagtggggaatattggacaatgggcgcaagcctgatccagccatgccgcgtgagtgatgaaggccttagggttgtaaagctctttcaccggagaagataatgacggtatccggagaagaagccccggctaacttcgtgccagcagccgcggtaatacgaagggggctagcgttgttcggaattactgggcgtaaagcgcacgtaggcggatatttaagtcaggggtgaaatcccagagctcaactctggaactgcctttgatactgggtatcttgagtatggaagaggtaagtggaattccgagtgtagaggtgaaattcgtagatattcggaggaacaccagtggcgaaggcggcttactggtccattactgacgctgaggtgcgaaagcgtggggagcaaacaggattagataccctggtagtccacgccgtaaacgatgaatgttagccgtcgggcagtatactgttcggtggcgcagctaacgcattaaacattccgcctggggagtacggtcgcaagattaaaactcaaaggaattgacgggggcccgcacaagcggtggagcatgtggtttaattcgaagcaacgcgcagaaccttaccagctcttgacattcggggtttgggcagtggagacattgtccttcagttaggctggccccagaacaggtgctgcatggctgtcgtcagctcgtgtcgtgagatgttgggttaagtcccgcaacgagcgcaaccctcgcccttagttgccagcatttagttgggcactctaaggggactgccggtgataagccgagaggaaggtggggatgacgtcaagtcctcatggcccttacgggctgggctacacacgtgctacaatggtggtgacagtgggcagcgagacagcgatgtcgagctaatctccaaaagccatctcagttcggattgcactctgcaactcgagtgcatgaagttggaatcgctagtaatcgcagatcagcatgctgcggtgaatacgttcccgggccttgtacacaccgcccgtcacaccatgggagttggttttacccgaaggtagtgcgctaaccgcaaggaggcagctaaccacggtagggtcagcgactggggtgaagtcgtaacaaggtagccgtaggggaacctgcggctggatcacctccttt

SEQ ID NO: 1119 - DNA, 1552 bp, artificial sequence
  GCF_001405095.1_00891_Bacteroides_faecis
ctggagagtttgatcctggctcagaacgaacgctggcggcgtgcttaacacatgcaagtcgaacgtgaaggggacttcggtccctggaaagtggcgcacgggtgagtaacacgtggataatctagccgatggaccgggataacatctcgaaaggggtgctaataccggataagcccacgatctcttcggaggacgcgggaaaaggtggggaccttcgggcctactgtcatcggatgagtccgcggcccattagctagttggtagggtaatggcctaccaaggctacgatgggtagctggtctgagaggatgatcagccacactggaactgagacacggtccagactcctacgggaggcagcagtggggaattttgcgcaatgggcgaaagcctgacgcagcaacgccgcgtgagtgatgaaggccctcgggtcgtaaagctctgtcagaggggaagaaccacctgtcgggtaatatccggcaggcctgacggtaccctcaaaggaagcaccggctaactccgtgccagcagccgcggtaatacggagggtgcaagcgttgttcggaattattgggcgtaaagcgcgtgtaggcggctgtttaagtctgatgtgaaagcccggggctcaaccccggaagtgcattggaaactggacagcttgagtacgggagagggtagtggaatttcgagtgtaggggtgaaatccgtagatattcgaaggaacaccggtggcgaaggcggctacctggaccgatactgacgctgagacgcgaaagcgtggggagcaaacaggattagataccctggtagtccacgccgtaaacgatgggtactaggtgtcgcgggtattgacccctgcggtgccgaagctaacgcattaagtaccccgcctggggagtacggccgcaaggctaaaactcaaaggaattgacgggggcccgcacaagcggtggagcatgtggtttaattcgacgcaacgcgaagaaccttacctgggtttgacatcccgatcgtaccttctggaaacagttgggtcagttcggctggatcggtgacaggtgctgcatggctgtcgtcagctcgtgtcgtgagatgttgggttaagtcccgcaacgagcgcaaccctcgtccttagttgccatcattcagttgggcactctaaggagactgccggtgttaaaccggaggaaggcggggatgacgtcaagtcctcatggcccttatgtccagggctacacacgtgctacaatggccggtacaaagggtagcaagaccgcgaggtggagcaaatcccaaaaagccggtctcagttcggattggagtctgcaactcgactccatgaagttggaatcgctagtaatcgcggatcagcatgccgcggtgaatacgttcccgggccttgtacacaccgcccgtcacaccacgggagtcgattgtacctgaaatcggtgggctaaccttcgggaggcagccgcttatggtatggtcggtaactggggtgaagtcgtaacaaggtagccgtaggggaacctgcggctggatcacctccttt

SEQ ID NO: 1120 - DNA, 1509 bp, artificial sequence
  GCF_001811315.1_04320_Bacteroides_faecis
atggagagtttgatcctggctcagagtgaacgctggcggcgtgcctaatacatgcaagtcgaacgatgaagcttttagcttgctagaagtggattagtggcgcacgggtgagtaaggtatagttaatctgccctacacaagaggacaacagttggaaacgactgctaatactctatactcctgcttaacacaagttgagtagggaaagtttttcggtgtaggatgagactatatagtatcagctagttggtaaggtaatggcttaccaaggctatgacgcttaactggtctgagaggatgatcagtcacactggaactgagacacggtccagactcctacgggaggcagcagtagggaatattgcgcaatgggggaaaccctgacgcagcaacgccgcgtggaggatgacacttttcggagcgtaaactccttttcttagggaagaattctgacggtacctaaggaataagcaccggctaactccgtgccagcagccgcggtaatacggagggtgcaagcgttactcggaatcactgggcgtaaagggcgcgtaggcggattatcaagtctcttgtgaaatctaatggcttaaccattaaactgcttgggaaactgatagtctagagtgagggagaggcagatggaattggtggtgtaggggtaaaatccgtagatatcaccaagaatacccattgcgaaggcgatctgctggaactcaactgacgctaaggcgcgaaagcgtggggagcaaacaggattagataccctggtagtccacgccctaaacgatgtacactagttgttgggatgctagtcatctcagtaatgcagctaacgcattaagtgtaccgcctggggagtacggtcgcaagattaaaactcaaaggaatagacggggacccgcacaagcggtggagcatgtggtttaattcgaagatacgcgaagaaccttacctgggcttgatatcctaagaaccttatagagatatgagggtgctagcttgctagaacttagagacaggtgctgcacggctgtcgtcagctcgtgtcgtgagatgttgggttaagtcccgcaacgagcgcaacccacgtatttagttgctaacggttcggccgagcactctaaatagactgccttcgtaaggaggaggaaggtgtggacgacgtcaagtcatcatggcccttatgcccagggcgacacacgtgctacaatggcatatacaatgagacgcaataccgcgaggtggagcaaatctataaaatatgtcccagttcggattgttctctgcaactcgagagcatgaagccggaatcgctagtaatcgtagatcagccatgctacggtgaatacgttcccgggtcttgtactcaccgcccgtcacaccatgggagttgatttcactcgaagccggaatactaaactagttaccgtccacagtggaatcagcgactggggtgaagtcgtaacaaggtaaccgtaggagaacctgcggttggatcacctcctt

SEQ ID NO: 1121 - DNA, 1510 bp, artificial sequence
  GCF_001811695.1_00388_Bacteroides_faecis
tatggagagtttgatcctggctcagagtgaacgctggcggcgtgcctaatacatgcaagtcgaacgatgaagcttctagcttgctagaagtggattagtggcgcacgggtgagtaaggtatagttaatctgccctacacaagaggacaacagttggaaacgactgctaatactctatactcctgcttaacacaagttgagtagggaaagtttttcggtgtaggatgagactatatagtatcagctagttggtaaggtaatggcttaccaaggctatgacgcttaactggtctgagaggatgatcagtcacactggaactgagacacggtccagactcctacgggaggcagcagtagggaatattgcgcaatgggggaaaccctgacgcagcaacgccgcgtggaggatgacacttttcggagcgtaaactccttttcttggggaagaattctgacggtacctaaggaataagcaccggctaactccgtgccagcagccgcggtaatacggagggtgcaagcgttactcggaatcactgggcgtaaagggcgcgtaggcggattatcaagtctcttgtgaaatctaatggcttaaccattaaactgcttgggaaactgatagtctagagtgagggagaggcagatggaattggtggtgtaggggtaaaatccgtagatatcaccaagaatacccattgcgaaggcgatctgctggaactcaactgacgctaaggcgcgaaagcgtggggagcaaacaggattagataccctggtagtccacgccctaaacgatgtacactagttgttgggatgctagtcatctcagtaatgcagctaacgcattaagtgtaccgcctggggagtacggtcgcaagattaaaactcaaaggaatagacggggacccgcacaagcggtggagcatgtggtttaattcgaagatacgcgaagaaccttacctgggcttgatatcctaagaaccttatagagatatgagggtgctagcttgctagaacttagagacaggtgctgcacggctgtcgtcagctcgtgtcgtgagatgttgggttaagtcccgcaacgagcgcaacccacgtatttagttgctaacggttcggccgagcactctaaatagactgccttcgtaaggaggaggaaggtgtggacgacgtcaagtcatcatggcccttatgcccagggcgacacacgtgctacaatggcatatacaatgagacgcaataccgcgaggtggagcaaatctataaaatatgtcccagttcggattgttctctgcaactcgagagcatgaagccggaatcgctagtaatcgtagatcagccatgctacggtgaatacgttcccgggtcttgtactcaccgcccgtcacaccatgggagttgatttcactcgaagccggaatactaaactagttaccgtccacagtggaatcagcgactggggtgaagtcgtaacaaggtaaccgtaggagaacctgcggttggatcacctcctt

SEQ ID NO: 1122 - DNA, 1517 bp, artificial sequence
  GCF_003121505.1_01270_Bacteroides_faecis
ttggagagtttgatcctggctcaggacgaacgctggcggcgtgcttaacacatgcaagtcgaacggaaaggtctcttcggagatactcgagtggcgaacgggtgagtaacacgtgggcaatctgccctgcacttcgggataagcctgggaaactgggtctaataccggataggaccacttgacgcatgtcttgtggtggaaagctttttgcggtgtgggatgggcccgcggcctatcagcttgttggtggggtgacggcctaccaaggcgacgacgggtagccggcctgagagggtgtccggccacactgggactgagatacggcccagactcctacgggaggcagcagtggggaatattgcacaatgggcgcaagcctgatgcagcgacgccgcgtgggggatgacggccttcgggttgtaaacctctttcagcagggacgaagcgcaagtgacggtacctgcagaagaagcaccggccaactacgtgccagcagccgcggtaatacgtagggtgcgagcgttgtccggaattactgggcgtaaagagctcgtaggtggtttgtcgcgttgttcgtgaaaaccgggggcttaaccctcggcgtgcgggcgatacgggcagactggagtactgcaggggagactggaattcctggtgtagcggtggaatgcgcagatatcaggaggaacaccggtggcgaaggcgggtctctgggcagtaactgacgctgaggagcgaaagcgtggggagcgaacaggattagataccctggtagtccacgccgtaaacggtgggtactaggtgtgggtttccttccttgggatccgtgccgtagctaacgcattaagtaccccgcctggggagtacggccgcaaggctaaaactcaaaggaattgacgggggcccgcacaagcggcggagcatgtggattaattcgatgcaacgcgaagaaccttacctgggtttgacatgcacaggacgccggcagagatgtcggttcccttgtggcctgtgtgcaggtggtgcatggctgtcgtcagctcgtgtcgtgagatgttgggttaagtcccgcaacgagcgcaacccttgtctcatgttgccagcgggtaatgccggggactcgtgagagactgccggggtcaactcggaggaaggtggggatgacgtcaagtcatcatgccccttatgtccagggcttcacacatgctacaatggccggtacaaagggctgcgatgccgcaaggttaagcgaatccttttaaagccggtctcagttcggatcggggtctgcaactcgaccccgtgaagtcggagtcgctagtaatcgcagatcagcaacgctgcggtgaatacgttcccgggccttgtacacaccgcccgtcacgtcatgaaagtcggtaacacccgaagccagtggcctaaccttttggagggagctgtcgaaggtgggatcggcgattgggacgaagtcgtaacaaggtagccgtaccggaaggtgcggctggatcacctccttt

SEQ ID NO: 1123 - DNA, 1506 bp, artificial sequence
  GCF_003439395.1_04542_Bacteroides_faecis
ttggagagtttgatcctggctcaggatgaacgctggcagtgtgcctaagacatgcaagtcgaacggaggttttagagcttgctctaaggccttagtggcgaacgggtgagtaacacgtgggtgacctacccccaagtgcggcataacttcgggaaaccggagctaattccgcatgtgcctgtagcttgtgggttacaggtaaagattgtatcgcttggggatgggcccgcggcgcatcagctagttggtagggtaacggcctaccaaggcgacgacgcgtagccgacctgagagggtgaccggccacaggggcactgagacacgggccccactcctacgggaggcagcagttaggaatcttccgcaatgggcgcaagcctgacggagcgacactgcttgaaggatgaaggtcttcggatcgtaaacttctgaacctgcgacgatcgtgacggtagcaggctaatagcaccggctaactccgtgccagcagccgcggtaatacggagggtgcgagcgttatccggaatcactgggcgtaaagggcgcgtaggcggtttgttaagtccgatgttaaagcgtggggctcaaccccatcacggcgttggatactggcgagctagacggttggagaggaaggtagaattaccagtgtagcggtggaatgcgtagatactggtaggaatacccatagcgaaggcagccttctggacaacacgtgacgctgaggcgcgaaagcgtggggagcaaaccggattagatacccgggtagtccacgccctaaacgatgcatacttggtgtcggcccgttggggtcggtgccggagctaacgcgttaagtatgccgcctgggaagtacggccgcaaggttgaaactcaaaggaattgacggggacccgcacaagcggtggagcatgtggtttaattcgaagcaacgcgaagaaccttaccaggtcttgacatccacggaaccctctagagataggggggtgcccttcggggagccgtgagacaggtgctgcatggctgtcgtcagctcgtgtcgtgagatgttgggttaagtcccgcaacgagcgcaacccttgcctctagttaccagcacttcgggtgggaactctagagggactgcctgtgaaagcaggaggaaggcggggatgacgtctagtcagcatggtccttacgacctgggctacacacgtgctacaatggccggtataacgcgacgctaacccgcgagggcacgccaatcgctcaaagccggtcccagttcagattgcagtctgcaactcgactgcatgaagttggaatcgctagtaatcgcggatcagccatgccgcggtgaatacgttcccgggtcttgtacacaccgcccgtcaaaccatgggagtaagttgcacccgaagacgcaacgccccgctaatggggtttgtgtttaaggtgtggcttatgactggggttaagtcgtaacaaggtagctgtaccggaaggtgcggctggatcacctccttt

SEQ ID NO: 1124 - DNA, 1523 bp, artificial sequence; identical to SEQ ID NO: 1105
  GCF_003460025.1_04552_Bacteroides_faecis

SEQ ID NO: 1125 - DNA, 1525 bp, artificial sequence
  GCF_004167845.1_05084_Bacteroides_faecis
tgaagagtttgatcctggctcagattgaacgctggcggcatgctttacacatgcaagtcgaacggcagcgcggggcaacctggcggcgagtggcgaacgggtgagtaatatatcggaacgtacccaagagtgggggataacgtagcgaaagttacgctaataccgcatacgatctacggatgaaagtgggggaccttcgggcctcatgctcctggagcggccgatatctgattagctagttggtgaggtaaaggctcaccaaggcgacgatcagtagctggtctgagaggacgaccagccacactgggactgagacacggcccagactcctacgggaggcagcagtggggaattttggacaatgggcgcaagcctgatccagcaatgccgcgtgagtgaagaaggccttcgggttgtaaagctcttttgtcagggaagaaacggggttggctaatatccgactctaatgacggtacctgaagaataagcaccggctaactacgtgccagcagccgcggtaatacgtagggtgcaagcgttaatcggaattactgggcgtaaagcgtgcgcaggcggttttgtaagtctgacgtgaaatccccgggcttaacctgggaattgcgttggagactgcaaggctggagtctggcagaggggggtagaattccacgtgtagcagtgaaatgcgtagagatgtggaggaacaccgatggcgaaggcagccccctgggtcaagactgacgctcatgcacgaaagcgtggggagcaaacaggattagataccctggtagtccacgccctaaacgatgtctactagttgtcgggtcttaattgacttggtaacgcagctaacgcgtgaagtagaccgcctggggagtacggtcgcaagattaaaactcaaaggaattgacggggacccgcacaagcggtggatgatgtggattaattcgatgcaacgcgaaaaaccttacctacccttgacatgtcaggaacctccgagagattggagggtgcccgaaagggagcctgaacacaggtgctgcatggctgtcgtcagctcgtgtcgtgagatgttgggttaagtcccgcaacgagcgcaacccttgtcattagttgctacgaaagggcactctaatgagactgccggtgacaaaccggaggaaggtggggatgacgtcaagtcctcatggcccttatgggtagggcttcacacgtcatacaatggtacatacagagggccgccaacccgcgagggggagctaatcccagaaagtgtatcgtagtccggatcgcagtctgcaactcgactgcgtgaagttggaatcgctagtaatcgcggatcagcatgccgcggtgaatacgttcccgggtcttgtacacaccgcccgtcacaccatgggagcgggttttaccagaagtaggtagcttaaccgcaaggagggcgcttaccacggtaggattcgtgactggggtgaagtcgtaacaaggtagccgtatcggaaggtgcggctggatcacctccttt

SEQ ID NO: 1126 - DNA, 1518 bp, artificial sequence
  GCF_005844775.1_00431_Bacteroides_faecis
tacggagagtttgatcctggctcaggacgaacgctggcggcgtgcttaacacatgcaagtcgaacgatgaactggagcttgctccaggaattagtggcgaacgggtgagtaacacgtgagtaacctgcccttgactctgggataagcgctagaaatggcgtctaataccggatacgagcttcagccgcatggctaggagttggaaagaattttggtcaaggatggactcgcggcctatcagctagttggtgaggtaatggctcaccaaggcgacgacgggtagccggcctgagagggtgaccggccacactgggactgagacacggcccagactcctacgggaggcagcagtggggaatattgcacaatgggcgaaagcctgatgcagcaacgccgcgtgagggatgacggccttcgggttgtaaacctcttttagtagggaagaagcgaaagtgacggtacctgcagaaaaagcaccggctaactacgtgccagcagccgcggtaatacgtagggtgcaagcgttgtccggaattattgggcgtaaagagctcgtaggcggtttgtcgcgtctgctgtgaaatctgggggctcaacccccagcctgcagtgggtacgggcagactagagtgcggtaggggagattggaattcctggtgtagcggtggaatgcgcagatatcaggaggaacaccgatggcgaaggcagatctctgggccgtaactgacgctgaggagcgaaagcatggggagcgaacaggattagataccctggtagtccatgccgtaaacgttgggaactagatgtgggggccattccacggtctccgtgtcgcagctaacgcattaagttccccgcctggggagtacggccgcaaggctaaaactcaaaggaattgacgggggcccgcacaagcggcggagcatgcggattaattcgatgcaacgcgaagaaccttaccaaggcttgacatataccggaaacgtccagagatggtcgccccgcaaggtcggtatacaggtggtgcatggttgtcgtcagctcgtgtcgtgagatgttgggttaagtcccgcaacgagcgcaaccctcgttctatgttgccagcacgttatggtgggaactcataggagactgccggggtcaactcggaggaaggtggggatgacgtcaaatcatcatgccccttatgtcttgggcttcacgcatgctacaatggccggtacaaagggctgcgataccgtaaggtggagcgaatcccaaaaagccggtctcagttcggattgaggtctgcaactcgacctcatgaagtcggagtcgctagtaatcgcagatcagcaacgctgcggtgaatacgttcccgggccttgtacacaccgcccgtcaagtcatgaaagtcggtaacacccgaagccagtggcctaacccttgtggatggagctgtcgaaggtgggatcggtgattaggactaagtcgtaacaaggtagccgtaccggaaggtgcggctggatcacctccttt

SEQ ID NO: 1127 - DNA, 1567 bp, artificial sequence
  GCF_900106755.1_02379_Bacteroides_faecis
tatgagagtttgatcctggctcaggatgaacgctggcggcgtgcctaatacatgcaagtcgaacgagttttggtcgatgaacggtgcttgcactgagattcgacttaaaacgagtggcggacgggtgagtaacacgtgggtaacctgcccttaagtgggggataacatttggaaacagatgctaataccgcataaatccaagaaccgcatggttcttggctgaaagatggcgcaagctatcgcttttggatggacccgcggcgtattagctagttggtgaggtaacggctcaccaaggcgatgatacgtagccgaactgagaggttgatcggccacattgggactgagacacggcccaaactcctacgggaggcagcagtagggaatcttccacaatggacgcaagtctgatggagcaacgccgcgtgagtgaagaaggctttcgggtcgtaaaactctgttgttggagaagaatggtcggcagagtaactgttgtcggcgtgacggtatccaaccagaaagccacggctaactacgtgccagcagccgcggtaatacgtaggtggcaagcgttatccggatttattgggcgtaaagcgagcgcaggcggttttttaagtctgatgtgaaagccctcggcttaaccgaggaagcgcatcggaaactgggaaacttgagtgcagaagaggacagtggaactccatgtgtagcggtgaaatgcgtagatatatggaagaacaccagtggcgaaggcggctgtctggtctgtaactgacgctgaggctcgaaagcatgggtagcgaacaggattagataccctggtagtccatgccgtaaacgatgaatgctaggtgttggagggtttccgcccttcagtgccgcagctaacgcattaagcattccgcctggggagtacgaccgcaaggttgaaactcaaaggaattgacgggggcccgcacaagcggtggagcatgtggtttaattcgaagcaacgcgaagaaccttaccaggtcttgacatcttttgatcacctgagagatcaggtttccccttcgggggcaaaatgacaggtggtgcatggttgtcgtcagctcgtgtcgtgagatgttgggttaagtcccgcaacgagcgcaacccttatgactagttgccagcattgagttgggcactctagtaagactgccggtgacaaaccggaggaaggtggggatgacgtcaaatcatcatgccccttatgacctgggctacacacgtgctacaatggatggtacaacgagttgcgagaccgcgaggtcaagctaatctcttaaagccattctcagttcggactgtaggctgcaactcgcctacacgaagtcggaatcgctagtaatcgcggatcagcacgccgcggtgaatacgttcccgggccttgtacacaccgcccgtcacaccatgagagtttgtaacacccgaagccggtggcgtaacccttttagggagcgagccgtctaaggtgggacaaatgattagggtgaagtcgtaacaaggtagccgtaggagaacctgcggctggatcacctccttt

SEQ ID NO: 1128 - DNA, 1485 bp, artificial sequence
  GCF_000374365.1_04287_Bacteroides_gallinarum
atggagagtttgatcctggctcaggatgaacgctggcggcgtgcctaacacatgcaagtcgaacgggaatcttcggattctagtggcggacgggtgagtaacgcgtaagaatctaacttcaggacggggacaacagttggaaacgactgctaatacccgatgtgccgaaaggtgaaacctaattggcctgaagaagagcttgcgtctgattagctagttggtggggtaagagcctaccaaggcgacgatcagtagctggtctgagaggatgagcagccacactgggactgagacacggcccagactcctacgggaggcagcagtggggaattttccgcaatgggcgaaagcctgacggagcaacgccgcgtgagggaggaaggtctttggattgtaaacctcttttctcaaggaagaagttctgacggtacttgaggaatcagcctcggctaactccgtgccagcagccgcggtaatacgggggaggcaagcgttatccggaattattgggcgtaaagcgtccgcaggtggtcagccaagtctgccgtcaaatcaggttgcttaacgacctaaaggcggtggaaactggcagactagagagcagtaggggtagcaggaattcccagtgtagcggtgaaatgcgtagagattgggaagaacatcggtggcgaaagcgtgctactgggctgtatctgacactcagggacgaaagctaggggagcgaaagggattagatacccctgtagtcctagccgtaaacgatggatactaggcgtggcttgtatcgacccgagccgtgccgaagctaacgcgttaagtatcccgcctggggagtacgcacgcaagtgtgaaactcaaaggaattgacgggggcccgcacaagcggtggagtatgtggtttaattcgatgcaacgcgaagaaccttaccaagacttgacatgtcgcgaaccctggtgaaagctgggggtgccttcgggagcgcgaacacaggtggtgcatggctgtcgtcagctcgtgtcgtgagatgttgggttaagtcccgcaacgagcgcaaccctcgttcttagttgccagcattaagttggggactctaaggagactgccggtgacaaaccggaggaaggtggggatgacgtcaagtcagcatgccccttacgtcttgggcgacacacgtactacaatggtcgggacaaagggcagcgaactcgcgagagccagcgaatcccagcaaacccggcctcagttcagattgcaggctgcaactcgcctgcatgaaggaggaatcgctagtaatcgccggtcagcatacggcggtgaattcgttcccgggccttgtacacaccgcccgtcacaccatggaagctggtcacgcccgaagtcattacctcaaccgcaaggagggggatgcctaaggcagggctagtgactggggtgaagtcgtaacaaggtagccgtaccggaaggtgtggctggatcacctcctt

SEQ ID NO: 1129 - DNA, 1526 bp, artificial sequence
  GCF_000613665.1_00065_Bacteroides_gallinarum
atggagagtttgatcctggctcaggatgaacgctagcggcaggcctaatacatgcaagtcggacgggatccatcggagagcttgctcgaagatggtgagagtggcgcacgggtgcgtaacgcgtgagcaacctacctctatcagggggatagcctctcgaaagagagattaacaccgcataatatcaacagttcgcatgttcggttgattaaatatttataggatagagatgggctcgcgtgacattagctagttggtagggtaacggcctaccaaggcgacgatgtctaggggctctgagaggagaatcccccacactggtactgagacacggaccagactcctacgggaggcagcagtaaggaatattggtcaatgggcggaagcctgaaccagccatgccgcgtgcaggatgactgccctatgggttgtaaactgcttttgtccaggaataaacctaaatacgtgtatttagctgaatgtactggaagaataaggatcggctaactccgtgccagcagccgcggtaatacggaggatccgagcgttatccggatttattgggtttaaagggtgcgtaggcggcctattaagtcaggggtgaaatacggtggctcaaccatcgcagtgcctttgatactgatgggcttgaatccatttgaagtgggcggaataagacaagtagcggtgaaatgcatagatatgtcttagaactccgattgcgaaggcagctcactaagctggtattgacgctgatgcacgaaagcgtggggatcgaacaggattagataccctggtagtccacgccctaaacgatgataactcgatgttggcgatagacagccagcgtcccagcgaaagcgttaagttatccacctggggagtacgcccgcaagggtgaaactcaaaggaattgacgggggcccgcacaagcggaggagcatgtggtttaattcgatgatacgcgaggaaccttacccgggcttgaaagttagtgaagagtgcagagacgcactcgtccttcgggacacgaaactaggtgctgcatggctgtcgtcagctcgtgccgtgaggtgttgggttaagtcccgcaacgagcgcaacccctatgtttagttgccagcatttaaggtggggactctaaacagactgcctgtgcaaacagagaggaaggtggggacgacgtcaagtcatcatggcccttacgtccggggctacacacgtgctacaatggatggtacagcgggcagctacatagcaatatgatgctaatctctaaaagccattcacagttcggattggggtctgcaactcgaccccatgaagttggattcgctagtaatcgcgtatcagcaatgacgcggtgaatacgttcccgggccttgtacacaccgcccgtcaagccatgaaagttgggggtacctaaagcatgttaccgcaaggagcgtgttagggtaaaaccgataattggggctaagtcgtaacaaggtagccgtaccggaaggtgcggctggaatacctccttt

SEQ ID NO: 1130 - DNA, 1549 bp, artificial sequence
  GCF_000382445.1_02425_Bacteroides_massiliensis
tatggagagtttgatcctggctcaggatgaacgctggcggcgtgcctaatacatgcaagtcgagcgaacggacgagaagcttgcttctctgatgttagcggcggacgggtgagtaacacgtggataacctacctataagactgggataacttcgggaaaccggagctaataccggataatattttgaaccgcatggttcaaaagtgaaagacggtcttgctgtcacttatagatggatccgcgctgcattagctagttggtaaggtaacggcttaccaaggcaacgatgcatagccgacctgagagggtgatcggccacactggaactgagacacggtccagactcctacgggaggcagcagtagggaatcttccgcaatgggcgaaagcctgacggagcaacgccgcgtgagtgatgaaggtcttcggatcgtaaaactctgttattagggaagaacatatgtgtaagtaactgtgcacatcttgacggtacctaatcagaaagccacggctaactacgtgccagcagccgcggtaatacgtaggtggcaagcgttatccggaattattgggcgtaaagcgcgcgtaggcggttttttaagtctgatgtgaaagcccacggctcaaccgtggagggtcattggaaactggaaaacttgagtgcagaagaggaaagtggaattccatgtgtagcggtgaaatgcgcagagatatggaggaacaccagtggcgaaggcgactttctggtctgtaactgacgctgatgtgcgaaagcgtggggatcaaacaggattagataccctggtagtccacgccgtaaacgatgagtgctaagtgttagggggtttccgccccttagtgctgcagctaacgcattaagcactccgcctggggagtacgaccgcaaggttgaaactcaaaggaattgacggggacccgcacaagcggtggagcatgtggtttaattcgaagcaacgcgaagaaccttaccaaatcttgacatcctttgacaactctagagatagagccttccccttcgggggacaaagtgacaggtggtgcatggttgtcgtcagctcgtgtcgtgagatgttgggttaagtcccgcaacgagcgcaacccttaagcttagttgccatcattaagttgggcactctaagttgactgccggtgacaaaccggaggaaggtggggatgacgtcaaatcatcatgccccttatgatttgggctacacacgtgctacaatggacaatacaaagggcagcgaaaccgcgaggtcaagcaaatcccataaagttgttctcagttcggattgtagtctgcaactcgactacatgaagctggaatcgctagtaatcgtagatcagcatgctacggtgaatacgttcccgggtcttgtacacaccgcccgtcacaccacgagagtttgtaacacccgaagccggtggagtaaccttttaggagctagccgtcgaaggtgggacaaatgattggggtgaagtcgtaacaaggtagccgtatcggaaggtgcggctggatcacctcctt

SEQ ID NO: 1131 - DNA, 1519 bp, artificial sequence
  GCF_000382445.1_03155_Bacteroides_massiliensis
acggagagtttgatcctggctcaggacgaacgctggcggcgtgcttaacacatgcaagtcgaacgatgaagcaccagcttgctggtgtggattagtggcgaacgggtgagtaacacgtgagtaacctgcccctcactctgggataagcctgggaaactgggtctaatactggatacgaccgatctccgcatggagtgttggtggaaagtttttgtggtgggggatggactcgcggcctatcagcttgttggtggggtaatggcctaccaaggcgacgacgggtagccggcctgagagggcgaccggccacactgggactgagacacggcccagactcctacgggaggcagcagtggggaatattgcacaatgggcgaaagcctgatgcagcgacgccgcgtgagggatgacggccttcgggttgtaaacctctttcaccagggacgaagctaacgtgacggtacctggagaagaagcaccggctaactacgtgccagcagccgcggtaatacgtagggtgcgagcgttgtccggaattattgggcgtaaagagcttgtaggcggtttgtcgcgtctgctgtgaaagaccggggcttaactccggttctgcagtgggtacgggcagactagagtgtggtaggggagactggaattcctggtgtagcggtgaaatgcgcagatatcaggaggaacaccgatggcgaaggcaggtctctgggccattactgacgctgagaagcgaaagcatggggagcgaacaggattagataccctggtagtccatgccgtaaacgttgggcgctaggtgtgggactcattccacgagttccgtgccgcagctaacgcattaagcgccccgcctggggagtacggccgcaaggctaaaactcaaaggaattgacgggggcccgcacaagcggcggagcatgcggattaattcgatgcaacgcgaagaaccttaccaaggcttgacatacaccggaatcatgcagagatgtgtgcgtcttcggactggtgtacaggtggtgcatggttgtcgtcagctcgtgtcgtgagatgttgggttaagtcccgcaacgagcgcaaccctcgttccatgttgccagcacttcgggtggggactcatgggagactgccggggtcaactcggaggaaggtggggatgacgtcaaatcatcatgccccttatgtcttgggcttcacgcatgctacaatggccggtacagagggttgcgaaaccgtgaggtggagctaatcccaaaaaaccggtctcagttcggattggggtctgcaactcgaccccatgaagtcggagtcgctagtaatcgcagatcagcaacgctgcggtgaatacgttcccgggccttgtacacaccgcccgtcaagtcacgaaagtcggtaacacccgaagccggtggcctaacccttgtggggggagccgtcgaaggtgggactggcgattgggactaagtcgtaacaaggtagccgtaccggaaggtgcggctggatcacctccttt

SEQ ID NO: 1132 - DNA, 1539 bp, artificial sequence
  GCF_000613545.1_00147_Bacteroides_massiliensis
tgaagagtttgatcctggctcagaatgaacgctggcggcaggcttaacacatgcaagtcgaacggtaacaggagaaagcttgctttcttgctgacgagtggcggacgggtgagtaatgtatgggaatctgccctctagttggggacaacatatggaaacgtatgctaataccgaatgtgatctacggattaaaggtgccctctccttggaaggtatcgctagaggatgagcccatattagattagctagttggtagggtaaaggcctaccaaggcgacgatctatagctggtttgagaggatgatcagccacactgggactgagacacggcccagactcctacgggaggcagcagtggggaatattgcacaatgagggaaaccttgatgcagccatgccgcgtgtgtgaagaaggcctgagggttgtaaagcactttcaattgtgaggaaagctaagtagttaatacctgcttagtgtgacgttaactttagaagaagcaccggctaactctgtgccagcagccgcggtaatacagagggtgcaagcgttattcggaattactgggcgtaaagcgcgcgtaggcggactgttaagtcggttgtgaaagccctgggctcaacctaggaattgcatccgatactggcaatctagagtttaagagagggaaggggaattccaggtgtagcagtgaaatgcgtagatatctggaggaacatcagtggcgaaggcgccttcctggcttaaaactgacgctgaggtgcgaaagcgtgggtagcgaacgggattagataccccggtagtccacgccgtaaacgatgtcaactagctgttggccttattaaaaaggttagtagcgcagctaacgcgataagttgaccgcctggggagtacggtcgcaagattaaaactcaaaggaattgacgggggcccgcacaagcggtggagcatgtggtttaattcgatgcaacgcgaagaaccttaccatcccttgacatcctgcgaactttctagagatagattggtgccttcgggaacgcagtgacaggtgctgcatggctgtcgtcagctcgtgtcgtgagatgttgggttaagtcccgcaacgagcgcaacccttatctttagttgctaccatttagttgagaactctaaagagactgccggtgataaaccggaggaaggcggggacgacgtcaagtcatcatggcccttatgggatgggctacacacgtgctacaatggggggtacaaagagcagctagctggcgacagtgcgcgaatctcataaaacccttcgtagtccggattggagtctgcaactcgactccatgaagtcggaatcgctagtaatcgtgaatcagaatgtcacggtgaatacgttcccgggccttgtacacaccgcccgtcacaccatgggagtgggttgcaaaagaagtaggtagtctaaccttcgggagggcgcttaccactttgtgattcatgactggggtgaagtcgtaacaaggtagccgtaggggaacctgcggctggatcacctcctt

SEQ ID NO: 1133 - DNA, 1518 bp, artificial sequence
  GCF_003435685.1_02692_Bacteroides_massiliensis
gtggagggtttgattctggctcaggatgaacgctggcggcgtgcttaacacatgcaagtcgaacgggatccatcaagcttgcttgatggtgagagtggcgaacgggtgagtaatgcgtgactaacctgcctcatacaccggaatagctcctggaaacgggtggtaatgccggatgctccaacatttcacatgtttgttgggaaagcgttagcggtatgagatggggtcgcgtcctatcagcttgttggtgaggtaatggctcaccaaggcttcgacgggtagccggcctgagagggcgaccggccacattgggactgagatacggcccagactcctacgggaggcagcagtggggaatattgcacaatgggcgaaagcctgatgcagcgacgccgcgtgcgggatgaaggccttcgggttgtaaaccgcttttaattgggagcaagcgagagtgagtgtaccttttgaataagcaccggctaactacgtgccagcagccgcggtaatacgtagggtgcaagcgttatccggaattattgggcgtaaagagctcgtaggcggtttgtcacgcctggtgtgaaagtccatcgcttaacggtggatctgcgccgggtacgggcaggctagagtgcagtaggggagattggaattcccggtgtaacggtggaatgtgtagatatcgggaagaacaccaatggcgaaggcagatctctgggctgttactgacgctgaggagcgaaagcatggggagcgaacaggattagataccctggtagtccatgccgtaaacggtggatgctggatgtgggacccttccacgggttccgtgtcggagctaacgcgttaagcatcccgcctggggagtacggccgcaaggctaaaactcaaagaaattgacgggggcccgcacaagcggcggagcatgcggattaattcgatgcaacgcgaagaaccttacctaggcttgacatgtttcggacagccccagagatggggtctcccttcggggccgattcacaggtggtgcatggtcgtcgtcagctcgtgtcgtgagatgttgggttaagtcccgcaacgagcgcaaccctcgccttgtgttgccagcacgttatggtgggaactcacaagggaccgccggggttaactcggaggaaggtggggatgacgtcagatcatcatgccccttacgtctagggcttcacgcatgctacaatggccggtacaacgagatgcgacatggcgacatgaagcgaatctcttaaaaccggtctcagttcggattggagcctgcaactcggctccatgaaggcggagtcgctagtaatcgcgaatcagcaacgtcgcggtgaatgcgttcccgggccttgtacacaccgcccgtcaagtcatgaaagtgggtagcacccgaagccggtggcctaacctttttggagggaaccgtctaaggtgagactcgtgattgggactaagtcgtaacaaggtagccgtaccggaaggtgcggctggatcacctccttt

SEQ ID NO: 1134 - DNA, 1516 bp, artificial sequence
  GCF_003462285.1_00408_Bacteroides_massiliensis
acggagagtttgatcctggctcaggacgaacgctggcggcgtgcttaacacatgcaagtcgagcggtaaggcccttcggggtacacgagcggcgaacgggtgagtaacacgtgggtgatctgcctcgcacttcgggataagcctgggaaactgggtctaataccggatatgacttgctgtcgcatggcggtgggtggaaagatttatcggtgcgagatgggcccgcggcctatcagcttgttggtggggtaatggcctaccaaggcgacgacgggtagccgacctgagagggtgaccggccacactgggactgagacacggcccagactcctacgggaggcagcagtggggaatattgcacaatgggcgaaagcctgatgcagcgacgccgcgtgagggatgacggccttcgggttgtaaacctctttcgacagggacgaagcgcaagtgacggtacctgtagaagaagcaccggccaactacgtgccagcagccgcggtaatacgtagggtgcgagcgttgtccggaattactgggcgtaaagagcttgtaggcggtttgtcgcgtcgtctgtgaaaactcacagctcaactgtgagcttgcaggcgatacgggcagacttgagtacttcaggggagactggaattcctggtgtagcggtgaaatgcgcagatatcaggaggaacaccggtggcgaaggcgggtctctgggaagtaactgacgctgagaagcgaaagcgtgggtagcgaacaggattagataccctggtagtccacgccgtaaacggtgggtactaggtgtgggtttccttccacgggatccgtgccgtagctaacgcattaagtaccccgcctggggagtacggccgcaaggctaaaactcaaaggaattgacgggggcccgcacaagcggcggagcatgtggattaattcgatgcaacgcgaagaaccttacctgggtttgacatacaccggaaacctgcagagatgtaggcccccttgtggtcggtgtacaggtggtgcatggctgtcgtcagctcgtgtcgtgagatgttgggttaagtcccgcaacgagcgcaacccttatcttatgttgccagcgcgtaatggcggggactcgtgagagactgccggggtcaactcggaggaaggtggggacgacgtcaagtcatcatgccccttatgtccagggcttcacacatgctacaatggccggtacagagggctgcgataccgtgaggtggagcgaatcccttaaagccggtctcagttcggatcggggtctgcaactcgaccccgtgaagttggagtcgctagtaatcgcagatcagcaacgctgcggtgaatacgttcccgggccttgtacacaccgcccgtcacgtcatgaaagtcggtaacacccgaagccggtggcctaaccccttgtgggagggagccgtcgaaggtgggatcggcgattgggacgaagtcgtaacaaggtagccgtaccggaaggtgcggctggatcacctccttt

SEQ ID NO: 1135 - DNA, 1527 bp, artificial sequence
  GCF_004349605.1_03351_Bacteroides_massiliensis
tgaagagtttgatcctggctcagattgaacgctagcgggatgctttacacatgcaagtcgaacggcagcgcggacttcggtctggcggcgagtggcgaacgggtgagtaatgtatcggaacgtgcccagtagcgggggataactacgcgaaagcgtggctaataccgcatacgccctacgggggaaagcgggggaccttcgggcctcgcactattggagcggccgatatcggattagctagttggtggggtaaaggcctaccaaggcaacgatccgtagctggtttgagaggacgaccagccacactgggactgagacacggcccagactcctacgggaggcagcagtggggaattttggacaatgggggcaaccctgatccagccatcccgcgtgtgcgatgaaggccttcgggttgtaaagcacttttggcaggaaagaaacggctctggctaatatctggagcaactgacggtacctgcagaataagcaccggctaactacgtgccagcagccgcggtaatacgtagggtgcaagcgttaatcggaattactgggcgtaaagcgtgcgcaggcggttcggaaagaaagatgtgaaatcccagggcttaaccttggaactgcatttttaactaccgggctagagtgtgtcagagggaggtggaattccgcgtgtagcagtgaaatgcgtagatatgcggaggaacaccgatggcgaaggcagcctcctgggataacactgacgctcatgcacgaaagcgtggggagcaaacaggattagataccctggtagtccacgccctaaacgatgtcaactagctgttggggacttcggtccttggtagcgcagctaacgcgtgaagttgaccgcctggggagtacggtcgcaagattaaaactcaaaggaattgacggggacccgcacaagcggtggatgatgtggattaattcgatgcaacgcgaaaaaccttacctacccttgacatgtctggaatgccgaagagatttggcagtgctcgcaagagaaccggaacacaggtgctgcatggctgtcgtcagctcgtgtcgtgagatgttgggttaagtcccgcaacgagcgcaacccttgtcattagttgctacgaaagggcactctaatgagactgccggtgacaaaccggaggaaggtggggatgacgtcaagtcctcatggcccttatgggtagggcttcacacgtcatacaatggtcgggacagagggctgccaacccgcaagggggagccaatcccagaaacccgatcgtagtccggatcgcagtctgcaactcgactgcgtgaagtcggaatcgctagtaatcgcggatcagcatgtcgcggtgaatacgttcccgggtcttgtacacaccgcccgtcacaccatgggagtgggttttaccagaagtagttagcctaaccgcaaggggggcgattaccacggtaggattcatgactggggtgaagtcgtaacaaggtagccgtatcggaaggtgcggctggatcacctccttt

SEQ ID NO: 1136 - DNA, 1521 bp, artificial sequence
  GCF_000187895.1_01279_Bacteroides_plebeius
tacggagagtttgatcctggctcaggacgaacgctggcggcgtgcttaacacatgcaagtcgaacggtgacggaggagcttgcttcttctgatcagtggcgaacgggtgagtaacacgtgagtaacctgccccaaactctgggataagcactggaaacggtgtctaataccggatatgagcttcagccgcatggctaggagttggaaagaatttcggtttgggatggactcgcggcctatcagctagttggtgaggtaatggctcaccaaggcgacgacgggtagccggcctgagagggtgaccggccacactgggactgagacacggcccagactcctacgggaggcagcagtggggaatattgcacaatgggcgcaagcctgatgcagcaacgccgcgtgagggacgacggccttcgggttgtaaacctcttttagtagggaagaagcgaaagtgacggtacctgcagaaaaagcaccggctaactacgtgccagcagccgcggtaatacgtagggtgcaagcgttgtccggaattattgggcgtaaagagctcgtaggcggtttgtcgcgtctgctgtgaaaacccgaggctcaacctcgggcctgcagtgggtacgggcagactagagtgcggtaggggagattggaattcctggtgtagcggtggaatgcgcagatatcaggaggaacaccaatggcgaaggcagatctctgggccgtaactgacgctgaggagcgaaagcatggggagcgaacaggattagataccctggtagtccatgccgtaaacgttgggaactagatgtggggaccattccacggtctccgtgtcgcagctaacgcattaagttccccgcctggggagtacggccgcaaggctaaaactcaaaggaattgacgggggcccgcacaagcggcggagcatgcggattaattcgatgcaacgcgaagaaccttaccaaggcttgacatatagaggaaacggctggaaacagtcgccccgcaaggtctctatacaggtggtgcatggttgtcgtcagctcgtgtcgtgagatgttgggttaagtcccgcaacgagcgcaaccctcgtcctatgttgccagcacgtaatggtgggaactcatgggatactgccggggtcaactcggaggaaggtggggatgacgtcaaatcatcatgccccttatgtcttgggcttcacgcatgctacaatggccggtacaaagggctgcaataccgcaaggtggagcgaatcccaaaaagccggtctcagttcggattgaggtctgcaactcgacctcatgaagtcggagtcgctagtaatcgcagatcagcaacgctgcggtgaatacgttcccgggccttgtacacaccgcccgtcaagtcatgaaagtcggtaacacccgaagccagtggccaaacccgcaagggatggagctgtcgaaggtgggatcggtgattaggactaagtcgtaacaaggtagccgtaccggaaggtgcggctggatcacctccttt

SEQ ID NO: 1137 - DNA, 1520 bp, artificial sequence
  GCF_000187895.1_02088_Bacteroides_plebeius
tacggagagtttgatcctggctcaggacgaacgctggcggcgtgcttaacacatgcaagtcgaacggtgatgaggagcttgcttctctgatcagtggcgaacgggtgagtaacacgtgagcaatctgcccttgactctgggataagcgttggaaacgacgtctaataccggatacgacctttggaggcatctctgggggtggaaagaattttggtcaaggatgagctcgcggcctatcagctagttggtgaggtaatggctcaccaaggcgacgacgggtagccggcctgagagggtgaccggccacactgggactgagacacggcccagactcctacgggaggcagcagtggggaatattgcacaatgggcgaaagcctgatgcagcaacgccgcgtgagggacgacggccttcgggttgtaaacctcttttagtagggaagaagcgtaaaagtgacggtacctgcagaaaaagcaccggctaactacgtgccagcagccgcggtaatacgtagggtgcaagcgttgtccggaattattgggcgtaaagagctcgtaggcggtttgtcgcgtctgctgtgaaaacccgaggctcaacctcgggcctgcagtgggtacgggcagactagagtgcggtaggggagattggaattcctggtgtagcggtggaatgcgcagatatcaggaggaacaccaatggcgaaggcagatctctgggccgtaactgacgctgaggagcgaaagcatggggagcgaacaggattagataccctggtagtccatgccgtaaacgttgggaactagatgtggggaccattccacggtctccgtgtcgcagctaacgcattaagttccccgcctggggagtacggccgcaaggctaaaactcaaaggaattgacgggggcccgcacaagcggcggagcatgcggattaattcgatgcaacgcgaagaaccttaccaaggcttgacatatagaggaaacgtctggaaacagtcgccccgcaaggtctctatacaggtggtgcatggttgtcgtcagctcgtgtcgtgagatgttgggttaagtcccgcaacgagcgcaaccctcgtcctatgttgccagcacgtaatggtgggaactcatgggatactgccggggtcaactcggaggaaggtggggatgacgtcaaatcatcatgccccttatgtcttgggcttcacgcatgctacaatggccggtacaaagggctgcaataccgcaaggtggagcgaatcccaaaaagccggtctcagttcggattgaggtctgcaactcgacctcatgaagtcggagtcgctagtaatcgcagatcagcaacgctgcggtgaatacgttcccgggccttgtacacaccgcccgtcaagtcatgaaagtcggtaacacccgaagccagtggcctaacccgcaaggggaggagctgtcgaaggtgggatcggtgattaggactaagtcgtaacaaggtagccgtaccggaaggtgcggctggatcacctccttt

SEQ ID NO: 1138 - DNA, 1314 bp, artificial sequence
  GCF_000187895.1_02517_Bacteroides_plebeius
agaattttggtcagggatgagctcgcggcctatcagctagttggtgaggtaatggctcaccaaggcgacgacgggtagccggcctgagagggtgaccggccacactgggactgagacacggcccagactcctacgggaggcagcagtggggaatattgcacaatgggcgaaagcctgatgcagcaacgccgcgtgagggacgacggccttcgggttgtaaacctcttttagtagggaagaagcgaaagtgacggtacctgcagaaaaagcaccggctaactacgtgccagcagccgcggtaatacgtagggtgcaagcgttgtccggaattattgggcgtaaagagctcgtaggcggtttgtcgcgtctgctgtgaaaacccgaggctcaacctcgggcctgcagtgggtacgggcagactagagtgcggtaggggagattggaattcctggtgtagcggtggaatgcgcagatatcaggaggaacaccaatggcgaaggcagatctctgggccgtaactgacgctgaggagcgaaagcatggggagcgaacaggattagataccctggtagtccatgccgtaaacgttgggaactagatgtggggaccattccacggtctccgtgtcgcagctaacgcattaagttccccgcctggggagtacggccgcaaggctaaaactcaaaggaattgacgggggcccgcacaagcggcggagcatgcggattaattcgatgcaacgcgaagaaccttaccaaggcttgacatatagaggaaacggctggaaacagtcgccccgcaaggtctctatacaggtggtgcatggttgtcgtcagctcgtgtcgtgagatgttgggttaagtcccgcaacgagcgcaaccctcgtcctatgttgccagcacgtaatggtgggaactcatgggatactgccggggtcaactcggaggaaggtggggatgacgtcaaatcatcatgccccttatgtcttgggcttcacgcatgctacaatggccggtacaaagggctgcaataccgcaaggtggagcgaatcccaaaaagccggtctcagttcggattgaggtctgcaactcgacctcatgaagtcggagtcgctagtaatcgcagatcagcaacgctgcggtgaatacgttcccgggccttgtacacaccgcccgtcaagtcatgaaagtcggtaacacccgaagccggtggcctaaccctcacgggaaggagctgtcgaaggtgggatcggtgattaggactaagtcgtaacaaggtagccgtaccggaaggtgcggctggatcacctccttt

SEQ ID NO: 1139 - DNA, 1523 bp, artificial sequence
  GCF_003437535.1_01529_Bacteroides_plebeius
cgaagagtttgatcctggctcaggatgaacgctagcgacaggcttaacacatgcaagtcgaggggcagcacggtgtagcaatacattggtggcgaccggcgcacgggtgagtaacgcgtatgcaacctacctatcagaggggaataacccggcgaaagtcggactaataccgcataaaacaggggttccacatggaaatatttgttaaagaattatcgctgatagatgggcatgcgttccattagatagttggtgaggtaacggctcaccaagtccacgatggataggggttctgagaggaaggtcccccacactggtactgagacacggaccagactcctacgggaggcagcagtgaggaatattggtcaatgggcgagagcctgaaccagccaagtcgcgtgaaggatgaaggatctatggtttgtaaacttcttttatatgggaataaagtgaggaacgtgttcctttttgtatgtaccatatgaataagcatcggctaactccgtgccagcagccgcggtaatacggaggatgcgagcgttatccggatttattgggtttaaagggtgcgtaggtggttaattaagtcagcggtgaaagtttgtggctcaaccataaaattgccgttgaaactggttgacttgagtatatttgaggtaggcggaatgcgtggtgtagcggtgaaatgcatagatatcacgcagaactccgattgcgaaggcagcttactaaactataactgacactgaagcacgaaagcgtggggatcaaacaggattagataccctggtagtccacgcagtaaacgatgattactagctgtttgcgatacacagtaagcggcacagcgaaagcgttaagtaatccacctggggagtacgccggcaacggtgaaactcaaaggaattgacgggggcccgcacaagcggaggaacatgtggtttaattcgatgatacgcgaggaaccttacccgggtttgaacgcatattgacagctctggaaacagagtctctagtaatagcaatttgcgaggtgctgcatggttgtcgtcagctcgtgccgtgaggtgtcggcttaagtgccataacgagcgcaacccttatcactagttactaacaggtcatgctgaggactctagtgagactgccagcgtaagctgtgaggaaggtggggatgacgtcaaatcagcacggcccttacatccggggcgacacacgtgttacaatggtggggacaaagggcagctaccgtgtgagcggatgctaatctccaaaccccatctcagttcggatcgaagtctgcaacccgacttcgtgaagctggattcgctagtaatcgcgcatcagccatggcgcggtgaatacgttcccgggccttgtacacaccgcccgtcaagccatgggagttgggggtacctaaagtccgtaaccgcaaggatcggcctagggtaaaaccgatgactggggctaagtcgtaacaaggtagccgtaccggaaggtgcggctggaacacctccttt

SEQ ID NO: 1140 - DNA, 1519 bp, artificial sequence; identical to SEQ ID NO: 410
  GCF_003438135.1_03562_Bacteroides_plebeius

SEQ ID NO: 1141 - DNA, 1515 bp, artificial sequence
  GCF_003438305.1_01683_Bacteroides_plebeius
acggagagtttgatcctggctcaggacgaacgctggcggcgtgcttaacacatgcaagtcgagcggtaaggcctttcggggtacacgagcggcgaacgggtgagtaacacgtgggtgatctgccctgcacttcgggataagcctgggaaactgggtctaataccggatatgacctcctatcgcatggtgggtggtggaaagatttatcggtgcaggatgggcccgcggcctatcagcttgttggtggggtaatggcctaccaaggcgacgacgggtagccgacctgagagggtgaccggccacactgggactgagacacggcccagactcctacgggaggcagcagtggggaatattgcacaatgggcgaaagcctgatgcagcgacgccgcgtgagggatgacggccttcgggttgtaaacctctttcagcagggacgaagcgcaagtgacggtacctgcagaagaagcaccggctaactacgtgccagcagccgcggtaatacgtagggtgcaagcgttgtccggaattactgggcgtaaagagttcgtaggcggtttgtcgcgtcgtttgtgaaaaccagcagctcaactgctggcttgcaggcgatacgggcagacttgagtactgcaggggagactggaattcctggtgtagcggtgaaatgcgcagatatcaggaggaacaccggtggcgaaggcgggtctctgggcagtaactgacgctgaggaacgaaagcgtgggtagcgaacaggattagataccctggtagtccacgccgtaaacggtgggcgctaggtgtgggttccttccacggaatccgtgccgtagctaacgcattaagcgccccgcctggggagtacggccgcaaggctaaaactcaaaggaattgacgggggcccgcacaagcggcggagcatgtggattaattcgatgcaacgcgaagaaccttacctgggtttgacatataccggaaagctgcagagatgtggccccccttgtggtcggtatacaggtggtgcatggctgtcgtcagctcgtgtcgtgagatgttgggttaagtcccgcaacgagcgcaacccctatcttatgttgccagcacgttatggtggggactcgtaagagactgccggggtcaactcggaggaaggtggggacgacgtcaagtcatcatgccccttatgtccagggcttcacacatgctacaatggccagtacagagggctgcgagaccgtgaggtggagcgaatcccttaaagctggtctcagttcggatcggggtctgcaactcgaccccgtgaagtcggagtcgctagtaatcgcagatcagcaacgctgcggtgaatacgttcccgggccttgtacacaccgcccgtcacgtcatgaaagtcggtaacacccgaagccggtggcttaaccccttgtgggagggagccgtcgaaggtgggatcggcgattgggacgaagtcgtaacaaggtagccgtaccggaaggtgcggctggatcacctccttt

SEQ ID NO: 1142 - DNA, 1289 bp, artificial sequence
  GCF_003457865.1_02808_Bacteroides_plebeius
atgcgttccattaggcagttggtgaggtaacggctcaccaaaccttcgatggataggggttctgagaggaaggtcccccacattggaactgagacacggtccaaactcctacgggaggcagcagtgaggaatattggtcaatggacgggagtctgaaccagccaagtagcgtgaaggatgactgccctatgggttgtaaacttcttttatacgggaataaagtgatccacgtgtggatttttgtatgtaccgtatgaataaggatcggctaactccgtgccagcagccgcggtaatacggaggatccgagcgttatccggatttattgggtttaaagggagcgtaggtggattgttaagtcagttgtgaaagtttgcggctcaaccgtaaaattgcagttgatactggcagtcttgagtacagtagaggtgggcggaattcgtggtgtagcggtgaaatgcttagatatcacgaagaactccgattgcgaaggcagctcactggactgcaactgacactgatgctcgaaagtgtgggtatcaaacaggattagataccctggtagtccacacagtaaacgatgaatactcgctgtttgcgatatacggtaagcggccaagcgaaagcgttaagtattccacctggggagtacgccggcaacggtgaaactcaaaggaattgacgggggcccgcacaagcggaggaacatgtggtttaattcgatgatacgcgaggaaccttacccgggcttaaattacatttgaataatctggaaacaggttagccgtaaggcaaatgtgaaggtgctgcatggttgtcgtcagctcgtgccgtgaggtgtcggcttaagtgccataacgagcgcaacccttatcttcagttactaacaggtcatgctgaggactctggagagactgccgtcgtaagatgtgaggaaggtggggatgacgtcaaatcagcacggcccttacgtccggggctacacacgtgttacaatggggggtacagaaggcagctacctggtgacaggatgctaatcccaaaaacctctctcagttcggatcgaagtctgcaacccgacttcgtgaagctggattcgctagtaatcgcgcatcagccatggcgcggtgaatacgttcccgggccttgtacacaccgcccgtcaagccatgaaagccgggggtacctgaagtacgtaaccgcaaggagcgtcctagggtaaaactggtaattggggctaagtcgtaacaaggtagccgtaccggaaggtgcggctggaacacctcctt

SEQ ID NO: 1143 - DNA, 1561 bp, artificial sequence
  GCF_003458595.1_00436_Bacteroides_plebeius
atgagagtttgatcctggctcaggatgaacgctggcggcgtgcctaatacatgcaagtcgtacgctagccgttaacctgatctcttcggagtgacggctgacaatgactagagtggcgaacgggtgagtaacacgtaagaaacctgccctttagtgggggataacatttggaaacagatgctaataccgcgtaacaactttgaactcatgttcttagtttaaaaggtccttttggatcgctaaaggatggtcttgcggcgtattagctagttggtagggtaatggcctaccaaggccatgatgcgtagccgagttgagagactggccggccacattgggactgagacactgcccaaactcctacgggaggctgcagtagggaattttccgcaatgcacgaaagtgtgacggagcgacgccgcgtgtgtgatgaaggctttcgggtcgtaaagcactgttgtaagggaagaatgaccggattcagagaaagtttccggcttgacggtaccttaccagaaagggatggctaaatacgtgccagcagccgcggtaatacgtatgtcccgagcgttatccggatttattgggcgtaaagcgagcgcagacggttgattaagtctgatgtgaaatcccggagcctaactccggaactgcattggaaactggtttacttgagtgcgatagaggcaagtggaactccatgtgtagcggtgaaatgcgtagatatgtggaagaacaccagtggcgaaggcggcttgctagatcgtaactgacgttgaggctcgaaagtatgggtagcaaacgggattagataccccggtagtccataccgtaaacgatgggtgctagttgttaagaggtttccgcctcctagtgacgtagctaacgcattaagcaccccgcctgaggagtacggccgcaaggctaaaacttaaaggaattgacggggacccgcacaagcggtggagcatgtggtttaattcgaagatacgcgaaaaaccttaccaggccttgacataccagtgaccgcttttgtaatgaaagcttttcttcggaacattggatacaggtggtgcatggtcgtcgtcagctcgtgtcgtgagatgttgggttaagtcccgcaacgagcgcaacccttgttattagttgccagcattcagttgggcactctaatgagactgccggtgataaaccggaggaaggtggggacgacgtcagatcatcatgccccttatggcctgggcaacacacgtgctacaatgggaagtacaacgagttgcgaaccggtgacggcaagctaatctcttaaaacttctctcagttcggactggagtctgcaactcgactccacgaaggcggaatcgctagtaatcgcgaatcagcatgtcgcggtgaatacgttcccgggtcttgtacacaccgcccgtcaaatcatgggagtcggaagtacccaaagtcgcttggctaacttttagaggccggtgcctaaggtaagatcgatgactgggattaagtcgtaacaaggtagccgtaggagaacctgcggctggatcacctcctt

SEQ ID NO: 1144 - DNA, 1513 bp, artificial sequence
  GCF_003458915.1_00596_Bacteroides_plebeius
atggagagtttgatcctggctcaggacgaacgctggcggcgtgcttaacacatgcaagtcgagcggtaaggcccttcggggtacacgagcggcgaacgggtgagtaacacgtgggtaacctgccctgcactttgggataacctcgggaaaccggggctaataccggatatgacatgccatcgcatggtggtgtgtggaaagttccggcggtgtgggatgggcccgcggcctatcagcttgttggtggggtgatggcctaccaaggcgacgacgggtagccggcctgagagggcgaccggccacactgggactgagacacggcccagactcctacgggaggcagcagtggggaatattgcgcaatgggcgaaagcctgacgcagcgacgccgcgtgagggatgacggccttcgggttgtaaacctctttcagcgccgaagaagcgaaagtgacggtaggcgcagaagaagcaccggctaactacgtgccagcagccgcggtaatacgtagggtgcgagcgttgtccggaattattgggcgtaaagagctcgtaggcggtttgtcgcgtcggctgtgaaaacctggggcttaaccctgggcgtgcagtcgatacgggcagacttgagttcggcaggggagactggaattcctggtgtagcggtgaaatgcgcagatatcaggaggaacaccggtggcgaaggcgggtctctgggccgatactgacgctgaggagcgaaagcgtggggagcgaacaggattagataccctggtagtccacgccgtaaacggtgggcgctaggtgtgggggatttccacgtcctccgtgccgtagctaacgcattaagcgccccgcctggggagtacggccgcaaggctaaaactcaaaggaattgacgggggcccgcacaagcggcggagcatgtggattaattcgatgcaacgcgaagaaccttacctgggtttgacatgcaccggacagcctcggagacggggtttccgcaaggtcggtgtacaggtggtgcatggctgtcgtcagctcgtgtcgtgagatgttgggttaagtcccgcaacgagcgcaacccttattccatgttgccagcacgtaatggtggggactcatgggagactgccggggtcaactcggaggaaggtggggacgacgtcaagtcatcatgccccttatgtccagggcttcacacatgctacaatggccggtacaaagggctgctaaaccgtgaggtggagcgaatcccataaagccggtctcagttcggatcggggtctgcaactcgaccccgtgaagtcggagtcgctagtaatcgcagatcagcaacgctgcggtgaatacgttcccgggccttgtacacaccgcccgtcacgtcacgaaagtcggtaacacccgaagcccatggcccaacccgcaagggggggagtggtcgaaggtgggactggcgattgggacgaagtcgtaacaaggtagccgtaccggaaggtgcggctggatcacctccttt

SEQ ID NO: 1145 - DNA, 1661 bp, artificial sequence
  GCF_003459155.1_01772_Bacteroides_plebeius
tttggagagtttgatcctggctcaggacgaacgctggcggcgtgcctaacacatgcaagtcgaacggtctaatgcttaacactgagtgttcagtagcgttgaggacagcgagagcgcaaagaatgagcgctccgggcatttaataagtgtcaacgcacatataggaagctgaatgttgagtgttaagtattagatagtggcggacgggtgagtaacgcgtgggtaacctacccataaagccgggacaacccttggaaacgagggctaataccggataatcttaagacgtggcatcacgacttaaggaaagatggcctctttatatgctatcgattatggatggacccgcgtctgattagctggttggtggggtaaaggcctaccaaggcgacgatcagtagccggcctgagagggtgaacggccacactgggactgagacacggcccagactcctacgggaggcagcagtggggaatcttccgcaatggacgaaagtctgacggagcaacgccgcgtgtatgatgaaggtcttcggattgtaaagtactgtctttggggaagaacggtgaggttgaaaagattgatttcacatgacggtacccaaggaggaagccccggctaactacgtgccagcagccgcggtaatacgtagggggcaagcgttgtccggaattattgggcgtaaagggcgcgtaggcggatttttaagtctggtgtgaaagatcagggctcaaccctgagagtgcatcggaaactggagatcttgaggacaggagaggaaagtggaattccacgtgtagcggtgaaatgcgtagatatgtggaggaacaccagtggcgaaggcgactttctggactgtaactgacgctgaggcgcgaaagcgtggggagcaaacaggattagataccctggtagtccacgccgtaaacgatgagtgctaggtgtagagggtatcgaccccttctgtgccgcagttaacacaataagcactccgcctggggagtacggccgcaaggttgaaactcaaaggaattgacgggggcccgcacaagcggtggagcatgtggtttaattcgacgcaacgcgaagaaccttaccaaggcttgacatcctctgaaccctgtggaaacatgggggtgcccttcggggagcagagagacaggtggtgcatggttgtcgtcagctcgtgtcgtgagatgttgggttaagtcccgcaacgagcgcaacccctgtatttagttgctaacaagtgaagttgagcactctagatagactgccggtgataaaccggaggaaggtggggatgacgtcaaatcatcatgccccttatgtcttgggctacacacgtgctacaatggccggtacagacggaagcgaagccgcgaggtgaagccaatccgagaaagccggtctcagttcggattgcaggctgcaactcgcctgcatgaagtcggaatcgctagtaatcgcaggtcagcatactgcggtgaatacgttcccgggccttgtacacaccgcccgtcacaccacgaaagtctgcaacacccgaagccggtgaggtaacccgaaagggagctagccgtcgaaggtggggccgataattggggtgaagtcgtaacaaggtagccgtatcggaaggtgcggctggatcacctccttt

SEQ ID NO: 1146 - DNA, 1539 bp, artificial sequence
  GCF_003463985.1_00002_Bacteroides_plebeius
ttgaagagtttgatcatggctcagattgaacgctggcggcaggcctaacacatgcaagtcgagcggcagcacaagggagtttacttctgaggtggcgagcggcggacgggtgagtaatgcctagggatctgcccagtcgagggggataacagttggaaacgactgctaataccgcatacgccctacgggggaaaggaggggaccttcgggccttccgcgattggatgaacctaggtgggattagctagttggtgaggtaatggctcaccaaggcgacgatccctagctgttctgagaggatgatcagccacactgggactgagacacggcccagactcctacgggaggcagcagtggggaatattgcacaatgggggaaaccctgatgcagccatgccgcgtgtgtgaagaaggccttcgggttgtaaagcactttcagtagggaggaaagggtgtagtttaatacgctatatctgtgacgttacctacagaagaaggaccggctaactccgtgccagcagccgcggtaatacggagggtccgagcgttaatcggaattactgggcgtaaagcgtgcgcaggcggtttgttaagcgagatgtgaaagccctgggctcaacctaggaatagcatttcgaactggcgaactagagtcttgtagaggggggtagaattccaggtgtagcggtgaaatgcgtagagatctggaggaataccggtggcgaaggcggccccctggacaaagactgacgctcatgcacgaaagcgtggggagcaaacaggattagataccctggtagtccacgccgtaaacgatgtctactcggagtttggtgtcttgaacactgggctctcaagctaacgcattaagtagaccgcctggggagtacggccgcaaggttaaaactcaaatgaattgacgggggcccgcacaagcggtggagcatgtggtttaattcgatgcaacgcgaagaaccttacctactcttgacatccacagaactttccagagatggattggtgccttcgggaactgtgagacaggtgctgcatggctgtcgtcagctcgtgttgtgaaatgttgggttaagtcccgcaacgagcgcaacccctatccttatttgccagcacgtaatggtgggaactctagggagactgccggtgataaaccggaggaaggtggggacgacgtcaagtcatcatggcccttacgagtagggctacacacgtgctacaatggcgagtacagagggttgcaaagccgcgaggtggagctaatctcacaaagctcgtcgtagtccggattggagtctgcaactcgactccatgaagtcggaatcgctagtaatcgtggatcagaatgccacggtgaatacgttcccgggccttgtacacaccgcccgtcacaccatgggagtgggctgcaaaagaagtgggtagcttaaccttcgggggggcgctcaccactttgtggttcatgactggggtgaagtcgtaacaaggtagccctaggggaacctggggctggatcacctcctt

SEQ ID NO: 1147 - DNA, 988 bp, artificial sequence
  GCF_003466905.1_01628_Bacteroides_plebeius
  misc_feature (987)..(988): n is a, c, g, or t
atgagagtttgatcctggctcaggatgaacgctggcggcgtgcttaacacatgcaagtcgaacgaagcacttttacagatttcttcggaatgaagttttagtgactgagtggcggacgggtgagtaacgcgtgggtaacctgcctcacacagggggataacagttggaaacggctgctaataccgcataagcgcacagtaccgcatggtacagtgtgaaaaactccggtggtgtgagatggacccgcgtctgattagctagttggcagggcaacggcctaccaaggcgacgatcagtagccgacctgagagggtgaccggccacattgggactgagacacggcccaaactcctacgggaggcagcagtggggaatattgcacaatgggggaaaccctgatgcagcgacgccgcgtgagcgaagaagtatttcggtatgtaaagctctatcagcagggaagaagaaatgacggtacctgactaagaagcaccggctaaatacgtgccagcagccgcggtaatacgtatggtgcaagcgttatccggatttactgggtgtaaagggagcgcaggcggaaggctaagtctgatgtgaaagcccggggctcaaccccggtactgcattggaaactggtcatctagagtgtcggaggggtaagtggaattcctagtgtagcggtgaaatgcgtagatattaggaggaacaccagtggcgaaggcggcttactggacgataactgacgctgaggctcgaaagcgtggggagcaaacaggattagataccctggtagtccacgccgtaaacgatgaatactaggtgtcggaaagcacagcttttcggtgccgccgcaaacgcattaagtattccacctggggagtacgttcgcaagaatgaaactcaaaggaattgacggggacccgcacaagcggtggagcatgtggtttaattcgaagcaacgcgaagaaccttaccaagtcttgacatccnn

SEQ ID NO: 1148 - DNA, 1514 bp, artificial sequence
  GCF_003467165.1_02605_Bacteroides_plebeius
acggagagtttgatcctggctcaggacgaacgctggcggcgtgcttaacacatgcaagtcgagcggtaaggccttcgggtacacgagcggcgaacgggtgagtaacacgtgggtgatctgcctcgcactctgggataagcctgggaaactgggtctaataccggataggaccactggtcgcatggttggtggtggaaagatttatcggtgtgagatgggcccgcggcctatcagcttgttggtggggtaatggcctaccaaggcgacgacgggtagccggcctgagagggcgaccggccacactgggactgagacacggcccagactcctacgggaggcagcagtggggaatattgcacaatgggcggaagcctgatgcagcgacgccgcgtgagggatgacggccttcgggttgtaaacctctttcgactccgacgaagcgagagtgacggtaggggtagaagaagcaccggccaactacgtgccagcagccgcggtaatacgtagggtgcgagcgttgtccggaattactgggcgtaaagagcttgtaggcggtttgtcgcgtcgtccgtgaaaacttggggctcaaccccaagcttgcgggcgatacgggcagacttgagtacttcaggggagactggaattcctggtgtagcggtgaaatgcgcagatatcaggaggaacaccggtggcgaaggcgggtctctgggaagtaactgacgctgagaagcgaaagcgtgggtagcgaacaggattagataccctggtagtccacgccgtaaacggtgggtactaggtgtgggtttccttccacgggatccgtgccgtagctaacgcattaagtaccccgcctggggagtacggccgcaaggctaaaactcaaaggaattgacgggggcccgcacaagcggcggagcatgtggattaattcgatgcaacgcgaagaaccttacctgggtttgacatacaccggaaacctgcagagatgtaggcccccttgtggtcggtgtacaggtggtgcatggctgtcgtcagctcgtgtcgtgagatgttgggttaagtcccgcaacgagcgcaacccttgtcctgtattgccagcgggttatgccggggacttgcaggagactgccggggtcaactcggaggaaggtggggacgacgtcaagtcatcatgccccttatgtccagggcttcacacatgctacaatggccggtacagagggctgcgataccgtgaggtggagcgaatcccttaaagccggtctcagttcggatcggggtctgcaactcgaccccgtgaagttggagtcgctagtaatcgcagatcagcaacgctgcggtgaatacgttcccgggccttgtacacaccgcccgtcacgtcatgaaagtcggtaacacccgaagccggtggcctaaccccttgtgggagggagccgtcgaaggtgggatcggcgattgggacgaagtcgtaacaaggtagccgtaccggaaggtgcggctggatcacctccttt

SEQ ID NO: 1149 - DNA, 1544 bp, artificial sequence
  GCF_003469295.1_01962_Bacteroides_plebeius
agagagtttgatcctggctcaggacgaacgctggcggcgtgcctaatacatgcaagtagaacgctgaggtctggtgcttgcactagaccaaggagttgcgaacgggtgagtaacgcgtaggtaacctacctcatagcgggggataactattggaaacgatagctaataccgcatgagactggggttcacatgaacccgagttaaaaggagcaaaagcttcactatgagatggacctgcgttgtattagctagttggtgaggtaaaggctcaccaaggcgacgatacatagccgacctgagagggtgatcggccacactgggactgagacacggcccagactcctacgggaggcagcagtagggaatcttcggcaatggggggaaccctgaccgagcaacgccgcgtgagtgaagaaggttttcggatcgtaaagctctgttgttagagaagaacggtaatgggagtggaaaatccattatgtgacggtaactaaccagaaagggacggctaactacgtgccagcagccgcggtaatacgtaggtcccgagcgttgtccggatttattgggcgtaaagcgagcgcaggcggtttgataagtctgaagttaaaggctgtggcttaaccatagtatgctttggaaactgtcaaacttgagtgcagaaggggagagtggaattccatgtgtagcggtgaaatgcgtagatatatggaggaacaccggtggcgaaagcggctctctggtctgtaactgacgctgaggctcgaaagcgtggggagcaaacaggattagataccctggtagtccacgccgtaaacgatgagtgctaggtgttaggccctttccggggcttagtgccggagctaacgcattaagcactccgcctggggagtacgaccgcaaggttgaaactcaaaggaattgacgggggcccgcacaagcggtggagcatgtggtttaattcgaagcaacgcgaagaaccttaccaggtcttgacatccttctgaccggcctagagataggctttctcttaggagcagaagagacaggtggtgcatggttgtcgtcagctcgtgtcgtgagatgttgggttaagtcccgcaacgagcgcaacccctattgttagttgccatcattaagttgggcactctagcgagactgccggtaataaaccggaggaaggtggggatgacgtcaaatcatcatgccccttatgacctgggctacacacgtgctacaatggttggtacaacgagtcgcaagccggtgacggcaagctaatctcttaaagccaatctcagttcggattgtaggctgcaactcgcctacatgaagtcggaatcgctagtaatcgcggatcagcacgccgcggtgaatacgttcccgggccttgtacacaccgcccgtcacaccacgagagtttgtaacacccgaagtcggtgaggtaaccttttaggagccagccgcctaaggtgggatagatgattggggtgaagtcgtaacaaggtagccgtatcggaaggtgcggctggatcacctccttt

SEQ ID NO: 1150 - DNA, 1532 bp, artificial sequence
  GCF_003470365.1_03270_Bacteroides_plebeius
tgaagagtttgatcatggctcagattgaacgctggcggcaggcctaacacatgcaagtcgagcggtagaagggagcttgcttcctttgagagcggcggacgggtgagtaatgcctaggaatctgcctggtagtgggggataacgttcggaaacggacgctaataccgcatacgtcctacgggagaaagtgggggatcttcggacctcacgctatcagatgagcctaggtcggattagctagttggtgaggtaatggctcaccaaggcgacgatccgtaactggtctgagaggatgatcagtcacactggaactgagacacggtccagactcctacgggaggcagcagtggggaatattggacaatgggcgcaagcctgatccagccatgccgcgtgtgtgaagaaggtcttcggattgtaaagcactttaagttgggaggaagggtagtagcttaatacgttgctactttgacgttaccgacagaataagcaccggctaactctgtgccagcagccgcggtaatacagagggtgcaagcgttaatcggaattactgggcgtaaagcgcgcgtaggtggttatgtaagttgaatgtgaaatccccgggctcaacctgggaactgcatccaaaactgcatggctagagtacggtagagggtggtggaatttcctgtgtagcggtgaaatgcgtagatataggaaggaacaccagtggcgaaggcgaccacctggactgatactgacactgaggtgcgaaagcgtggggagcaaacaggattagataccctggtagtccacgccgtaaacgatgtcaactagccgttgggttccttgagaacttagtggcgcagctaacgcattaagttgaccgcctggggagtacggccgcaaggttaaaactcaaatgaattgacgggggcccgcacaagcggtggagcatgtggtttaattcgaagcaacgcgaagaaccttaccaggccttgacatgcagagaactttccagagatggattggtgccttcgggaactctgacacaggtgctgcatggctgtcgtcagctcgtgtcgtgagatgttgggttaagtcccgtaacgagcgcaacccttgcccttagttaccagcacgtaatggtgggcactctaaggggactgccggtgacaaaccggaggaaggtggggatgacgtcaagtcatcatggcccttacggcctgggctacacacgtgctacaatggtcggtacagagggttgccaagccgcgaggtggagctaatcccacaaaaccgatcgtagtccggatcggagtctgcaactcgactccgtgaagtcggaatcgctagtaatcgtgaatcagaatgtcacggtgaatacgttcccgggccttgtacacaccgcccgtcacaccatgggagtgggttgctccagaagtagctagtctaaccgcaagggggacggttaccacggagtgattcatgactggggtgaagtcgtaacaaggtagccgtaggggaacctgcggctggatcacctcctt

SEQ ID NO: 1151 - DNA, 1489 bp, artificial sequence
  GCF_003471645.1_01491_Bacteroides_plebeius
ctgagagtttgatcctggctcagagcgaacgctggcggcatgcttaacacatgcaagtcgcacggtttggtttcggccggacagtggcggacgggtgagtaacgcgtaggtatctgtcctggggtgggggataactgtgggaaactacagctaataccgcatgacacctgagggtcaaaggcgcaagtcgccttgggaggagcctgcgttcgattaggtagttggtggggtaaaggcctaccaagcctacgatcgatagctggtctgagaggatgatcagccacactgggactgagacacggcccagactcctacgggaggcagcagtggggaatattggacaatgggcgcaagcctgatccagcaatgccgcgtgtgtgaagaaggtcttcggattgtaaagcactttcggcggggacgatgatgacggtacccgcagaagaagccccggctaacttcgtgccagcagccgcggtaatacgaagggggctagcgttgctcggaatgactgggcgtaaagggcgcgtaggcggttcgtacagtcagatgtgaaattcccgggctcaacctgggggctgcatttgatacgtgcgggctggagtgtgagagagggttgtggaattcccagtgtagaggtgaaattcgtagatattgggaagaacaccggtggcgaaggcggcaacctggctcatgactgacgctgaggcgcgaaagcgtggggagcaaacaggattagataccctggtagtccacgctgtaaacgatgtgtgctggatgttgggttacctagtaactcagtgtcgtagctaacgcggtaagcacaccgcctggggagtacggccgcaaggttgaaactcaaaggaattgacgggggcccgcacaagcggtggagcatgtggtttaattcgaagcaacgcgcagaaccttaccaggacttgacatgggagggctgtgtccagagatggacatttccgcaaggaccctctgcacaggtgctgcatggctgtcgtcagctcgtgtcgtgagatgttgggttaagtcccgcaacgagcgcaaccctcgcctttagttgccagcatgttcgggtgggcactctaaaggaactgccggtgacaagccggaggaaggtggggatgacgtcaagtcctcatggcccttatgtcctgggctacacacgtgctacaatggcggtgacagtgggaagctaggcagtgatgccatgctgatctcaaaaagccgtctcagttcggattgcactctgcaactcgagtgcatgaaggtggaatcgctagtaatcgcggatcagcatgccgcggtgaatacgttcccgggccttgtacacaccgcccgtcacaccatgggagttggtttgaccttaagccggtgcgcgaacccgcaagggacgcagccgaccacggtcgggtcagcgactggggtgaagtcgtaacaaggtagccgtaggggaacctgcggctggatcacctccttt

SEQ ID NO: 1152 - DNA, 1535 bp, artificial sequence
  GCF_003472665.1_00991_Bacteroides_plebeius
acggagagtttgatcctggctcaggatgaacgctagcggcgggcttaacacatgcaagtcgaggggcaacatgaggtctatatttttagatttcgatggcgaccggcgaacgggtgcgtaacacgtacgtaacttaccttttgctagaaaatagcctgaggaaacttggattaatattctataacatagtattattgcatgataatattattaaagcagatatgcggcaaaagataggcgtgcgtctgattagttagttggtagggtaaaagcctacaaagacaatgatcggtagggggcctgagagggtgatcccccacactggtactgagatacggaccagactcctacgggaggcagcagtgaggaatattggtcaatggaggaaactctgaaccagccacgccgcgtgcaggaagaaggccctatgggttgtaaactgcttttgtataggaataaaaattcttacgagataagaatcatgaaggtactatacgaataagtgtcggcaaactccgtgccagcagccgcggtaatacggaggacacaagcgttatccggatttattgggtttaaagggtgcgtaggcggtttattaagtcagtagtgaaatgttgcagcttaactgttaaaatggctattgatactgataagctggagtgagattggagtagctggaatgtgtggtgtagcggtgaaatgcttagatatcacacagaacaccgatcgcgaaagcaggttactaagtctatactgacgctgaggcacgaaagcgtggggagcaaacaggattagataccctggtagtccacgccgtaaacgatgatcactagttgttggattttgtattcagcggctaagcgaaagtgataagtgatccacctggggagtacggtcgcaaggctgaaactcaaaggaattgacgggggcccgcacaagcggtggagcatgtggtttaattcgatgatacgcgaggaaccttaccaaggtttaaatgtgctgcgaataagctagaaatagtttagtcttcggacggagtacaagatgctgcatggttgtcgtcagctcgtgccgtgaggtgttgggttaagtccctcaacgagcgcaacccttgttgttagttgccagcgagtaaagtcggggactctaacaagactgccgacgtaagtcgagaggaaggtggggatgacgtcaaatcatcacggctcttatgccttgggctacacacgtgctacaatggtcggtacaaagggtcttgctactgggtaatcagaagctaatctctaaaagccgatctcagttcggattggagtctgcaactcgactctatgaagttggaatcgctagtaatcgcatatcagccatgatgcggtgaatacgttcccgggccttgtacacaccgcccgtcaagccatggaagtcggggggacctgaaatcggtgaccgtaaaaggaactgcttaaggtaaaatcgataactggggctaagtcgtaacaaggtagccgtaccggaaggtgcggctggaacatctcttt

SEQ ID NO: 1153 - DNA, 1522 bp, artificial sequence
  GCF_003474305.1_03123_Bacteroides_plebeius
tacggagagtttgatcctggctcaggatgaacgctggcggcgtgcttaacacatgcaagtcgaacgatgaagcccagcttgctgggtggattagtggcgaacgggtgagtaacacgtgagtaacctgccctcgactccaggataagcccgggaaactgggtctaatactggatattcaatttctaccgcatggtggtttttggaaaggattctggtcgaggagggactcgcggcctatcagcttgttggtgaggtaatggctcaccaaggcgacgacgggtagccggcctgagagggtgaccggccacactgggactgagacacggcccagactcctacgggaggcagcagtggggaatattgcacaatgggcgaaagcctgatgcagcgacgccgcgtgagggatgacggccttcgggttgtaaacctctttcagtagggaagaagcgaaagtgacggtacctgcagaagaagcgccggctaactacgtgccagcagccgcggtaatacgtagggcgcaagcgttatccggaattattgggcgtaaagagctcgtaggcggtttgtcgcgtctgccgtgaaagtccggggcttaactccggatctgcggtgggtacgggcagactagagtgctgtaggggagactggaattcctggtgtagcggtgaaatgcgcagatatcaggaggaacaccgatggcgaaggcaggtctctgggcagtaactgacgctgaggagcgaaagcatggggagcgaacaggattagataccctggtagtccatgccgtaaacgttgggcactagatgtgggggacattccacgttttccgcgtcgtagctaacgcattaagtgccccgcctggggagtacggccgcaaggctaaaactcaaaggaattgacgggggcccgcacaagcggcggagcatgcggattaattcgatgcaacgcgaagaaccttaccaaggcttgacatggaccggatcgggctagaaatagtctttcccttcggggctggttcacaggtggtgcatggttgtcgtcagctcgtgtcgtgagatgttgggttaagtcccgcaacgagcgcaaccctcgttctatgttgccagcacgtgatggtggggactcataggagactgccggggtcaactcggaggaaggtggggacgacgtcaaatcatcatgccccttatgtcttgggcttcacgcatgctacaatggccggtacaatgggttgcgatactgtgaggtggagctaatcccaaaaagccggtctcagttcggattggggtctgcaactcgaccccatgaagtcggagtcgctagtaatcgcagatcagcaacgctgcggtgaatacgttcccgggccttgtacacaccgcccgtcaagtcacgaaagttggtaacacccgaagctggtggcctaaccccttgtgggaaggagctgtcgaaggtgggaccggcgattgggactaagtcgtaacaaggtagccgtaccggaaggtgcggctggatcacctccttt

SEQ ID NO: 1154 - DNA, 1457 bp, artificial sequence
  GCF_003474535.1_03109_Bacteroides_plebeius
ttgagagtttgatcctggctcagaacgaacgctggcggcaggcctaacacatgcaagtcgagcgcaccttcgggtgagcggcggacgggttagtaacgcgtgggaacgtacccttttctaaggaatagccactggaaacggtgagtaataccttatacgcccttcgggggaaagatttatcggagaaggatcggcccgcgttagattagatagttggtggggtaacggcctaccaagtctacgatctatagctggttttagaggatgatcagcaacactgggactgagacacggcccagactcctacgggaggcagcagtggggaatcttggacaatgggcgcaagcctgatccagccatgccgcgtgagtgatgaaggccttagggtcgtaaagctctttcgctggggatgataatgacagtacccagtaaagaaaccccggctaactccgtgccagcagccgcggtaatacggagggggttagcgttgttcggaattactgggcgtaaagcgcgcgtaggcggattggaaagttgggggtgaaatcccggggctcaacctcggaactgcctccaaaactatcagtctagagttcgagagaggtgagtggaattccgagtgtagaggtgaaattcgtagatattcggaggaacaccagtggcgaaggcggctcactggctcgatactgacgctgaggtgcgaaagtgtggggagcaaacaggattagataccctggtagtccacaccgtaaacgatgaatgccagtcgtcagcaagcatgcttgttggtgacacacctaacggattaagcattccgcctggggagtacggtcgcaagattaaaactcaaaggaattgacgggggcccgcacaagcggtggagcatgtggtttaattcgaagcaacgcgcagaaccttaccaacccttgacatcctgtgctacatccagagatggatggttcccttcggggacgcagtgacaggtgctgcatggctgtcgtcagctcgtgtcgtgagatgttcggttaagtccggcaacgagcgcaacccacatcttcagttgccagcagttcggctgggcactctggagaaactgcccgtgataagcgggaggaaggtgtggatgacgtcaagtcctcatggcccttacgggttgggctacacacgtgctacaatggcagtgacaatgggttaatccccaaaaactgtctcagttcggattgttctctgcaactcgagagcatgaagtcggaatcgctagtaatcgcgtaacagcatgacgcggtgaatacgttcccgggccttgtacacaccgcccgtcacaccatgggagttgggtttacccgaagacggtgcgccaaccttttaggaggcagctggccacggtaagctcagcgactggggtgaagtcgtaacaaggtagccgtaggggaacctgcggctggatcacctccttt

SEQ ID NO: 1155 - DNA, 1517 bp, artificial sequence
  GCF_003475445.1_01433_Bacteroides_plebeius
ttggagagtttgatcctggctcaggacgaacgctggcggcgtgcttaacacatgcaagtcgaacgctgaaccggtttcggccggggatgagtggcgaacgggtgagtaacacgtgggtaatctgccctgtactctgggataagcctgggaaactgggtctaataccggatatgaccttcggaggcatcttcgagggtggaaagttccggcggtatgggatgaacccgcggcctatcagcttgttggtggggtaatggcctaccaaggcgacgacgggtagccggcctgagagggtgaccggccacactgggactgagacacggcccagactcctacgggaggcagcagtggggaatattgcacaatgggcgcaagcctgatgcagcgacgccgcgtgagggatgacggccttcgggttgtaaacctctttcgccagggacgaagcgcaagtgacggtacctggataagaagcaccggctaactacgtgccagcagccgcggtaatacgtagggtgcgagcgttgtccggaattattgggcgtaaagagctcgtaggcggtttgtcgcgtcggccgtgaaatctccacgcttaacgtggagcgtgcggtcgatacgggcagacttgagttcggcaggggagactggaattcctggtgtagcggtgaaatgcgcagatatcaggaggaacaccggtggcgaaggcgggtctctgggccgatactgacgctgaggagcgaaagcgtggggagcgaacaggattagataccctggtagtccacgctgtaaacgttgggcgctaggtgtgggcgacattccacgttgtccgtgccgtagctaacgcattaagcgccccgcctggggagtacggccgcaaggctaaaactcaaaggaattgacgggggcccgcacaagcggcggagcatgtggattaattcgatgcaacgcgaagaaccttacctgggcttgacatgcgccagacatccccagagatggggcttcccttgtggttggtgtacaggtggtgcatggctgtcgtcagctcgtgtcgtgagatgttgggttaagtcccgcaacgagcgcaacccttatcctacgttgccagcgcgtcatggcggggactcgtgggagactgccggggtcaactcggaggaaggtggggatgacgtcaagtcatcatgccccttatgtccagggcttcacacatgctacaatggctggtacagagggctgcgataccgcgaggtggagcgaatcccttaaagccggtctcagttcggatcgcagtctgcaactcgactgcgtgaagtcggagtcgctagtaatcgcagatcagcaacgctgcggtgaatacgttcccgggccttgtacacaccgcccgtcacgtcatgaaagtcggtaacacccgaagcccatggcccaacccgcaagggagggagtggtcgaaggtgggactggcgattgggacgaagtcgtaacaaggtagccgtaccggaaggtgcggctggatcacctccttt

SEQ ID NO: 1156 - DNA, 1495 bp, artificial sequence; identical to SEQ ID NO: 1074
  ERR2221337_01604_Bifidobacterium_animalis

SEQ ID NO: 1157 - DNA, 1482 bp, artificial sequence
  ERR2221385_01604_Bifidobacterium_animalis
atccgtttgatcctggcggaggccactgctattgggtttcgattaagccatgcaagtcgtacgatcctttcggggtcgtggcatacggctcagtaacacgtggataacctacccttaggactgggataaccccgggaaactggggacaataccggatatgtagagttgcctggaattggtactctattgaaatgtattcgtgcgcctaaggatggatctgcggcagattaggtagttggcggggtaaatgcccaccaagccagtaatctgtacgggttgtgagagcaagagcccggagatggaacctgagacaaggttccaggccctacggggcgcagcaggcgcgaaacctccgcaatgcacgaaagtgcgacgggggaaacccaagtgccactcttaacggggtggcttttcttaagtgtaaaaagcttttggaataagagctgggcaagaccggtgccagccgccgcggtaacaccggcagctcaagtggtggccatttttattgggcctaaagcgttcgtagccggtttgataagtctctggtgaaatctcacggcttaaccgtgagaattgctggagatactattaggcttgaggccgggagaggttagcggtactcccagggtaggggtgaaatcctataatcctgggaggaccacctgtggcgaaggcggctaactggaacggacctgacggtgagtaacgaaagccaggggcgcgaaccggattagatacccgggtagtcctggccgtaaacgatgtggacttggtgttgggatggctccgagctgccccagtgccgaagggaagctgttaagtccaccgcctgggaagtacggtcgcaagactgaaacttaaaggaattggcgggggagcaccacaacgcgtggagcctgcggtttaattggattcaacgccggacatctcaccaggggcgacagcagaatgatagccaggttgatgaccttgcttgacaagctgagaggaggtgcatggccgccgtcagctcgtaccgtgaggcgtcctgttaagtcaggcaacgagcgagacccacgcccttagttaccagcggatcctttgggatgccgggcacactaaggggaccgccagtgataaactggaggaaggagtggacgacggtaggtccgtatgccccgaatcccctgggctacacgcgggctacaatggctaggacaatgggttccgacactgaaaagtgaaggtaatctcctaaacctagccttagttcggattgagggctgtaactcgccctcatgaagctggaatgcgtagtaatcgcgtgtcataaccgcgcggtgaatacgtccctgctccttgcacacaccgcccgtcacgccacccaaaaagggtttggatgaggccatagtctttgttggttatggtcgaatctgggttctttgaggagggcgaagtcgtaacaaggtagccgtaggggaacctgcggctggatcacctcct

SEQ ID NO: 1158 - DNA, 1546 bp, artificial sequence
  GCF_000021425.1_00743_Bifidobacterium_animalis
aatgagagtttgatcctggctcaggacgaacgctggcggcgtgcctaatacatgcaagtagaacgctgaggactggtgcttgcaccggtccaaggagttgcgaacgggtgagtaacgcgtaggtaacctacctcatagcgggggataactattggaaacgatagctaataccgcatgacaatggaggactcatgtctttcatttaaaaggtgcaattgcatcactatgagatggacctgcgttgtattagctagttggtgaggtaacggctcaccaaggcgacgatacatagccgacctgagagggtgatcggccacactgggactgagacacggcccagactcctacgggaggcagcagtagggaatcttcggcaatggacggaagtctgaccgagcaacgccgcgtgagtgaagaaggttttcggatcgtaaagctctgttgttagagaagaatgatggtgggagtggaaaatccaccatgtgacggtaactaaccagaaagggacggctaactacgtgccagcagccgcggtaatacgtaggtcccgagcgttgtccggatttattgggcgtaaagcgagcgcaggcggttctttaagtctgaagttaaaggcagtggctcaaccattgtacgctttggaaactggagaacttgagtgcagaaggggagagtggaattccatgtgtagcggtgaaatgcgtagatatatggaggaacaccggtggcgaaagcggctctctggtctgtaactgacgctgaggctcgaaagcgtggggagcaaacaggattagataccctggtagtccacgccgtaaacgatgagtgctaggtgttaggccctttccggggcttagtgccggagctaacgcattaagcactccgcctggggagtacgaccgcaaggttgaaactcaaaggaattgacgggggcccgcacaagcggtggagcatgtggtttaattcgaagcaacgcgaagaaccttaccaggtcttgacatcctcctgaccggtctagagataggctttcccttcggggcaggagtgacaggtggtgcatggttgtcgtcagctcgtgtcgtgagatgttgggttaagtcccgcaacgagcgcaacccctattgttagttgccatcattaagttgggcactctagcgagactgccggtaataaaccggaggaaggtggggatgacgtcaaatcatcatgccccttatgacctgggctacacacgtgctacaatggttggtacaacgagtcgcaagccggtgacggcaagctaatctcttaaagccaatctcagttcggattgtaggctgcaactcgcctacatgaagtcggaatcgctagtaatcgcggatcagcacgccgcggtgaatacgttcccgggccttgtacacaccgcccgtcacaccacgagagtttgtaacacccgaagtcggtgaggtaacctattaggagccagccgcctaaggtgggatagatgattggggtgaagtcgtaacaaggtagccgtatcggaaggtgcggctggatcacctccttt

SEQ ID NO: 1159 - DNA, 1546 bp, artificial sequence; identical to SEQ ID NO: 1158
  GCF_000021425.1_00905_Bifidobacterium_animalis

SEQ ID NO: 1160 - DNA, 1538 bp, artificial sequence
  GCF_000022705.1_01279_Bifidobacterium_animalis
ttgaagagtttgatcatggctcagattgaacgctggcggcaggcctaacacatgcaagtcgagcggcagcggaaagtagcttgctactttgccggcgagcggcggacgggtgagtaatgtctgggaaactgcctgatggagggggataactactggaaacggtagctaataccgcataacgtcgcaagaccaaagagggggaccttcgggcctcttgccatcagatgtgcccagatgggattagctagtaggtggggtaacggctcacctaggcgacgatccctagctggtctgagaggatgaccagccacactggaactgagacacggtccagactcctacgggaggcagcagtggggaatattgcacaatgggcgcaagcctgatgcagccatgccgcgtgtatgaagaaggccttcgggttgtaaagtactttcagcggggaggaaggcgataaggttaataaccttgtcgattgacgttacccgcagaagaagcaccggctaactccgtgccagcagccgcggtaatacggagggtgcaagcgttaatcggaattactgggcgtaaagcgcacgcaggcggtctgtcaagtcggatgtgaaatccccgggctcaacctgggaactgcattcgaaactggcaggctagagtcttgtagaggggggtagaattccaggtgtagcggtgaaatgcgtagagatctggaggaataccggtggcgaaggcggccccctggacaaagactgacgctcaggtgcgaaagcgtggggagcaaacaggattagataccctggtagtccacgccgtaaacgatgtcgacttggaggttgtgcccttgaggcgtggcttccggagctaacgcgttaagtcgaccgcctggggagtacggccgcaaggttaaaactcaaatgaattgacgggggcccgcacaagcggtggagcatgtggtttaattcgatgcaacgcgaagaaccttacctactcttgacatccagagaacttagcagagatgctttggtgccttcgggaactctgagacaggtgctgcatggctgtcgtcagctcgtgttgtgaaatgttgggttaagtcccgcaacgagcgcaacccttatcctttgttgccagcggttaggccgggaactcaaaggagactgccagtgataaactggaggaaggtggggatgacgtcaagtcatcatggcccttacgagtagggctacacacgtgctacaatggcgcatacaaagagaagcgacctcgcgagagcaagcggacctcataaagtgcgtcgtagtccggattggagtctgcaactcgactccatgaagtcggaatcgctagtaatcgtagatcagaatgctacggtgaatacgttcccgggccttgtacacaccgcccgtcacaccatgggagtgggttgcaaaagaagtaggtagcttaaccttcgggagggcgcttaccactttgtgattcatgactggggtgaagtcgtaacaaggtaaccgtaggggaacctgcggttggatcacctcctt

SEQ ID NO: 1161 - DNA, 1538 bp, artificial sequence; identical to SEQ ID NO: 1160
  GCF_000022705.1_01505_Bifidobacterium_animalis

SEQ ID NO: 1162 - DNA, 1482 bp, artificial sequence
  GCF_000022705.1_01577_Bifidobacterium_animalis
cttgagagtttgatcctggctcagaacgaacgctggcggcaggcttaacacatgcaagtcgagcgccccgcaaggggagcggcagacgggtgagtaacgcgtgggaatctacccatctctacggaacaactccgggaaactggagctaataccgtatacgtccttcgggagaaagatttatcggagatggatgagcccgcgttggattagctagttggtggggtaatggcctaccaaggcgacgatccatagctggtctgagaggatgatcagccacattgggactgagacacggcccaaactcctacgggaggcagcagtggggaatattggacaatgggcgaaagcctgatccagccatgccgcgtgagtgatgaaggccctagggttgtaaagctctttcaacggtgaagataatgacggtaaccgtagaagaagccccggctaacttcgtgccagcagccgcggtaatacgaagggggctagcgttgttcggaattactgggcgtaaagcgcacgtaggcggattgttaagttaggggtgaaatcccagggctcaaccctggaactgcctttaatactggcaatctcgagtccgagagaggtgagtggaattccgagtgtagaggtgaaattcgtagatattcggaggaacaccagtggcgaaggcggctcactggctcggtactgacgctgaggtgcgaaagcgtggggagcaaacaggattagataccctggtagtccacgccgtaaactatgagagctagccgtcggcaagtttacttgtcggtggcgcagctaacgcattaagctctccgcctggggagtacggtcgcaagattaaaactcaaaggaattgacgggggcccgcacaagcggtggagcatgtggtttaattcgaagcaacgcgcagaaccttaccagcccttgacatcccggtcgcggtttccagagatggattccttcagttcggctggaccggtgacaggtgctgcatggctgtcgtcagctcgtgtcgtgagatgttgggttaagtcccgcaacgagcgcaaccctcgcccttagttgccagcattaagttgggcactctaaggggactgccggtgataagccgagaggaaggtggggatgacgtcaagtcctcatggcccttacgggctgggctacacacgtgctacaatggtggtgacagtgggcagcgagaccgcgaggtcgagctaatctccaaaaaccatctcagttcggattgcactctgcaactcgagtgcatgaagttggaatcgctagtaatcgcggatcagcatgccgcggtgaatacgttcccgggccttgtacacaccgcccgtcacaccatgggagttggttttacccgaaggcgctgtgctaaccgcaaggaggcaggcgaccacggtagggtcagcgactggggtgaagtcgtaacaaggtagccgtaggggaacctgcggctggatcacctccttt

SEQ ID NO: 1163 - DNA, 1468 bp, artificial sequence
  GCF_000022705.1_01583_Bifidobacterium_animalis
ttgagagtttgatcctggctcagaacgaacgctggcggcaggcctaacacatgcaagtcgagcgcactctcaaccttcgggcggggagcgagcggcggacgggttagtaacgcgtgggaatgtacccttcactaaggaatagcctctggaaacggagagtaataccttatacgcccttcggggaaagatttatcggtgaaggatcagcccgcgtaagattagatagttggtggggtaatggcctaccaagtctacgatctttagctggttttagaggatgatcagcaacactgggactgagacacggcccagactcctacgggaggcagcagtgggaatcttggacaatgggcgcaagcctgatccagccatgccgcgtgtgtgatgaaggccttagggtcgtaaagcactttcgctagagatgataatgacagtatctagtaaagaagtcccggctaactccgtgccagcagccgcggtaatacggagggactagcgttgttcggaattactgggcgtaaagcgtacgtaggcggatcagaaagtatggggtgaaatcccagggctcaaccctggaactgcctcataaactcctggtctagagttcgagagaggtgagtggaattccgagtgtagaggtgaaattcgtagatattcggaggaacaccagtggcgaaggcggctcactggctcgatactgacgctgaggtacgaaagtgtggggagcaaacaggattagataccctggtagtccacaccgtaaacgatgaatgccagtcgtcgggtagcatgctattcggtgacacacctaacggattaagcattccgcctggggagtacggtcgcaagattaaaactcaaaggaattgacgggggcccgcacaagcggtggagcatgtggtttaattcgaagcaacgcgcagaaccttaccaacccttgacatcctaggacaacctgagagatcaggccttccttcgggacctagtgacaggtgctgcatggctgtcgtcagctcgtgtcgtgagatgttcggttaagtccggcaacgagcgcaacccacatccttagttgccagcagttcggctgggcactctaaggaaactgcccgtgataagcgggaggaaggtgtggatgacgtcaagtcctcatggcccttacgggttgggctacacacgtgctacaatggcagtgacaatgggttaatcccaaaaactgtctcagttcggattggggtctgcaactcgaccccatgaagtcggaatcgctagtaatcgcgtaacagcatgacgcggtgaatacgttcccgggccttgtacacaccgcccgtcacaccatgggagttgggtctacccgaaggccgtgcgccaacctagcaataggaggcagcggaccacggtgggttcagcgactggggtgaagtcgtaacaaggtagccgtaggggaacctgcggctggatcacctccttt

SEQ ID NO: 1164 - DNA, 1482 bp, artificial sequence
  GCF_000025245.1_00154_Bifidobacterium_animalis
cttgagagtttgatcctggctcagaacgaacgctggcggcaggcttaacacatgcaagtcgagcgcgtagcaatacgagcggcagacgggtgagtaacgcgtgggaatctacccatctctacggaacaactccgggaaactggagctaataccgtatacgtccttttggagaaagatttatcggagatggatgagcccgcgttggattagctagttggtggggtaatggcctaccaaggcgacgatccatagctggtctgagaggatgatcagccacactgggactgagacacggcccagactcctacgggaggcagcagtggggaatattggacaatgggcgaaagcctgatccagccatgccgcgtgagtgatgaaggccctagggttgtaaagctctttcaacggtgaagataatgacggtaaccgtagaagaagccccggctaacttcgtgccagcagccgcggtaatacgaagggggctagcgttgttcggaattactgggcgtaaagcgcacgtaggcggatacttaagtcaggggtgaaatcccggggctcaaccccggaactgcctttgatactgggtatctcgagtccggaagaggtgagtggaattccgagtgtagaggtgaaattcgtagatattcggaggaacaccagtggcgaaggcggctcactggtccggtactgacgctgaggtgcgaaagcgtggggagcaaacaggattagataccctggtagtccacgccgtaaacgatggaagctagccgttggcaagtttacttgtcggtggcgcagctaacgcattaagcttcccgcctggggagtacggtcgcaagattaaaactcaaaggaattgacgggggcccgcacaagcggtggagcatgtggtttaattcgaagcaacgcgcagaaccttaccagcccttgacatcccggtcgcggtttccagagatggataccttcagttcggctggaccggtgacaggtgctgcatggctgtcgtcagctcgtgtcgtgagatgttgggttaagtcccgcaacgagcgcaaccctcgcccttagttgccagcattcagttgggcactctaaggggactgccggtgataagccgagaggaaggtggggatgacgtcaagtcctcatggcccttacgggctgggctacacacgtgctacaatggtggtgacagtgggcagcgagaccgcgaggtcgagctaatctccaaaagccatctcagttcggattgcactctgcaactcgagtgcatgaagttggaatcgctagtaatcgcggatcagcatgccgcggtgaatacgttcccgggccttgtacacaccgcccgtcacaccatgggagttggttttacccgaaggcgctgtgctaaccgcaaggaggcaggcgaccacggtagggtcagcgactggggtgaagtcgtaacaaggtagccgtaggggaacctgcggctggatcacctccttt

SEQ ID NO: 1165 - DNA, 1482 bp, artificial sequence
  GCF_000025245.1_00380_Bifidobacterium_animalis
cttgagagtttgatcctggctcagaacgaacgctggcggcaggcttaacacatgcaagtcgagcgccccgcaaggggagcggcagacgggtgagtaacgcgtgggaatctacccatctctacggaacaactccgggaaactggagctaataccgtatacgtccttcgggagaaagatttatcggagatggatgagcccgcgttggattagctagttggtggggtaatggcctaccaaggcgacgatccatagctggtctgagaggatgatcagccacactgggactgagacacggcccagactcctacgggaggcagcagtggggaatattggacaatgggcgaaagcctgatccagccatgccgcgtgagtgatgaaggccctagggttgtaaagctctttcaacggtgaagataatgacggtaaccgtagaagaagccccggctaacttcgtgccagcagccgcggtaatacgaagggggctagcgttgttcggaattactgggcgtaaagcgcacgtaggcggatacttaagtcaggggtgaaatcccggggctcaaccccggaactgcctttgatactgggtatctggagtccggaagaggtgagtggaattccgagtgtagaggtgaaattcgtagatattcggaggaacaccagtggcgaaggcggctcactggtccggtactgacgctgaggtgcgaaagcgtggggagcaaacaggattagataccctggtagtccacgccgtaaacgatggaagctagccgttggcaagtttacttgtcggtggcgcagctaacgcattaagcttcccgcctggggagtacggtcgcaagattaaaactcaaaggaattgacgggggcccgcacaagcggtggagcatgtggtttaattcgaagcaacgcgcagaaccttaccagcccttgacatcccggtcgcggtttccagaaatggaaaccttcagttcggctggaccggtgacaggtgctgcatggctgtcgtcagctcgtgtcgtgagatgttgggttaagtcccgcaacgagcgcaaccctcgcccttagttgccatcattcagttgggcactctaaggggactgccggtgataagccgagaggaaggtggggatgacgtcaagtcctcatggcccttacgggctgggctacacacgtgctacaatggtggtgacagtgggcagcgagaccgcgaggtcgagctaatctccaaaagccatctcagttcggattgcactctgcaactcgagtgcatgaagttggaatcgctagtaatcgcggatcagcatgccgcggtgaatacgttcccgggccttgtacacaccgcccgtcacaccatgggagttggttttacccgaaggcgctgtgctaaccgcaaggaggcaggcgaccacggtagggtcagcgactggggtgaagtcgtaacaaggtagccgtaggggaacctgcggctggatcacctccttt

SEQ ID NO: 1166 - DNA, 1482 bp, artificial sequence; identical to SEQ ID NO: 1165
  GCF_000025245.1_00451_Bifidobacterium_animalis

SEQ ID NO: 1167 - DNA, 1482 bp, artificial sequence
  GCF_000025245.1_00457_Bifidobacterium_animalis
cttgagagtttgatcctggctcagaacgaacgctggcggcaggcttaacacatgcaagtcgagcgccccgcaaggggagcggcagacgggtgagtaacgcgtgggaatctacccatctctacggaacaactccgggaaactggagctaataccgtatacgtccttcgggagaaagatttatcggagatggatgagcccgcgttggattagctagttggtggggtaatggcctaccaaggcgacgatccatagctggtctgagaggatgatcagccacattgggactgagacacggcccaaactcctacgggaggcagcagtggggaatattggacaatgggcgaaagcctgatccagccatgccgcgtgagtgatgaaggccctagggttgtaaagctctttcaacggtgaagataatgacggtaaccgtagaagaagccccggctaacttcgtgccagcagccgcggtaatacgaagggggctagcgttgttcggaattactgggcgtaaagcgcacgtaggcggattgttaagttaggggtgaaatcccagggctcaaccctggaactgcctttaatactggcaatctcgagtccgagagaggtgagtggaattccgagtgtagaggtgaaattcgtagatattcggaggaacaccagtggcgaaggcggctcactggctcggtactgacgctgaggtgcgaaagcgtggggagcaaacaggattagataccctggtagtccacgccgtaaactatgagagctagccgtcggcaagtttacttgtcggtggcgcagctaacgcattaagctctccgcctggggagtacggtcgcaagattaaaactcaaaggaattgacgggggcccgcacaagcggtggagcatgtggtttaattcgaagcaacgcgcagaaccttaccagcccttgacatcccggtcgcggtttccagagatggataccttcagttcggctggaccggtgacaggtgctgcatggctgtcgtcagctcgtgtcgtgagatgttgggttaagtcccgcaacgagcgcaaccctcgcccttagttgccagcattaagttgggcactctaaggggactgccggtgataagccgagaggaaggtggggatgacgtcaagtcctcatggcccttacgggctgggctacacacgtgctacaatggtggtgacagtgggcagcgagaccgcgaggtcgagctaatctccaaaaaccatctcagttcggattgcactctgcaactcgagtgcatgaagttggaatcgctagtaatcgcggatcagcatgccgcggtgaatacgttcccgggccttgtacacaccgcccgtcacaccatgggagttggttttacccgaaggcgctgtgctaaccgcaaggaggcaggcgaccacggtagggtcagcgactggggtgaagtcgtaacaaggtagccgtaggggaacctgcggctggatcacctccttt

SEQ ID NO: 1168 - DNA, 1548 bp, artificial sequence
  GCF_000260715.1_01281_Bifidobacterium_animalis
tatggagagtttgatcctggctcaggatgaacgctggcggcgtgcctaatacatgcaagtcgagcgaacagacgaggagcttgctcctctgacgttagcggcggacgggtgagtaacacgtggataacctacctataagactgggataacttcgggaaaccggagctaataccggataatatattgaaccgcatggttcaatagtgaaagacggttttgctgtcacttatagatggatccgcgccgcattagctagttggtaaggtaacggcttaccaaggcaacgatgcgtagccgacctgagagggtgatcggccacactggaactgagacacggtccagactcctacgggaggcagcagtagggaatcttccgcaatgggcgaaagcctgacggagcaacgccgcgtgagtgatgaaggtcttcggatcgtaaaactctgttattagggaagaacaaatgtgtaagtaactatgcacgtcttgacggtacctaatcagaaagccacggctaactacgtgccagcagccgcggtaatacgtaggtggcaagcgttatccggaattattgggcgtaaagcgcgcgtaggcggttttttaagtctgatgtgaaagcccacggctcaaccgtggagggtcattggaaactggaaaacttgagtgcagaagaggaaagtggaattccatgtgtagcggtgaaatgcgcagagatatggaggaacaccagtggcgaaggcgactttctggtctgtaactgacgctgatgtgcgaaagcgtggggatcaaacaggattagataccctggtagtccacgccgtaaacgatgagtgctaagtgttagggggtttccgccccttagtgctgcagctaacgcattaagcactccgcctggggagtacgaccgcaaggttgaaactcaaaggaattgacggggacccgcacaagcggtggagcatgtggtttaattcgaagcaacgcgaagaaccttaccaaatcttgacatcctctgacccctctagagatagagttttccccttcgggggacagagtgacaggtggtgcatggttgtcgtcagctcgtgtcgtgagatgttgggttaagtcccgcaacgagcgcaacccttaagcttagttgccatcattaagttgggcactctaagttgactgccggtgacaaaccggaggaaggtggggatgacgtcaaatcatcatgccccttatgatttgggctacacacgtgctacaatggacaatacaaagggcagcgaaaccgcgaggtcaagcaaatcccataaagttgttctcagttcggattgtagtctgcaactcgactatatgaagctggaatcgctagtaatcgtagatcagcatgctacggtgaatacgttcccgggtcttgtacacaccgcccgtcacaccacgagagtttgtaacacccgaagccggtggagtaaccatttggagctagccgtcgaaggtgggacaaatgattggggtgaagtcgtaacaaggtagccgtatcggaaggtgcggctggatcacctcctt

SEQ ID NO: 1169 - DNA, 1548 bp, artificial sequence
  GCF_000260715.1_01488_Bifidobacterium_animalis
tatggagagtttgatcctggctcaggatgaacgctggcggcgtgcctaatacatgcaagtcgagcgaacagatgaggagcttgctcctctgacgttagcggcggacgggtgagtaacacgtggataacctacctataagactgggataacttcgggaaaccggagctaataccggataatatattgaaccgcatggttcaatagtgaaagacggttttgctgtcacttatagatggatccgcgccgcattagctagttggtaaggtaacggcttaccaaggcaacgatgcgtagccgacctgagagggtgatcggccacactggaactgagacacggtccagactcctacgggaggcagcagtagggaatcttccgcaatgggcgaaagcctgacggagcaacgccgcgtgagtgatgaaggtcttcggatcgtaaaactctgttattagggaagaacaaatgtgtaagtaactatgcacgtcttgacggtacctaatcagaaagccacggctaactacgtgccagcagccgcggtaatacgtaggtggcaagcgttatccggaattattgggcgtaaagcgcgcgtaggcggttttttaagtctgatgtgaaagcccacggctcaaccgtggagggtcattggaaactggaaaacttgagtgcagaagaggaaagtggaattccatgtgtagcggtgaaatgcgcagagatatggaggaacaccagtggcgaaggcgactttctggtctgtaactgacgctgatgtgcgaaagcgtggggatcaaacaggattagataccctggtagtccacgccgtaaacgatgagtgctaagtgttagggggtttccgccccttagtgctgcagctaacgcattaagcactccgcctggggagtacgaccgcaaggttgaaactcaaaggaattgacggggacccgcacaagcggtggagcatgtggtttaattcgaagcaacgcgaagaaccttaccaaatcttgacatcctctgacccctctagagatagagttttccccttcgggggacagagtgacaggtggtgcatggttgtcgtcagctcgtgtcgtgagatgttgggttaagtcccgcaacgagcgcaacccttaagcttagttgccatcattaagttgggcactctaagttgactgccggtgacaaaccggaggaaggtggggatgacgtcaaatcatcatgccccttatgatttgggctacacacgtgctacaatggacaatacaaagggcagcgaaaccgcgaggtcaagcaaatcccataaagttgttctcagttcggattgtagtctgcaactcgactatatgaagctggaatcgctagtaatcgtagatcagcatgctacggtgaatacgttcccgggtcttgtacacaccgcccgtcacaccacgagagtttgtaacacccgaagccggtggagtaaccatttggagctagccgtcgaaggtgggacaaatgattggggtgaagtcgtaacaaggtagccgtatcggaaggtgcggctggatcacctcctt

SEQ ID NO: 1170 - DNA, 1548 bp, artificial sequence; identical to SEQ ID NO: 1168
  GCF_000260715.1_01558_Bifidobacterium_animalis

SEQ ID NO: 1171 - DNA, 1548 bp, artificial sequence; identical to SEQ ID NO: 1168
  GCF_000260715.1_01564_Bifidobacterium_animalis

SEQ ID NO: 1172 - DNA, 1538 bp, artificial sequence
  GCF_000471945.1_01321_Bifidobacterium_animalis
gtggagggttcgattctggctcaggatgaacgctggcggcgtgcttaacacatgcaagtcgaacgggatccctggcggcctggctgccggggtgagagtggcgaacgggtgagtaatgcgtgaccaacctgccctgtgcaccggaatagctcctggaaacgggtggtaataccggatgctccgccccaccgcatggtggggtgggaaatgctttttgcggcatgggatggggtcgcgtcctatcagcttgttggcggggtgatggcccaccaaggcgttgacgggtagccggcctgagagggtgaccggccacattgggactgagatacggcccagactcctacgggaggcagcagtggggaatattgcacaatgggcgcaagcctgatgcagcgacgccgcgtgcgggatggaggccttcgggttgtaaaccgcttttgttcaagggcaaggcacggcttcgggccgtgttgagtggattgttcgaataagcaccggctaactacgtgccagcagccgcggtaatacgtagggtgcgagcgttatccggatttattgggcgtaaagggctcgtaggcggttcgtcgcgtccggtgtgaaagtccatcgcctaacggtggatctgcgccgggtacgggcgggctggagtgcggtaggggagactggaattcccggtgtaacggtggaatgtgtagatatcgggaagaacaccaatggcgaaggcaggtctctgggccgttactgacgctgaggagcgaaagcgtggggagcgaacaggattagataccctggtagtccacgccgtaaacggtggatgctggatgtggggccctttccacgggtcctgtgtcggagccaacgcgttaagcatcccgcctggggagtacggccgcaaggctaaaactcaaagaaattgacgggggcccgcacaagcggcggagcatgcggattaattcgatgcaacgcgaagaaccttacctgggcttgacatgtgccggatcgccccggaaacggggtttcccttcggggccggttcacaggtggtgcatggtcgtcgtcagctcgtgtcgtgagatgttgggttaagtcccgcaacgagcgcaaccctcgccgcatgttgccagcgggttatgccgggaactcatgtgggaccgccggggtcaactcggaggaaggtggggatgacgtcagatcatcatgccccttacgtccagggcttcacgcatgctacaatggccggtacaacgcgatgcgacacggtgacgtggggcggatcgctgaaaaccggtctcagttcggatcgcagtctgcaactcgactgcgtgaaggcggagtcgctagtaatcgcggatcagcaacgccgcggtgaatgcgttcccgggccttgtacacaccgcccgtcaagtcatgaaagtgggtagcacccgaagccggtggcccgaccctcgtggggggagccgtctaaggtgagactcgtgattgggactaagtcgtaacaaggtagccgtaccggaaggtgcggctggatcacctccttt

SEQ ID NO: 1173 - DNA, 1527 bp, artificial sequence
  GCF_000471945.1_01550_Bifidobacterium_animalis
tgaagagtttgatcctggctcagattgaacgctggcggcatgccttacacatgcaagtcgaacggcagcacgggcttcggcctggtggcgagtggtgaacgggtgagtaatacatcggaacatgtcctgtagtgggggatagcccggcgaaagccggattaataccgcatacgatctgaggatgaaagcgggggaccttcgggcctcgcgctatagggttggccgatggctgattagctagttggtggggtaaaggcctaccaaggcgacgatcagtagctggtctgagaggacgaccagccacactgggactgagacacggcccagactcctacgggaggcagcagtggggaattttggacaatgggcgcaagcctgatccagcaatgccgcgtgtgtgaagaaggccttcgggttgtaaagcacttttgtccggaaagaaatcattctggctaatacccggagtggatgacggtaccggaagaataagcaccggctaactacgtgccagcagccgcggtaatacgtagggtgcgagcgttaatcggaattactgggcgtaaagcgtgcgcaggcggtttgctaagaccgatgtgaaatccccgggctcaacctgggaactgcattggtgactggcaggctagagtatggcagaggggggtagaattccacgtgtagcagtgaaatgcgtagagatgtggaggaataccgatggcgaaggcagccccctgggccaatactgacgctcatgcacgaaagcgtggggagcaaacaggattagataccctggtagtccacgccctaaacgatgtcaactagttgttggggattcatttccttagtaacgtagctaacgcgtgaagttgaccgcctggggagtacggtcgcaagattaaaactcaaaggaattgacggggacccgcacaagcggtggatgatgtggattaattcgatgcaacgcgaaaaaccttacctacccttgacatggtcggaagcccgatgagagttgggcgtgctcgaaagagaaccggcgcacaggtgctgcatggctgtcgtcagctcgtgtcgtgagatgttgggttaagtcccgcaacgagcgcaacccttgtccttagttgctacgcaagagcactctaaggagactgccggtgacaaaccggaggaaggtggggatgacgtcaagtcctcatggcccttatgggtagggcttcacacgtcatacaatggtcggaacagagggtcgccaacccgcgagggggagccaatcccagaaaaccgatcgtagtccggattgcactctgcaactcgagtgcatgaagctggaatcgctagtaatcgcggatcagcatgccgcggtgaatacgttcccgggtcttgtacacaccgcccgtcacaccatgggagtgggttttaccagaagtggctagtctaaccgcaaggaggacggtcaccacggtaggattcatgactggggtgaagtcgtaacaaggtagccgtatcggaaggtgcggctggatcacctccttt

SEQ ID NO: 1174 - DNA, 1527 bp, artificial sequence; identical to SEQ ID NO: 1173
  GCF_000471945.1_01619_Bifidobacterium_animalis

SEQ ID NO: 1175 - DNA, 1527 bp, artificial sequence; identical to SEQ ID NO: 1173
  GCF_000471945.1_01625_Bifidobacterium_animalis

SEQ ID NO: 1176 - DNA, 1545 bp, artificial sequence
  GCF_000612705.1_01621_Bifidobacterium_animalis
aatgagagtttgatcctggctcaggacgaacgctggcggcgtgcctaatacatgcaagtagaacgctgaggtttggtgtttacactagactgatgagttgcgaacgggtgagtaacgcgtaggtaacctgcctcatagcgggggataactattggaaacgatagctaataccgcataagagtaattaacacatgttagttatttaaaaggagcaattgcttcactgtgagatggacctgcgttgtattagctagttggtgaggtaaaggctcaccaaggcgacgatacatagccgacctgagagggtgatcggccacactgggactgagacacggcccagactcctacgggaggcagcagtagggaatcttcggcaatggacggaagtctgaccgagcaacgccgcgtgagtgaagaaggttttcggatcgtaaagctctgttgttagagaagaacgttggtaggagtggaaaatctaccaagtgacggtaactaaccagaaagggacggctaactacgtgccagcagccgcggtaatacgtaggtcccgagcgttgtccggatttattgggcgtaaagcgagcgcaggcggttctttaagtctgaagttaaaggcagtggcttaaccattgtacgctttggaaactggaggacttgagtgcagaaggggagagtggaattccatgtgtagcggtgaaatgcgtagatatatggaggaacaccggtggcgaaagcggctctctggtctgtaactgacgctgaggctcgaaagcgtggggagcaaacaggattagataccctggtagtccacgccgtaaacgatgagtgctaggtgttaggccctttccggggcttagtgccgcagctaacgcattaagcactccgcctggggagtacgaccgcaaggttgaaactcaaaggaattgacgggggcccgcacaagcggtggagcatgtggtttaattcgaagcaacgcgaagaaccttaccaggtcttgacatccttctgaccggcctagagataggctttctcttcggagcagaagtgacaggtggtgcatggttgtcgtcagctcgtgtcgtgagatgttgggttaagtcccgcaacgagcgcaacccctattgttagttgccatcattaagttgggcactctagcgagactgccggtaataaaccggaggaaggtggggatgacgtcaaatcatcatgccccttatgacctgggctacacacgtgctacaatggttggtacaacgagtcgcaagccggtgacggcaagctaatctcttaaagccaatctcagttcggattgtaggctgcaactcgcctacatgaagtcggaatcgctagtaatcgcggatcagcacgccgcggtgaatacgttcccgggccttgtacacaccgcccgtcacaccacgagagtttgtaacacccgaagtcggtgaggtaaccttttaggagccagccgcctaaggtgggatagatgattggggtgaagtcgtaacaaggtagccgtatcggaaggtgcggctggatcacctcctt

SEQ ID NO: 1177 - DNA, 1553 bp, artificial sequence
  GCF_000695895.1_01574_Bifidobacterium_animalis
ttgaagagtttgatcctggctcagcgcgaacgctggcggcatgcctaacacatgcaagtcgtacggagagtggggcaactcactctcagtggcaaacgggtgagtaacgcgtgaataacctgcctttgagaaggggataactgtccgaaaggatagctaataccctatattgccttttgtcactaaggcaaaaggtgaaagcgaggctgtcaaaggcttcggctcaaagaggggttcgcgtcctatcaggtagttggtggggtaatggcctaccaagccaatgacgggtagctggtcttagaggatgatcagccacagtgggactgagacacggcccgcacccctacggggggcagcagtggggaatcgtgggcaatgggcgcaagcctgaccccgcaatgccgcgtgagggaagaagcccttcggggtgtaaacctctgtcagatgggaagatgggactaggggctaatacctcctagtcttgacggtaccatcagaggaagggacggctaactacgtgccagcagccgcggtaatacgtaggtcccgagcgttgcgcgatgttactgggcgtaaagcgtccgtagctggtttcgtaagcggattgtcaaagcccgaagctcaacttcggcaaggcattccgaactgcgttacttgagtcctgttcaggtaggcggaattcccggtgtagcggtgaaatgcgtagatatcgggaggaacaccagtggcgaaggcggcctactgggacggtactgacggtcatggacgaaagctgggggagcaaaccggattagatacccgggtagtcccagccgtaaacgatggatgttaggtgtagtgataacttcgctgcaccccagctaacgcgttaaacatcccgcctggggagtacgggcgcaagcctgaaactcaaaggaattggcgggggcccgcacaaccggtggagcgtctggtttaattcgatgctaaccgaaaaaccttaccagggtttgaaatggtaggaaaggctgtcgaaagatagccgtgtttcccttttgggagaaatcctaccacaggtggtgcatggccgtcgtcagctcgtgttgtgagatgttgggttaagtcccgcaacgagcgcaacccttgtccttatttgcttcctcgtatgaggtgctctataaggagactgccggcgacaagccggaggaaggaggggacgacgtcaggtcagtatgccctttatgccctgggctacacaggcgctacagtggcaaggacaatgagtagcgagagtgcaagctcaagctaatctcacaaaccttgtcgtggtgcgaattgaaggttgaaactcaccttcatgaagccggaatcggtagtaatggcgtatcagctatgtcgccgtgaatacgttcccgggccttgcacacaccgcccgtcacgccacggaagctggtgttttcggaagtcctcaagctaacccgcaagggaggcagaggccgatgaaaacatcggtaactggggcgaagtcgtaacaaggtagccgtaggggaacctgcggctggatcacctccttt

SEQ ID NO: 1178 - DNA, 1555 bp, artificial sequence
  GCF_000695895.1_01580_Bifidobacterium_animalis
ttgaagagtttgatcctggctcagcgcgaacgctggcggcatgcctaacacatgcaagtcgtacggagagtggggcaactcactctcagtggcaaacgggtgagtaacgcgtgaataacctgcctttgagaaggggataactgtccgaaaggatagctaataccctatattgccttttgtcactaaggcaaaaggtgaaagcgaggctgtcaaaggcttcggctcaaagaggggttcgcgtcctatcaggtagttggtggggtaatggcctaccaagccaatgacgggtagctggtcttagaggatgatcagccacagtaggactgagacacggcccgcacccctacggggggcagcagtggggaatcgtgggcaatgggcgcaagcctgaccccgcaatgccgcgtgagggaagaagcccttcggggtgtaaacctctgtcagatgggaagatgggactaggggctaatacctcctagtcttgacggtaccatcagaggaagggacggctaactacgtgccagcagccgcggtaatacgtaggtcccgagcgttgcgcgatgttactgggcgtaaagcgtccgtagctggtttcgtaagcggattgtcaaagcccgaagctcaacttcggcaaggcattccgaactgcgttacttgagtcctgttcaggtaggcggaattcccggtgtagcggtgaaatgcgtagatatcgggaggaacaccagtggcgaaggcggcctaactgggacggtactgacggtcatggacgaaagctgggggagcaaaccggattagatacccgggtagtcccagccgtaaacgatggatgttaggtgtagtgataacttcgctgcaccccagctaacgcgttaaacatcccgcctggggagtacgggcgcaagcctgaaactcaaaggaattgggcgggggcccgcacaaccggtggagcgtctggtttaattcgatgctaaccgaaaaaccttaccagggtttgaaatggtaggaaaggctgtcgaaagatagccgtgtttcccttttgggagaaatcctaccacaggtggtgcatggccgtcgtcagctcgtgttgtgagatgttgggttaagtcccgcaatgagcgcaacccttgtccttatttgcttcctcgtatgaggtgctctataaggagactgccggcgacaagccggaggaaggaggggacgacgtcaggtcagtatgccctttatgccctgggctacacaggcgctacagtggcaaggacaatgagtagcgagagtgcaagctcaagctaatctcacaaaccttgtcgtggtgcgaattgaaggttgaaactcaccttcatgaagccggaatcggtagtaatggcgtatcagctatgtcgccgtgaatacgttcccgggccttgcacacaccgcccgtcacgccacggaagctggtgttttcggaagtcctcaagctaacccgcaagggaggcagaggccgatgaaaacatcggtaactggggcgaagtcgtaacaaggtagccgtaggggaacctgcggctggatcacctccttt

SEQ ID NO: 1179 - DNA, 1532 bp, artificial sequence
  GCF_000817045.1_01283_Bifidobacterium_animalis
taagagtttgatcctggctcagattgaacgctggcggcatgctttacacatgcaagtcggacggcagcgggggtgcttgcacctgccggcgagtggcgaacgggtgagtaacatattggaatgtaccgagtagtgggggataaccaatcgaaagattggctaataccgcatacgtcctgagggggaaagcaggggatcttcggaccttgcgctatttgagcagccaatatctgattagctagttggtggggtaaaggcccaccaaggcgacgatcagtagcgggtctgagaggatgatccgccacactgggactgagacacggcccagactcctacgggaggcagcagtggggaattttggacaatgggggcaaccctgatccagccatgccgcgtgtctgaagaaggccttcgggttgtaaaggacttttgttagggaagaaaagggaagtgttaataccactttttgttgacggtacctaaagaataagcaccggctaactacgtgccagcagccgcggtaatacgtagggtgcgagcgttaatcggaattactgggcgtaaagcgagcgcagacggttacttaagcaggatgtgaaatccccgggctcaacctgggaactgcgttctgaactgggtagctagagtatgtcagaggggggtagaattccacgtgtagcagtgaaatgcgtagagatgtggaggaataccgatggcgaaggcagccccctgggataatactgacgttcatgctcgaaagcgtgggtagcaaacaggattagataccctggtagtccacgccctaaacgatgtcgattagctgttgggcaacttgattgcttagtagcgtagctaacgcgtgaaatcgaccgcctggggagtacggtcgcaagattaaaactcaaaggaattgacggggacccgcacaagcggtggatgatgtggattaattcgatgcaacgcgaagaaccttacctggtcttgacatgtacggaagaactcagagacgagtttgtgccttcgggagccgtaacacaggtgctgcatggctgtcgtcagctcgtgtcgtgagatgttgggttaagtcccgcaacgagcgcaacccttgtcattagttgccatcatttagttgggcactctaatgagactgccggtgacaaaccggaggaaggtggggatgacgtcaagtcctcatggcccttatgaccagggcttcacacgtcatacaatggtcggtacagagggtagccaagccgcgaggtggagccaatcccagaaaaccgatcgtagtccggattgcactctgcaactcgagtgcatgaagtcggaatcgctagtaatcgcaggtcagcatactgcggtgaatacgttcccgggtcttgtacacaccgcccgtcacaccatgggagtgggggataccagaagtaggtagggtaaccgcaaggagcccgcttaccacggtatgcttcatgactggggtgaagtcgtaacaaggtagccgtaggggaacctgcggctggatcacctccttt

SEQ ID NO: 1180 - DNA, 1532 bp, artificial sequence; identical to SEQ ID NO: 1179
  GCF_000817045.1_01508_Bifidobacterium_animalis

SEQ ID NO: 1181 - DNA, 1532 bp, artificial sequence
  GCF_000817045.1_01580_Bifidobacterium_animalis
taagagtttgatcctggctcagattgaacgctggcggcatgctttacacatgcaagtcggacggcagcacgagtacttgtacttggtggcgagtggcgaacgggtgagtaatatattggaacgtaccgagtaatgggggataactatccgaaaggatagctaataccgcatacgctttgagaaggaaagcaggggatcttcggaccttgcgttattcgagcggccaataactgattagctagttggtggggtaagggcctaccaaggcgacgatcagtagtgggtctgagaggatgatccgccacactgggactgagacacggcccagactcctacgggaggcagcagtggggaattttggacaatgggcgaaagcctgatccagccatgccgcgtgtctgaagaaggccttcgggttgtaaaggacttttgttagggaagaaaaggttgatgctaatatcattaactgatgacggtacctaaagaataagcaccggctaactacgtgccagcagccgcggtaatacgtagggtgcgagcgttaatcggaattactgggcgtaaagcgagcgcagacggttagttaagcaagatgtgaaatccccgagctcaacttgggaactgcgttttgaactggctagctagagtgtgtcagaggggggtagaattccacgtgtagcagtgaaatgcgtagagatgtggaggaataccgatggcgaaggcagccccctgggataacactgacgttcatgctcgaaagcgtgggtagcaaacaggattagataccctggtagtccacgccctaaacgatgtcaattagctgttgggcaacttgattgcttagtagcgtagctaacgcgtgaaattgaccgcctggggagtacggtcgcaagattaaaactcaaaggaattgacggggacccgcacaagcggtggatgatgtggattaattcgatgcaacgcgaagaaccttacctggtcttgacatgtacggaagagagtagagatactcttgtgccttcgggagccgtagcacaggtgctgcatggctgtcgtcagctcgtgtcgtgagatgttgggttaagtcccgcaacgagcgcaacccttgtcattagttgccatcattaagttgggcactctaatgagactgccggtgacaaaccggaggaaggtggggatgacgtcaagtcctcatggcccttatgaccagggcttcacacgtcatacaatggtcggtacagagggtagccaagccgcgaggtggagccaatcccagaaaaccgatcgtagtccggattgcactctgcaactcgagtgcatgaagtcggaatcgctagtaatcgcaggtcagcatactgcggtgaatacgttcccgggtcttgtacacaccgcccgtcacaccatgggagtgggggataccagaagtagatagggtaaccgcaaggagcccgtttaccacggtatgtttcatgactggggtgaagtcgtaacaaggtagccgtaggggaacctgcggctggatcacctccttt

SEQ ID NO: 1182 - DNA, 1535 bp, artificial sequence
  GCF_000817045.1_01592_Bifidobacterium_animalis
taagagtttgatcctggctcagattgaacgctggcggcatgctttacacatgcaagtcggacggcagcggggtagtgcttgcactactgccggcgagtggcgaacgggtgagtaatatattggaacgtaccgagtaatgggggataaccaatcgaaagattggctaataccgcatacgctctgaggaggaaagcaggggaccttcgggccttgcgttattcgagcggccaatatctgattagctagttggtggggtaaaggcctaccaaggcgacgatcagtagcgggtctgagaggatgatccgccacactgggactgagacacggcccagactcctacgggaggcagcagtggggaattttggacaatgggcgcaagcctgatccagccatgccgcgtgtctgaagaaggccttcgggttgtaaaggacttttgttagggaagaaaaggaacggttaatacccgtttctgctgacggtacctaaagaataagcaccggctaactacgtgccagcagccgcggtaatacgtagggtgcgagcgttaatcggaattactgggcgtaaagcgagcgcagacggttacttaagcaggatgtgaaatccccgggctcaacctgggaactgcgttctgaactgggtagctagagtatgtcagaggggggtagaattccacgtgtagcagtgaaatgcgtagagatgtggaggaataccgatggcgaaggcagccccctgggataatactgacgttcatgctcgaaagcgtgggtagcaaacaggattagataccctggtagtccacgccctaaacgatgtcgattagctgttgggcagcttgactgcttagtagcgtagctaacgcgtgaaatcgaccgcctggggagtacggtcgcaagattaaaactcaaaggaattgacggggacccgcacaagcggtggatgatgtggattaattcgatgcaacgcgaagaaccttacctggtcttgacatgtacggaaccttccagagacggaagggtgccttcgggagccgtaacacaggtgctgcatggctgtcgtcagctcgtgtcgtgagatgttgggttaagtcccgcaacgagcgcaacccttgtcattagttgccatcatttagttgggcactctaatgagactgccggtgacaaaccggaggaaggtggggatgacgtcaagtcctcatggcccttatgaccagggcttcacacgtcatacaatggtcggtacaaagggtagccaagccgcgaggcggagccaatctcataaaaccgatcgtagtccggattgcactctgcaactcgagtgcatgaagtcggaatcgctagtaatcgcaggtcagcatactgcggtgaatacgttcccgggtcttgtacacaccgcccgtcacaccatgggagtgggggataccagaagtaggtagggtaaccgtaaggagcccgcttaccacggtatgcttcatgactggggtgaagtcgtaacaaggtagccgtaggggaacctgcggctggatcacctccttt

SEQ ID NO: 1183 - DNA, 880 bp, artificial sequence
  GCF_000817045.1_01598_Bifidobacterium_animalis
taagagtttgatcctggctcagattgaacgctggcggcatgctttacacatgcaagtcggacggcagcacgagtacttgtacttggtggcgagtggcgaacgggtgagtaatatattggaacgtaccgagtaatgggggataactatccgaaaggatagctaataccgcatacgctttgagaaggaaagcaggggatcttcggaccttgcgttattcgagcggccaataactgattagctagttggtggggtaagggcccaccaaggcgacgatcagtagcgggtctgagaggatgatccgccacactgggactgagacacggcccagactcctacgggaggcagcagtggggaattttggacaatgggcgaaagcctgatccagccatgccgcgtgtctgaagaaggccttcgggttgtaaaggacttttgttagggaagaaaaggttgatgctaatatcattaactgatgacggtacctaaagaataagcaccggctaactacgtgccagcagccgcggtaatacgtagggtgcgagcgttaatcggaattactgggcgtaaagcgagcgcagacggttagttaagcaagatgtgaaatccctgagctcaacttgggaactgcgttttgaactggctagctagagtgtgtcagaggggggtagaattccacgtgtagcagtgaaatgcgtagagatgtggaggaataccgatggcgaaggcagccccctgggataacactgacgttcatgctcgaaagcgtgggtagcaaacaggattagataccctggtagtccacgccctaaacgatgtcaattagctgttgggcaacttgattgcttagtagcgtagctaacgcgtgaaattgaccgcctgggga

SEQ ID NO: 1184 - DNA, 1538 bp, artificial sequence
  GCF_001039715.1_00174_Bifidobacterium_animalis
ttgaagagtttgatcatggctcagattgaacgctggcggcaggcctaacacatgcaagtcggacggtagcacagaggagcttgctcctcgggtgacgagtggcggacgggtgagtaatgtctggggatctgcccgatagagggggataaccactggaaacggtggctaataccgcataacgtcgcaagaccaaagagggggaccttcgggcctctcactatcggatgaacccagatgggattagctagtaggcggggtaacggcccacctaggcgacgatccctagctggtctgagaggatgaccagccacactggaactgagacacggtccagactcctacgggaggcagcagtggggaatattgcacaatgggcgcaagcctgatgcagccatgccgcgtgtatgaagaaggccttcgggttgtaaagtactttcagcggggaggaaggcgatgtggttaataaccgcgtcgattgacgttacccgcagaagaagcaccggctaactccgtgccagcagccgcggtaatacggagggtgcaagcgttaatcggaattactgggcgtaaagcgcacgcaggcggtctgttaagtcagatgtgaaatccccgggcttaacctgggaactgcatttgaaactggcaggcttgagtctcgtagaggggggtagaattccaggtgtagcggtgaaatgcgtagagatctggaggaataccggtggcgaaggcggccccctggacgaagactgacgctcaggtgcgaaagcgtggggagcaaacaggattagataccctggtagtccacgccgtaaacgatgtcgacttggaggttgttcccttgaggagtggcttccggagctaacgcgttaagtcgaccgcctggggagtacggccgcaaggttaaaactcaaatgaattgacgggggcccgcacaagcggtggagcatgtggtttaattcgatgcaacgcgaagaaccttacctactcttgacatccagagaacttagcagagatgctttggtgccttcgggaactctgagacaggtgctgcatggctgtcgtcagctcgtgttgtgaaatgttgggttaagtcccgcaacgagcgcaacccttatcctttgttgccagcgattcggtcgggaactcaaaggagactgccggtgataaaccggaggaaggtggggatgacgtcaagtcatcatggcccttacgagtagggctacacacgtgctacaatggcgcatacaaagagaagcgacctcgcgagagcaagcggacctcataaagtgcgtcgtagtccggatcggagtctgcaactcgactccgtgaagtcggaatcgctagtaatcgtggatcagaatgccacggtgaatacgttcccgggccttgtacacaccgcccgtcacaccatgggagtgggttgcaaaagaagtaggtagcttaaccttcgggagggcgcttaccactttgtgattcatgactggggtgaagtcgtaacaaggtaaccgtaggggaacctgcggttggatcacctcctt

SEQ ID NO: 1185 - DNA, 1554 bp, artificial sequence
  GCF_001263835.1_01589_Bifidobacterium_animalis
attggagagtttgatcctggctcaggacgaacgctggcggcgtgcctaatacatgcaagtcgagcggagttatttagaagcttgcttctaaataacttagcggcggacgggtgagtaacacgtaggcaacctgcctgtaagactgggataactaccggaaacggtagctaataccggatacacaagttcctcgcatgagggatttgggaaagacggagcaatctgtcacttacggatgggcctgcggcgcattagctagttggtggggtaacggctcaccaaggcgacgatgcgtagccgacctgagagggtgaacggccacactgggactgagacacggcccagactcctacgggaggcagcagtagggaatcttccgcaatggacgaaagtctgacggagcaacgccgcgtgagtgatgaaggttttcggatcgtaaagctctgttgccagggaagaacgcttgagagagtaactgctcttaaggtgacggtacctgagaagaaagccccggctaactacgtgccagcagccgcggtaatacgtagggggcaagcgttgtccggaattattgggcgtaaagcgcgcgcaggcggccatttaagtctggtgtttaatcctggagctcaactccgggtcgcactggaaactgggtggcttgagtgcagaagaggagagtggaattccacgtgtagcggtgaaatgcgtagagatgtggaggaacaccagtggcgaaggcgactctctgggctgtaactgacgctgaggcgcgaaagcgtggggagcaaacaggattagataccctggtagtccacgccgtaaacgatgaatgctaggtgttaggggtttcgatacccttggtgccgaagttaacacattaagcattccgcctggggagtacggtcgcaagactgaaactcaaaggaattgacggggacccgcacaagcagtggagtatgtggtttaattcgaagcaacgcgaagaaccttaccaggtcttgacatccctctgaccggtacagagatgtacctttctttcgggacagaggagacaggtggtgcatggttgtcgtcagctcgtgtcgtgagatgttgggttaagtcccgcaacgagcgcaacccttaactttagttgccagcaggtcaagctgggcactctagagtgactgccggtgacaaaccggaggaaggtggggatgacgtcaaatcatcatgccccttatgacctgggctacacacgtactacaatggccggtacaacgggaagcgaaggagcgatctggagcgaatcctagaaaagccggtctcagttcggattgcaggctgcaactcgcctgcatgaagtcggaattgctagtaatcgcggatcagcatgccgcggtgaatacgttcccgggtcttgtacacaccgcccgtcacaccacgagagtttacaacacccgaagtcggtgaggtaacccgcaagggggccagccgccgaaggtggggtagacgattggggtgaagtcgtaacaaggtagccgtatcggaaggtgcggctggatcacctccttt

SEQ ID NO: 1186 - DNA, 1554 bp, artificial sequence
  GCF_001263975.1_01585_Bifidobacterium_animalis
aatggagagtttgatcctggctcaggacgaacgctggcggcgtgcctaatacatgcaagtcgagcggagttatttagaagcttgcttctaaataacttagcggcggacgggtgagtaacacgtaggcaacctgcctgtaagactgggataactaccggaaacggtagctaataccggatacacaagttcctcgcatgagggatttgggaaagacggagcaatctgtcacttacggatgggcctgcggcgcattagctagttggtggggtaacggctcaccaaggcgacgatgcgtagccgacctgagagggtgaacggccacactgggactgagacacggcccagactcctacgggaggcagcagtagggaatcttccgcaatggacgaaagtctgacggagcaacgccgcgtgagtgatgaaggttttcggatcgtaaagctctgttgccagggaagaacgcttgagagagtaactgctcttgaggtgacggtacctgagaagaaagccccggctaactacgtgccagcagccgcggtaatacgtagggggcaagcgttgtccggaattattgggcgtaaagcgcgcgcaggcggccatttaagtctggtgtttaatcctggagctcaactccgggtcgcactggaaactgggtggcttgagtgcagaagaggagagtggaattccacgtgtagcggtgaaatgcgtagagatgtggaggaacaccagtggcgaaggcgactctctgggctgtaactgacgctgaggcgcgaaagcgtggggagcaaacaggattagataccctggtagtccacgccgtaaacgatgaatgctaggtgttaggggtttcgatacccttggtgccgaagttaacacattaagcattccgcctggggagtacggtcgcaagactgaaactcaaaggaattgacggggacccgcacaagcagtggagtatgtggtttaattcgaagcaacgcgaagaaccttaccaggtcttgacatccctctgaccggtacagagatgtacctttctttcgggacagaggagacaggtggtgcatggttgtcgtcagctcgtgtcgtgagatgttgggttaagtcccgcaacgagcgcaacccttaactttagttgccagcaggtcgagctgggcactctagagtgactgccggtgacaaaccggaggaaggtggggatgacgtcaaatcatcatgccccttatgacctgggctacacacgtactacaatggccggtacaacgggaagcgaaggagcgatctggagcgaatcctagaaaagccggtctcagttcggattgcaggctgcaactcgcctgcatgaagtcggaattgctagtaatcgcggatcagcatgccgcggtgaatacgttcccgggtcttgtacacaccgcccgtcacaccacgagagtttacaacacccgaagtcggtgaggtaacccgcaagggggccagccgccgaaggtggggtagacgattggggtgaagtcgtaacaaggtagccgtatcggaaggtgcggctggatcacctccttt

SEQ ID NO: 1187 - DNA, 1555 bp, artificial sequence
  GCF_001264055.1_01640_Bifidobacterium_animalis
attggagagtttgatcctggctcaggacgaacgctggcggcgtgcctaatacatgcaagtcgagcggagttatttggaagcttgcttctaaataacttagcggcggacgggtgagtaacacgtaggcaacctgcctgtaagactgggataactaccggaaacggtagctaataccggatacacaagttcctcgcatgagggatttgggaaagacggagcaatctgtcacttacggatgggcctgcggcgcattagctagttggtggggtaacggctcaccaaggcgacgatgcgtagccgacctgagagggtgaacggccacactgggactgagacacggcccagactcctacgggaggcagcagtagggaatcttccgcaatggacgaaagtctgacggagcaacgccgcgtgagtgatgaaggttttcggatcgtaaagctctgttgccagggaagaacgcttgagagagtaactgctcttaaggtgacggtacctgagaagaaagccccggctaactacgtgccagcagccgcggtaatacgtagggggcaagcgttgtccggaattattgggcgtaaagcgcgcgcaggcggccatttaagtctggtgtttaatcctggagctcaactccgggtcgcactggaaactgggtggcttgagtgcagaagaggagagtggaattccacgtgtagcggtgaaatgcgtagagatgtggaggaacaccagtggcgaaggcgactctctgggctgtaactgacgctgaggcgcgaaagcgtggggagcaaacaggattagataccctggtagtccacgccgtaaacgatgaatgctaggtgttaggggtttcgatacccttggtgccgaagttaacacattaagcattccgcctggggagtacggtcgcaagactgaaactcaaaggaattgacggggacccgcacaagcagtggagtatgtggtttaattcgaagcaacgcgaagaaccttaccaggtcttgacatccctctgaccggtacagagatgtacctttcctttacggacagaggagacaggtggtgcatggttgtcgtcagctcgtgtcgtgagatgttgggttaagtcccgcaacgagcgcaacccttaactttagttgccagcaggtcaagctgggcactctagagtgactgccggtgacaaaccggaggaaggtggggatgacgtcaaatcatcatgccccttatgacctgggctacacacgtactacaatggccggtacaacgggaagcgaaggagcgatctggagcgaatcctagaaaagccggtctcagttcggattgcaggctgcaactcgcctgcatgaagtcggaattgctagtaatcgcggatcagcatgccgcggtgaatacgttcccgggtcttgtacacaccgcccgtcacaccacgagagtttacaacacccgaagtcggtgaggtaacccgcaagggggccagccgccgaaggtggggtagacgattggggtgaagtcgtaacaaggtagccgtatcggaaggtgcggctggatcacctccttt

SEQ ID NO: 1188 - DNA, 1522 bp, artificial sequence
  GCF_001688645.2_00658_Bifidobacterium_animalis
tacggagagtttgatcctggctcaggacgaacgctggcggcgtgcttaacacatgcaagtcgaacgatgaacctggagcttgctctaggggattagtggcgaacgggtgagtaacacgtgagtaacctgcccttgactctgggataacctccggaaacggaagctaataccggatatgacgtacggaggcatctcctgtacgtggaaagaacttcggtcaaggatggactcgcggcctatcaggtagttggtgaggtaacggcccaccaagcctacgacgggtagccggcctgagagggtgaccggccacactgggactgagacacggcccagactcctacgggaggcagcagtggggaatattgcacaatgggcgcaagcctgatgcagcaacgccgcgtgagggatgacggccttcgggttgtaaacctcttttagtagggaagaagcgaaagtgacggtacctgcagaaaaagcaccggctaactacgtgccagcagccgcggtaatacgtagggtgcgagcgttgtccggaattattgggcgtaaagagctcgtaggcggtctgtcgcgtctgctgtgaaaacccgaggctcaacctcgggcctgcagtgggtacgggcagactagagtgcggtaggggagaatggaattcctggtgtagcggtggaatgcgcagatatcaggaggaacaccgatggcgaaggcagttctctgggccgtaactgacgctgaggagcgaaagcgtggggagcgaacaggattagataccctggtagtccacgccgtaaacgttgggcgctagatgtggggaccattccacggtttccgtgtcgcagctaacgcattaagcgccccgcctggggagtacggccgcaaggctaaaactcaaaggaattgacgggggcccgcacaagcggcggagcatgcggattaattcgatgcaacgcgaagaaccttaccaaggcttgacatatacgagaacgggccagaaatggtcaactctttggacactcgtaaacaggtggtgcatggttgtcgtcagctcgtgtcgtgagatgttgggttaagtcccgcaacgagcgcaaccctcgttctatgttgccagcacgtaatggtgggaactcataggagactgccggggtcaactcggaggaaggtggggatgacgtcaaatcatcatgccccttatgtcttgggcttcacgcatgctacaatggccggtacaaagggctgcaataccgtaaggtggagcgaatcccaaaaagccggtctcagttcggattgaggtctgcaactcgacctcatgaagtcggagtcgctagtaatcgcagatcagcaacgctgcggtgaatacgttcccgggccttgtacacaccgcccgtcaagtcatgaaagtcggtaacacccgaagccggtggcccaacccttgtggagggagccgtcgaaggtgggatcggtgattaggactaagtcgtaacaaggtagccgtaccggaaggtgcggctggatcacctccttt

SEQ ID NO: 1189 - DNA, 1522 bp, artificial sequence
  GCF_001688645.2_00664_Bifidobacterium_animalis
tacggagagtttgatcctggctcaggacgaacgctggcggcgtgcttaacacatgcaagtcgaacgatgaacccggagcttgctctggggaattagtggcgaacgggtgagtaacacgtgagtaacctgcccttgactctgggataacctccggaaacggaagctaataccggatatgacgtacggaggcatctcctgtacgtggaaagaatttcggtcaaggatggactcgcggcctatcaggtagttggtgaggtaacggcccaccaagcctacgacgggtagccggcctgagagggtgaccggccacactgggactgagacacggcccagactcctacgggaggcagcagtggggaatattgcacaatgggcgcaagcctgatgcagcaacgccgcgtgagggatgacggccttcgggttgtaaacctcttttagtagggaagaagcgaaagtgacggtacctgcagaaaaagcaccggctaactacgtgccagcagccgcggtaatacgtagggtgcgagcgttgtccggaattattgggcgtaaagagctcgtaggcggtctgtcgcgtctgctgtgaaaacccgaggctcaacctcgggcctgcagtgggtacgggcagactagagtgcggtaggggagaatggaattcctggtgtagcggtggaatgcgcagatatcaggaggaacaccgatggcgaaggcagttctctgggccgtaactgacgctgaggagcgaaagcgtggggagcgaacaggattagataccctggtagtccacgccgtaaacgttgggcgctagatgtggggaccattccacggtttccgtgtcgcagctaacgcattaagcgccccgcctggggagtacggccgcaaggctaaaactcaaaggaattgacgggggcccgcacaagcggcggagcatgcggattaattcgatgcaacgcgaagaaccttaccaaggcttgacatatacgagaacgggccagaaatggtcaactctttggacactcgtaaacaggtggtgcatggttgtcgtcagctcgtgtcgtgagatgttgggttaagtcccgcaacgagcgcaaccctcgttctatgttgccagcacgtaatggtgggaactcataggagactgccggggtcaactcggaggaaggtggggatgacgtcaaatcatcatgccccttatgtcttgggcttcacgcatgctacaatggccggtacaaagggctgcaataccgtaaggtggagcgaatcccaaaaagccggtctcagttcggattgaggtctgcaactcgacctcatgaagtcggagtcgctagtaatcgcagatcagcaacgctgcggtgaatacgttcccgggccttgtacacaccgcccgtcaagtcatgaaagtcggtaacacccgaagccggtggcccaacccttgtggagggagccgtcgaaggtgggatcggtgattaggactaagtcgtaacaaggtagccgtaccggaaggtgcggctggatcacctccttt

SEQ ID NO: 1190 - DNA, 1547 bp, artificial sequence
  GCF_001688645.2_00735_Bifidobacterium_animalis
tcggagagtttgatcctggctcaggacgaacgctggcggcgtgcctaatacatgcaagtcgagcggacagatgggagcttgctccctgatgttagcggcggacgggtgagtaacacgtgggtaacctgcctgtaagactgggataactccgggaaaccggggctaataccggatggttgtttgaaccgcatggttcaaacataaaaggtggcttcggctaccacttacagatggacccgcggcgcattagctagttggtgaggtaacggctcaccaaggcgacgatgcgtagccgacctgagagggtgatcggccacactgggactgagacacggcccagactcctacgggaggcagcagtagggaatcttccgcaatggacgaaagtctgacggagcaacgccgcgtgagtgatgaaggttttcggatcgtaaagctctgttgttagggaagaacaagtgccgttcgaatagggcggtaccttgacggtacctaaccagaaagccacggctaactacgtgccagcagccgcggtaatacgtaggtggcaagcgttgtccggaattattgggcgtaaagggctcgcaggcggtttcttaagtctgatgtgaaagcccccggctcaaccggggagggtcattggaaactggggaacttgagtgcagaagaggagagtggaattccacgtgtagcggtgaaatgcgtagagatgtggaggaacaccagtggcgaaggcgactctctggtctgtaactgacgctgaggagcgaaagcgtggggagcgaacaggattagataccctggtagtccacgccgtaaacgatgagtgctaagtgttagggggtttccgccccttagtgctgcagctaacgcattaagcactccgcctggggagtacggtcgcaagactgaaactcaaaggaattgacgggggcccgcacaagcggtggagcatgtggtttaattcgaagcaacgcgaagaaccttaccaggtcttgacatcctctgacaatcctagagataggacgtccccttcgggggcagagtgacaggtggtgcatggttgtcgtcagctcgtgtcgtgagatgttgggttaagtcccgcaacgagcgcaacccttgatcttagttgccagcattcagttgggcactctaaggtgactgccggtgacaaaccggaggaaggtggggatgacgtcaaatcatcatgccccttatgacctgggctacacacgtgctacaatggacagaacaaagggcagcgaaaccgcgaggttaagccaatcccacaaatctgttctcagttcggatcgcagtctgcaactcgactgcgtgaagctggaatcgctagtaatcgcggatcagcatgccgcggtgaatacgttcccgggccttgtacacaccgcccgtcacaccacgagagtttgtaacacccgaagtcggtgaggtaaccttttaggagccagccgccgaaggtgggacagatgattggggtgaagtcgtaacaaggtagccgtatcggaaggtgcggctggatcacctccttt

SEQ ID NO: 1191 - DNA, 1546 bp, artificial sequence
  GCF_001688645.2_01021_Bifidobacterium_animalis
tcggagagtttgatcctggctcaggacgaacgctggcggcgtgcctaatacatgcaagtcgagcggacagatgggagcttgctccctgatgttagcggcggacgggtgagtaacacgtgggtaacctgcctgtaagactgggataactccgggaaaccggggctaataccggatggttgtttgaaccgcatggttcaaacataaaaggtggcttcggctaccacttacagatggacccgcggcgcattagctagttggtgaggtaacggctcaccaaggcgacgatgcgtagccgacctgagagggtgatcggccacactgggactgagacacggcccagactcctacgggaggcagcagtagggaatcttccgcaatggacgaaagtctgacggagcaacgccgcgtgagtgatgaaggttttcggatcgtaaagctctgttgttagggaagaacaagtaccgttcgaatagggcggtaccttgacggtacctaaccagaaagccacggctaactacgtgccagcagccgcggtaatacgtaggtggcaagcgttgtccggaattattgggcgtaaagggctcgcaggcggtttcttaagtctgatgtgaaagcccccggctcaaccggggagggtcattggaaactggggaacttgagtgcagaagaggagagtggaattccacgtgtagcggtgaaatgcgtagagatgtggaggaacaccagtggcgaaggcgactctctggtctgtaactgacgctgaggagcgaaagcgtggggagcgaacaggattagataccctggtagtccacgccgtaaacgatgagtgctaagtgttagggggtttccgccccttagtgctgcagctaacgcattaagcactccgcctggggagtacggtcgcaagactgaaactcaaaggaattgacggggcccgcacaagcggtggagcatgtggtttaattcgaagcaacgcgaagaaccttaccaggtcttgacatcctctgacaatcctagagataggacgtccccttcgggggcagagtgacaggtggtgcatggttgtcgtcagctcgtgtcgtgagatgttgggttaagtcccgcaacgagcgcaacccttgatcttagttgccagcattcagttgggcactctaaggtgactgccggtgacaaaccggaggaaggtggggatgacgtcaaatcatcatgccccttatgacctgggctacacacgtgctacaatggacagaacaaagggcagcgaaaccgcgaggttaagccaatcccacaaatctgttctcagttcggatcgcagtctgcaactcgactgcgtgaagctggaatcgctagtaatcgcggatcagcatgccgcggtgaatacgttcccgggccttgtacacaccgcccgtcacaccacgagagtttgtaacacccgaagtcggtgaggtaaccttttaggagccagccgccgaaggtgggacagatgattggggtgaagtcgtaacaaggtagccgtatcggaaggtgcggctggatcacctccttt

SEQ ID NO: 1192 - DNA, 1534 bp, artificial sequence
  GCF_001892925.1_00764_Bifidobacterium_animalis
tgaagagtttgatcatggctcagattgaacgctggcggcaggcctaacacatgcaagtcgagcggcagcacgggtacttgtacctggtggcgagcggcggacgggtgagtaatgcctaggaatctgcctggtagtgggggataacgctcggaaacggacgctaataccgcatacgtcctacgggagaaagcaggggaccttcgggccttgcgctatcagatgagcctaggtcggattagctagttggtgaggtaatggctcaccaaggcgacgatccgtaactggtctgagaggatgatcagtcacactggaactgagacacggtccagactcctacgggaggcagcagtggggaatattggacaatgggcgaaagcctgatccagccatgccgcgtgtgtgaagaaggtcttcggattgtaaagcactttaagttgggaggaagggcagttacctaatacgtatctgttttgacgttaccgacagaataagcaccggctaactctgtgccagcagccgcggtaatacagagggtgcaagcgttaatcggaattactgggcgtaaagcgcgcgtaggtggtttgttaagttgaatgtgaaatccccgggctcaacctgggaactgcatccaaaactggcaagctagagtatggtagagggtggtggaatttcctgtgtagcggtgaaatgcgtagatataggaaggaacaccagtggcgaaggcgaccacctggactgatactgacactgaggtgcgaaagcgtggggagcaaacaggattagataccctggtagtccacgccgtaaacgatgtcaactagccgttgggagccttgagctcttagtggcgcagctaacgcattaagttgaccgcctggggagtacggccgcaaggttaaaactcaaatgaattgacgggggcccgcacaagcggtggagcatgtggtttaattcgaagcaacgcgaagaaccttaccaggccttgacatccaatgaatcctttagagatagaggagtgccttcgggaacattgagacaggtgctgcatggctgtcgtcagctcgtgtcgtgagatgttgggttaagtcccgtaacgagcgcaacccttgtccttagttaccagcacgttaaggtgggcactctaaggagactgccggtgacaaaccggaggaaggtggggatgacgtcaagtcatcatggcccttacggcctgggctacacacgtgctacaatggtcggtacagagggttgccaagccgcgaggtggagctaatctcacaaaaccgatcgtagtccggatcgcagtctgcaactcgactgcgtgaagtcggaatcgctagtaatcgcgaatcagaatgtcgcggtgaatacgttcccgggccttgtacacaccgcccgtcacaccatgggagtgggttgcaccagaagtagctagtctaaccttcggggggacggttaccacggtgtgattcatgactggggtgaagtcgtaacaaggtagccgtaggggaacctgcggctggatcacctcctt

SEQ ID NO: 1193 - DNA, 1476 bp, artificial sequence
  GCF_002220485.1_01284_Bifidobacterium_animalis
ctgagagtttgatcctggctcagagcgaacgctggcggcaggcctaacacatgcaagtcgaacgatccttcgggatagtggcggacgggtgagtaacacgtgggaacgtgccctttggttcggaacaactcagggaaacttgagctaataccgaatgtgcccttcgggggaaagatttatcgccattggagcggcccgcgtctgattagctagttggtgaggtaaaggctcaccaaggctacgatcagtagctggtctgagaggatgatcagccacattgggactgagacacggcccaaactcctacgggaggcagcagtggggaatcttgcgcaatgggcgaaagcctgacgcagccatgccgcgtgaatgatgaaggtcttaggattgtaaaattctttcaccggggacgataatgacggtacccggagaagaagccccggctaacttcgtgccagcagccgcggtaatacgaagggggctagcgttgctcggaattactgggcgtaaagggcgcgtaggcggacagtttagtcagaggtgaaagcccagggctcaaccttggaattgcctttgatactggctgtcttgagtacggaagaggtgtgtggaactccgagtgtagaggtgaaattcgtagatattcggaagaacaccagtggcgaaggcgacacactggtccgttactgacgctgaggcgcgaaagcgtggggagcaaacaggattagataccctggtagtccacgccgtaaacgatgagtgctagttgtcggcatgcatgcatgtcggtgacgcagctaacgcattaagcactccgcctggggagtacggtcgcaagattaaaactcaaaggaattgacgggggcccgcacaagcggtggagcatgtggtttaattcgaagcaacgcgcagaaccttaccaccttttgacatgcctggaccgctgcagagatgcagttttcccttcggggaccaggacacaggtgctgcatggctgtcgtcagctcgtgtcgtgagatgttgggttaagtcccgcaacgagcgcaacccacgccattagttgccatcatttagttgggcactctaatgggaccgccggtggtaagccggaggaaggtgtggatgacgtcaagtcctcatggcccttacagggtgggctacacacgtgctacaatggcgactacagagggctgcaagccagcgatggtgagccaatccctaaaagtcgtctcagttcggattgttctctgcaactcgagagcatgaagttggaatcgctagtaatcgcggatcagcatgccgcggtgaatacgttcccgggccttgtacacaccgcccgtcacaccatgggagttggttctacccgaaggcgatgcgctaaccgcaaggaggcagtcgaccacggtagggtcagcgactggggtgaagtcgtaacaaggtagccgtaggggaacctgcggctggatcacctccttt

SEQ ID NO: 1194 - DNA, 1547 bp, artificial sequence
  GCF_002220485.1_01511_Bifidobacterium_animalis
atggagagtttgatcctggctcagaacgaacgctggcggcgcgtcttaagcatgcaagtcgaacggcaagagagaagcttgcttctctcctagagtggcggactggtgaggaacacgtgggtaatctacccttaagatggggatagctgctagaaatagcaggtaataccgaatagtctcaatggttcataagaagtattgaggaaaggaagctacggcttcgcttgaggatgagcttgcgtcccattagctagttggtgaggtaaaggcccaccaaggcgacgatgggtatccggcctgagagggtgatcggacacattgggactgagatacggcccaaactcctacgggaggcagcagctaagaatattccgcaatggacggaagtctgacggagcgacgccgcgtggatgaagaaggctgaaaagttgtaaaatccttttgttgatgaagaataagggtgagagggaatgctcatctgatgacggtaatcgacgaataagccccggctaattacgtgccagcagccgcggtaacacgtaaggggcgagcgttgttcggaattattgggcgtaaagggcatgtaggcggttatgtaagcctggtgtgaaatcctggggcttaaccctagaatagcattgggtactgtataacttgaattacggaagggaaactggaattccaagtgtaggggtggaatctgtagatatttggaagaacaccggtggcgaaggcgggtttctggccgataattgacgctgagatgcgaaagtgtggggatcgaacaggattagataccctggtagtccacactgtaaacgatgtacactaggtgttggggcaagagcttcagtgccaaagcaaacgcgataagtgtaccgcctggggagtatgcccgcaagggtgaaactcaaaggaattgacgggggcccgcacaagcggtggagcatgtggtttaattcgatggtacgcgaggaaccttacctgggtttgacatctagtagacagtcttagagataaggcttggtagcaataccctgctagacaggtgctgcatggctgtcgtcagctcgtgccgtgaggtgttgggttaagtcccgcaacgagcgcaacccctactgccagttactaacaggtaaagcttgaggactctggcggaactgccgatgacaaatcggaggaaggtggggatgacgtcaagtcatcatggcccttatgtccagggctacacacgtgctacaatggttgctacaaagcgaagcgagaccgtaaggtggagcaaaccgcaaaaaagcaatcgtagttcggattgaagtctgaaactcgacttcatgaagttggaatcgctagtaatcgcgcatcagcacggcgcggtgaatacgttcccgggccttgtacacaccgcccgtcacaccatccgagttgggggtacccgaagtcgcttgtctaacctgcaaaggaggacggtgccgaaggtacgcttggtgaggagggtgaagtcgtaacaaggtagccgtaccggaaggtgcggctggatctcctccttt

SEQ ID NO: 1195 - DNA, 1547 bp, artificial sequence
  GCF_002220485.1_01583_Bifidobacterium_animalis
atggagagtttgatcctggctcagaacgaacgctggcggcgcgtcttaagcatgcaagtcgaacggcaagagagaagcttgcttctctcctagagtggcggactggtgaggaacacgtgggtaatctacccttaagatggggatagctgctagaaatagcaggtaataccgaatagtctcaatggttcataagaagtattgaggaaaggaagctacggcttcgcttgaggatgagcttgcgtcccattagctagttggtgaggtaaaggcccaccaaggcgacgatgggtatccggcctgagagggtgatcggacacattgggactgagatacggcccaaactcctacgggaggcagcagctaagaatattccgcaatggacggaagtctgacggagcgacgccgcgtggatgaagaaggctgaaaagttgtaaaatccttttgttgatgaagaataagggtgagagggaatgctcatctgatgacggtaatcgacgaataagccccggctaattacgtgccagcagccgcggtaacacgtaaggggcgagcgttgttcggaattattgggcgtaaagggcatgtaggcggttatgtaagcctggtgtgaaatcctggggcttaaccctagaatagcattgggtactgtataacttgaattacggaagggaaactggaattccaagtgtaggggtggaatctgtagatatttggaagaacaccggtggcgaaggcgggtttctggccgataattgacgctgagatgcgaaagtgtggggatcgaacaggattagataccctggtagtccacactgtaaacgatgtacactaggtgttggggcaagagcttcagtgccaaagcaaacgcgataagtgtaccgcctggggagtatgcccgcaagggtgaaactcaaaggaattgacgggggcccgcacaagcggtggagcatgtggtttaattcgatggtacgcgaggaaccttacctgggtttgacatctagtagaaggtcttagagataaggccgggtagcaataccctgctagacaggtgctgcatggctgtcgtcagctcgtgccgtgaggtgttgggttaagtcccgcaacgagcgcaacccctactgccagttactaacaggtaaagcttgaggactctggcggaactgccgatgacaaatcggaggaaggtggggatgacgtcaagtcatcatggcccttatgtccagggctacacacgtgctacaatggttgctacaaagcgaagcgagaccgtaaggtggagcaaaccgcaaaaaagcaatcgtagttcggattgaagtctgaaactcgacttcatgaagttggaatcgctagtaatcgcgcatcagcacggcgcggtgaatacgttcccgggccttgtacacaccgcccgtcacaccatccgagttgggggtacccgaagtcgcttgtctaacctgcaaaggaggacggtgccgaaggtacgcttggtgaggagggtgaagtcgtaacaaggtagccgtaccggaaggtgcggctggatcacctccttt

SEQ ID NO: 1196 - DNA, 1553 bp, artificial sequence
  GCF_002220485.1_01589_Bifidobacterium_animalis
ttcggagagtttgatcctggctcaggacgaacgctggcggcgtgcttaacacatgcaagtcgaacgggaacctttatttcggtaaaggtgagagtggcaaacgggtgagtaacacgtaggcaacctgccgacaggatggggacaacattccgaaaggaatgctaataccgaatggagtccggggatggcatcatccctggataaaagatggcctctgaatatgctatcgcctgtcgatgggcctgcgtctgattagccagttggcggggtaacggcccaccaaagcgacgatcagtagccggtctgagaggatgaacggccacattgggactgagacacggcccagactcctacgggaggcagcagtggggaatcttccacaatgggcgaaagcctgatggagcaacgccgcgtgagtgaagaaggtcttcggatcgtaaagctctgttgcacgggacgaaaaccgagcttgagaatattgagtttgggtgacggtaccgagcgaggaagccacggctaactacgtgccagcagccgcggtaatacgtaggtggcgagcgttgtccggaattattgggcgtaaagggagcgcaggcggacatataagtccatcttaaaagtgcggggctcaaccccgtgaggggatggaaactgtatgccttgagtgcaggagaggaaagcggaattcccagtgtagcggtgaaatgcgtagatattgggaggaacaccagtggcgaaggcggctttctggactgtaactgacgctgaggctcgaaagccaggggagcgaacgggattagataccccggtagtcctggccgtaaacgatgaatgctaggtgtaggaggtatcgacccctcctgtgccggagttaacgcaataagcattccgcctggggagtacggtcgcaagactgaaactcaaaggaattgacgggggcccgcacaagcggtggagtatgtggtttaattcgacgcaacgcgaagaaccttaccagggcttgacattgagtgaaagagctagagatagcttcctcccttcggggacacgaaaacaggtggtgcatggctgtcgtcagctcgtgtcgtgagatgttgggttaagtcccgcaacgagcgcaacccctgtcctttgttgccagcgcgtaatggcgggaactcaaaggagactgccgcggagaacgcggaggaaggcggggatgacgtcaagtcatcatgccccttatgtcctgggctacacacgtactacaatgggatggacagagggaagcgaaggcgtgagccggagcggaccccacaaaccatcccccagttcggattgcaggctgcaacccgcctgcatgaagtcggaatcgctagtaatcgcaggtcagcatactgcggtgaatacgttcccgggccttgtacacaccgcccgtcacaccacggaagtcattcacgcccaaagccggtgggccaaccgcaaggaggcagctgtctaaggcgggggcgatgactggggtgaagtcgtaacaaggtagccgtatcggaaggtgcggctggatcacctccttt

SEQ ID NO: 1197 - DNA, 1511 bp, artificial sequence
  GCF_003094875.1_01012_Bifidobacterium_animalis
tattgagagtttgatcctggctcaggacgaacgctggcggcgtgcttaacacatgcaagtcgagcgatgaagcttcttcggaagtggattagcggcggacgggtgagtaacacgtgggtaacctgcctcatagaggggaatagccttccgaaaggaagattaataccgcatgagattgtaatatcgcatgatatagcaattaaaggagtaatccgctatgagatggacccgcgtcgcattagctagttggtgaggtaacagctcaccaaggcgacgatgcgtagccgacctgagagggtgatcggccacattgggactgagacacggcccagactcctacgggaggcagcagtggggaatattgcacaatgggggaaaccctgatgcagcaacgccgcgtgagtgatgacggtcttcggattgtaaagctctgtctttagggacgataatgacggtacctaaggaggaagccacggctaactacgtgccagcagccgcggtaatacgtaggtggcaagcgttgtccggatttactgggcgtaaagggagcgtaggtggatatttaagtgggatgtgaaatactcgggcttaacttgggtgctgcattccaaactggatatctagagtgcaggagaggaaagtagaattcctagtgtagcggtgaaatgcgtagagattaggaagaataccagtggcgaaggcgactttctggactgtaactgacactgaggctcgaaagcgtggggagcaaacaggattagataccctggtagtccacgccgtaaacgatgaatactaggtgtgggggttgtcatgacctccgtgccgccgctaacgcattaagtattccgcctggggagtacggtcgcaagattaaaactcaaaggaattgacgggggcccgcacaagcagcggagcatgtggtttaattcgaagcaacgcgaagaaccttacctagacttgacatctcctgaattactctgtaatagaggaagcccttcggggcaggaagacaggtggtgcatggttgtcgtcagctcgtgtcgtgagatgttgggttaagtcccgcaacgagcgcaacccttattgttagttgctaccattaagttgagcactctagcgagactgcccgggttaaccgggaggaaggtggggatgacgtcaaatcatcatgccccttatgtctagggctacacacgtgctacaatggctggtacagagagatgctaaaccgtgaggtggagccaaactttaaaaccagtctcagttcggattgtaggctgaaactcgcctacatgaagctggagttgctagtaatcgcgaatcagaatgtcgcggtgaatacgttcccgggccttgtacacaccgcccgtcacaccatgagagttggcaatacccaaagttcgtgagctaacgcgtaagcgaggcagcgacctaaggtagggtcagcgattggggtgaagtcgtaacaaggtagccgtaggagaacctgcggctggatcacctccttt

SEQ ID NO: 1198 - DNA, 1511 bp, artificial sequence
  GCF_003094895.1_01600_Bifidobacterium_animalis
tattgagagtttgatcctggctcaggacgaacgctggcggcgtgcttaacacatgcaagtcgagcgatgaagcttcttcggaagtggattagcggcggacgggtgagtaacacgtgggtaacctgcctcatagaggggaatagccttccgaaaggaagattaataccgcataagattgtaatatcgcatgatatagcaattaaaggagcaatccgctatgagatggacccgcgtcgcattagctagttggtgaggtaacggctcaccaaggcgacgatgcgtagccgacctgagagggtgatcggccacattgggactgagacacggcccagactcctacgggaggcagcagtggggaatattgcacaatgggggaaaccctgatgcagcaacgccgcgtgagtgatgacggtcttcggattgtaaagctctgtctttagggacgataatgacggtacctaaggaggaagccacggctaactacgtgccagcagccgcggtaatacgtaggtggcaagcgttgtccggatttactgggcgtaaagggagcgtaggtggatatttaagtgggatgtgaaatactcgggcttaacttgggtgctgcattccaaactggatatctagagtgcaggagaggaaagtagaattcctagtgtagcggtgaaatgcgtagagattaggaagaataccagtggcgaaggcgactttctggactgtaactgacactgaggctcgaaagcgtggggagcaaacaggattagataccctggtagtccacgccgtaaacgatgaatactaggtgtgggggttgtcatgacctccgtgccgccgctaacgcattaagtattccgcctggggagtacggtcgcaagattaaaactcaaaggaattgacgggggcccgcacaagcagcggagcatgtggtttaattcgaagcaacgcgaagaaccttacctagacttgacatctcctgaattactctgtaatagaggaagcccttcggggcaggaagacaggtggtgcatggttgtcgtcagctcgtgtcgtgagatgttgggttaagtcccgcaacgagcgcaacccttattgttagttgctaccattaagttgagcactctagcgagactgcccgggttaaccgggaggaaggtggggatgacgtcaaatcatcatgccccttatgtctagggctacacacgtgctacaatggctggtacagagagatgctaaaccgtgaggtggagccaaactttaaaaccagtctcagttcggattgtaggctgaaactcgcctacatgaagctggagttgctagtaatcgcgaatcagaatgtcgcggtgaatacgttcccgggccttgtacacaccgcccgtcacaccatgagagttggcaatacccaaagttcgtgagctaacgcgtaagcgaggcagcgacctaaggtagggtcagcgattggggtgaagtcgtaacaaggtagccgtaggagaacctgcggctggatcacctccttt

SEQ ID NO: 1199 - DNA, 1511 bp, artificial sequence; identical to SEQ ID NO: 1198
  GCF_003094915.1_00707_Bifidobacterium_animalis

SEQ ID NO: 1200 - DNA, 1511 bp, artificial sequence; identical to SEQ ID NO: 1198
  GCF_003095055.1_01188_Bifidobacterium_animalis

SEQ ID NO: 1201 - DNA, 1511 bp, artificial sequence; identical to SEQ ID NO: 1198
  GCF_003095075.1_01489_Bifidobacterium_animalis

SEQ ID NO: 1202 - DNA, 1511 bp, artificial sequence; identical to SEQ ID NO: 1198
  GCF_003095115.1_01598_Bifidobacterium_animalis

SEQ ID NO: 1203 - DNA, 794 bp, artificial sequence
  GCF_003438565.1_00435_Bifidobacterium_animalis
ctcactggactgcaactgacactgatgctcgaaagtgtgggtatcaaacaggattagataccctggtagtccacacagtaaacgatgaatactcgctgtttgcgatacacggtaagcggccaagcgaaagcgttaagtattccacctggggagtacgccggcaacggtgaaactcaaaggaattgacgggggcccgcacaagcggaggaacatgtggtttaattcgatgatacgcgaggaaccttacccgggcttaaattgcatttgaataatcaagaaattggttagccgcaaggcaaatgtgaaggtgctgcatggttgtcgtcagctcgtgccgtgaggtgtcggcttaagtgccataacgagcgcaacccttatcttcagttactaacaggttatgctgaggactctggagagactgccgtcgtaagatgtgaggaaggtggggatgacgtcaaatcagcacggcccttacgtccggggctacacacgtgttacaatggggggtacagaaggcagctacacggcgacgtgatgccaatcccgaaaacctctctcagttcggatcgaagtctgcaacccgacttcgtgaagctggattcgctagtaatcgcgcatcagccatggcgcggtgaatacgttcccgggccttgtacacaccgcccgtcaagccatgaaagccgggggtacctgaagtacgtaaccgcgaggagcgtcctagggtaaaactggtaattggggctaagtcgtaacaaggtagccgtaccggaaggtgcggctggaacacctccttt

SEQ ID NO: 1204 - DNA, 1560 bp, artificial sequence
  GCF_003438945.1_00443_Bifidobacterium_animalis
tatggagagtttgatcctggctcaggacgaacgctggcggcgtgcctaatacatgcaagtcgagcgcaggaagctcacggaactcttcggagggaagtgaagggaatgagcggcggacgggtgagtaacacgtaaggaacctgccccaaggattgggataactccgagaaatcggagctaataccgaatagttcttcagaccgcatggtctgatgatgaaaggcgctccggcgtcaccttgggatggccttgcggtgcattagctagttggtggggtaatggcccaccaaggcgacgatgcatagccgacctgagagggtgatcggccacactgggactgagacacggcccagactcctacgggaggcagcagtagggaatcttccacaatggacgaaagtctgatggagcaacgccgcgtgagtgatgaaggttttcggatcgtaaaactctgttgtaagggaagaacaagtacgagaggtaatgctcgtaccttgacggtaccttgcgagaaagccacggctaactacgtgccagcagccgcggtaatacgtaggtggcaagcgttgtccggaattattgggcgtaaagcgcgcgcaggcggccttttaagtctgatgtgaaagcccccggctcaaccggggagggtcattggaaactggaaggcttgagtacagaagagaagagtggaattccatgtgtagcggtgaaatgcgtagagatgtggaggaacaccagtggcgaaggcgactctttggtctgtaactgacgctgaggcgcgaaagcgtggggagcaaacaggattagataccctggtagtccacgccgtaaacgatgagtgctaggtgttggggggtttccgcccctcagtgctgaagctaacgcattaagcactccgcctggggagtacggccgcaaggctgaaactcaaaggaattgacggggacccgcacaagcggtggagcatgtggtttaattcgaagcaacgcgaagaaccttaccaactcttgacatccccttgaccgcttgagagatcaagtttccccttcgggggcaagggtgacaggtggtgcatggttgtcgtcagctcgtgtcgtgagatgttgggttaagtcccgcaacgagcgcaacccctatccttagttgccagcatttagttgggcactctagggagactgccggtgacaaaccggaggaaggtggggatgacgtcaaatcatcatgccccttatgagttgggctacacacgtgctacaatggacggtacaaagggcagcgagaccgcgaggtggagccaatcccagaaagccgttcccagttcggattgcaggctgcaactcgcctgcatgaagtcggaatcgctagtaatcgcaggtcagcatactgcggtgaatacgttcccgggtcttgtacacaccgcccgtcacaccacgagagtttgcaacacccgaagccggtgaggtaaccgcaaggagccagccgtcgaaggtggggtagatgattggggtgaagtcgtaacaaggtagccgtatcggaaggtgcggctggatcacctccttt

SEQ ID NO: 1205 - DNA, 1479 bp, artificial sequence
  GCF_004135895.1_01282_Bifidobacterium_animalis
cttgagagtttgatcctggctcagaacgaacgctggcggcaggcttaacacatgcaagtcgaacgccccgcaaggggagtggcagacgggtgagtaacgcgtgggaatctacccagatctacggaacaacagttggaaacgactgctaataccgtatacgccctacgggggaaagatttatcggatttggatgagcccgcgtaagattagctagttggtggggtaatggcctaccaaggcgacgatctttagctggtctgagaggatgatcagccacactgggactgagacacggcccagactcctacgggaggcagcagtggggaatattggacaatgggcgcaagcctgatccagccatgccgcgtgagtgatgaaggccttagggttgtaaagctctttcagtagggaagataatgacggtacctacagaagaagccccggctaacttcgtgccagcagccgcggtaatacgaagggggctagcgttgttcggatttactgggcgtaaagcgcacgtaggcggtttgttaagtcaggggtgaaatcccggagctcaactccggaactgcctttgatactggcaagctagagtccggaagaggtaagtggaactcctagtgtagaggtggaattcgtagatattaggaagaacaccagtggcgaaggcggcttactggtccggaactgacgctgaggtgcgaaagcgtggggagcaaacaggattagataccctggtagtccacgccgtaaactatgagagctagccgttggatggtttaccattcagtggcgcagctaacgcattaagctctccgcctggggagtacggtcgcaagattaaaactcaaaggaattgacgggggcccgcacaagcggtggagcatgtggtttaattcgaagcaacgcgaagaaccttaccagcccttgacatgtcaggacgacttccagagatggattttttcccttcggggacctgaacacaggtgctgcatggctgtcgtcagctcgtgtcgtgagatgttgggttaagtcccgcaacgagcgcaaccctcgtccttagttgccatcatttagttgggcactctaaggagactgccggtgataagccggaggaaggtggggatgacgtcaagtcatcatggcccttatgggctgggctacacacgtgctacaatggtggtgacagagggcagctagacagcgatgtcatgctaatcccaaaaagccatctcagttcggattgcactctgcaactcgagtgcatgaagttggaatcgctagtaatcgcagatcagcatgctgcggtgaatacgttcccgggccttgtacacaccgcccgtcacaccatgggagttggttttacccgaagccggtgcgctaaccgcaaggaagcagccgaccacggtagggtcagcgactggggtgaagtcgtaacaaggtagccgtaggggaacctgcggctggatcacctccttt

SEQ ID NO: 1206 - DNA, 1517 bp, artificial sequence
  GCF_004135895.1_01507_Bifidobacterium_animalis
ttggagagtttgatcctggctcaggacgaacgctggcggcgtgcttaacacatgcaagtcgagcggtaaggccctttcgggggtacacgagcggcgaacgggtgagtaacacgtgggtgacctgccctccactctgggataagcccgggaaactgggtctaataccggataggacctctcaacgcatgttgagtggtggaaagttttttcggtgggggatgggcccgcggcctatcagcttgttggtggggtgatggcctaccaaggcggtgacgggtagccggcctgagagggcgaccggccacactgggactgagacacggcccagactcctacgggaggcagcagtggggaatattgcgcaatgggcggaagcctgacgcagcgacgccgcgtgggggatgacggccttcgggttgtaaacctctttcgccagggacgaagcttttgtgacggtacctggagaagaagcaccggccaactacgtgccagcagccgcggtaacacgtagggtgcgagcgttgtccggaattattgggcgtaaagagctcgtaggcggtgtgtcgcgtcggccgtgaaaacttggggcttaactctgagcgtgcggtcgatacgggcatcacttgagttcggcaggggagactggaattcctggtgtagcggtgaaatgcgcagatatcaggaggaacaccggtggcgaaggcgggtctctgggccgatactgacgctgaggagcgaaagcgtggggagcgaacaggattagataccctggtagtccacgccgtaaacgttgggcgctaggtgtggggaccattccacggtttctgcgccgcagctaacgcattaagcgccccgcctggggagtacggccgcaaggctaaaactcaaaggaattgacgggggcccgcacaagcggcggagcatgtggattaattcgatgcaacgcgaagaaccttacctgggtttgacatgcacaggatcgcggcagagatgtcgtttcccttgtggcctgtgtgcaggtggtgcatggctgtcgtcagctcgtgtcgtgagatgttgggttaagtcccgcaacgagcgcaacccttattccatgttgccagcacgtagtggtggggactcatgggagactgccggggtcaactcggaggaaggtggggatgacgtcaagtcatcatgccccttatgtccagggcttcacacatgctacaatggctcatacagagggctgcgagaccgtgaggtggagcgaatcccttaaagtgagtctcagttcggatcggggtctgcaactcgaccccgtgaagttggagtcgctagtaatcgcagatcagcaacgctgcggtgaatacgttcccgggccttgtacacaccgcccgtcacgtcacgaaagttggtaacacccgaagccggcggcccaacccttgtggagggagtcgtcgaaggtgggactggcgattgggacgaagtcgtaacaaggtagccgtaccggaaggtgcggctggatcacctccttt

SEQ ID NO: 1207 - DNA, 1517 bp, artificial sequence
  GCF_004135895.1_01574_Bifidobacterium_animalis
ttggagagtttgatcctggctcaggacgaacgctggcggcgtgcttaacacatgcaagtcgagcggtaaggccctttcgggggtacacgagcggcgaacgggtgagtaacacgtgggtgacctgccctccactctgggataagcccgggaaactgggtctaataccggataggacctctcaacgcatgttgagtggtggaaagttttttcggtgggggatgggcccgcggcctatcagcttgttggtggggtgatggcctaccaaggcggtgacgggtagccggcctgagagggcgaccggccacactgggactgagacacggcccagactcctacgggaggcagcagtggggaatattgcgcaatgggcggaagcctgacgcagcgacgccgcgtgggggatgacggccttcgggttgtaaacctctttcgccagggacgaagcttttgtgacggtacctggagaagaagcaccggccaactacgtgccagcagccgcggtaacacgtagggtgcgagcgttgtccggaattattgggcgtaaagagctcgtaggcggtgtgtcgcgtcggccgtgaaaacttggggcttaactctgagcgtgcggtcgatacgggcatcacttgagttcggcaggggagactggaattcctggtgtagcggtgaaatgcgcagatatcaggaggaacaccggtggcgaaggcgggtctctgggccgatactgacgctgaggagcgaaagcgtggggagcgaacaggattagataccctggtagtccacgccgtaaacgttgggcgctaggtgtggggaccattccacggtttctgcgccgcagctaacgcattaagcgccccgcctggggagtacggccgcaaggctaaaactcaaaggaattgacgggggcccgcacaagcggcggagcatgtggattaattcgatgcaacgcgaagaaccttacctgggtttgacatgcacaggatcgcggcagagatgtcgtttcccttgaggcctgtgtgcaggtggtgcatggctgtcgtcagctcgtgtcgtgagatgttgggttaagtcccgcaacgagcgcaacccttattccatgttgccagcacgtagtggtggggactcatgggagactgccggggtcaactcggaggaaggtggggatgacgtcaagtcatcatgccccttatgtccagggcttcacacatgctacaatggctcatacagagggctgcgagaccgtgaggtggagcgaatcccttaaagtgagtctcagttcggatcggggtctgcaactcgaccccgtgaagttggagtcgctagtaatcgcagatcagcaacgctgcggtgaatacgttcccgggccttgtacacaccgcccgtcacgtcacgaaagttggtaacacccgaagccggcggcccaacccttgtggagggagtcgtcgaaggtgggactggcgattgggacgaagtcgtaacaaggtagccgtaccggaaggtgcggctggatcacctccttt

SEQ ID NO: 1208 - DNA, 1494 bp, artificial sequence
  GCF_004154425.1_01019_Bifidobacterium_animalis
ttgagagtttgatcctggctcagaacgaacgctatcggtatgcttaacacatgcaagtcgaacggactaattggggcttgctccaattagttagtggcagacgggtgagtaacacgtgggaatctacccatcagtacggaataacttttagaaataaaagctaataccgtatattctctacggaagaaagatttatcgctgatggatgagcccgcgtcagattaggtagttggtgaggtaacggctcaccaagccgacgatctgtagctggtctgagaggatgatcagccacactgggactgagacacggcccagactcctacgggaggcagcagtggggaatattggacaatgggcgaaagcctgatccagcaataccgagtgagtgatgaaggccttagggttgtaaagctcttttagcaaggaagataatgacgttacttgcagaaaaagccccggctaactccgtgccagcagccgcggtaagacggagggggctagcgttgttcggaattactgggcgtaaagagtgcgtaggcggtttagtaagttggaagtgaaagcccggggcttaacctcggaattgctttcaaaactactaatctagagtgtagtaggggatgatggaattcctagtgtagaggtgaaattcttagatattaggaggaacaccggtggcgaaggcggtcatctgggctacaactgacgctaatgcacgaaagcgtggggagcaaacaggattagataccctggtagtccacgccgtaaacgatgagtgctagatatcggaagattctctttcggtttcgcagctaacgcattaagcactccgcctggagagtacggtcgcaagattaaaactcaaaggaattgacgggggctcgcacaagcggtggagcatgcggtttaattcgatgttacgcgaaaaaccttaccaacccttgacatggtggtcgcggatcgcagagatgctttccttcagctcggctggaccacacacaggtgttgcacggctgtcgtcagctcgtgtcgtgagatgttgggttaagtcccgcaacgagcgcaaccctcattcttatttgccagcgggtaatgccgggaactataagaaaactgctggtgataagccagaggaaggtggggacgacgtcaagtcatcatggcccttacgggttgggctacacgcgtgctacaatggtgtttacagagggaagcaagacggcgacgtggagcaaatctctaaaagacatctcagttcggattgttctctgcaactcgagagcatgaagttggaatcgctagtaatcgcggatcagcatgccgcggtgaatacgttctcgggccttgtacacactgcccgtcacgccatgggagttggttttacctgaaggtggtgagctaacgcaagaggcagccaaccacggtaaaattagcgactggggtgaagtcgtaacaaggtagccgtaggggaacctgcggctggattacctcctt

SEQ ID NO: 1209 - DNA, 1536 bp, artificial sequence
  GCF_004154435.1_00049_Bifidobacterium_animalis
ttgaagagtttgatcatggctcagattgaacgctggcggcaggcctaacacatgcaagtcgaacggtagcacagagagcttgctctcgggtgacgagtggcggacgggtgagtaatgtctgggaaactgcctgatggagggggataactactggaaacggtagctaataccgcataacgtcgcaagaccaaagagggggaccttcgggcctcttgccatcagatgtgcccagatgggattagctagtaggtggggtaacggctcacctaggcgacgatccctagctggtctgagaggatgaccagccacactggaactgagacacggtccagactcctacgggaggcagcagtggggaatattgcacaatgggcgcaagcctgatgcagccatgccgcgtgtatgaagaaggccttcgggttgtaaagtactttcagcggggaggaaggtgatgaggttaataacctcagcaattgacgttacccgcagaagaagcaccggctaactccgtgccagcagccgcggtaatacggagggtgcaagcgttaatcggaattactgggcgtaaagcgcacgcaggcggtctgtcaagtcggatgtgaaatccccgggctcaacctgggaactgcattcgaaactggcaggctggagtcttgtagaggggggtagaattccaggtgtagcggtgaaatgcgtagagatctggaggaataccggtggcgaaggcggccccctggacaaagactgacgctcaggtgcgaaagcgtggggagcaaacaggattagataccctggtagtccacgctgtaaacgatgtcgacttggaggttgttcccttgaggagtggcttccggagctaacgcgttaagtcgaccgcctggggagtacggccgcaaggttaaaactcaaatgaattgacgggggcccgcacaagcggtggagcatgtggtttaattcgatgcaacgcgaagaaccttacctactcttgacatccagagaacttagcagagatgctttggtgccttcgggaactctgagacaggtgctgcatggctgtcgtcagctcgtgttgtgaaatgttgggttaagtcccgcaacgagcgcaacccttatcctttgttgccagcggtccggccgggaactcaaaggagactgccagtgataaactggaggaaggtggggatgacgtcaagtcatcatggcccttacgagtagggctacacacgtgctacaatggcatatacaaagagaagcgacctcgcgagagcaagcggacctcataaagtatgtcgtagtccggattggagtctgcaactcgactccatgaagtcggaatcgctagtaatcgtggatcagaatgccacggtgaatacgttcccgggccttgtacacaccgcccgtcacaccatgggagtgggttgcaaaagaagtaggtagcttaaccttcgggagggcgcttaccactttgtgattcatgactggggtgaagtcgtaacaaggtaaccgtaggggaacctgcggttggatcacctcctt

SEQ ID NO: 1210 - DNA, 1547 bp, artificial sequence
  GCF_004154455.1_01487_Bifidobacterium_animalis
tcggagagtttgatcctggctcaggacgaacgctggcggcgtgcctaatacatgcaagtcgagcggacagatgggagcttgctccctgatgttagcggcggacgggtgagtaacacgtgggtaacctgcctgtaagactgggataactccgggaaaccggggctaataccggatggttgtttgaaccgcatggttcagacataaaaggtggcttcggctaccacttacagatggacccgcggcgcattagctagttggtgaggtaacggctcaccaaggcgacgatgcgtagccgacctgagagggtgatcggccacactgggactgagacacggcccagactcctacgggaggcagcagtagggaatcttccgcaatggacgaaagtctgacggagcaacgccgcgtgagtgatgaaggttttcggatcgtaaagctctgttgttagggaagaacaagtgccgttcaaatagggcggcaccttgacggtacctaaccagaaagccacggctaactacgtgccagcagccgcggtaatacgtaggtggcaagcgttgtccggaattattgggcgtaaagggctcgcaggcggtttcttaagtctgatgtgaaagcccccggctcaaccggggagggtcattggaaactggggaacttgagtgcagaagaggagagtggaattccacgtgtagcggtgaaatgcgtagagatgtggaggaacaccagtggcgaaggcgactctctggtctgtaactgacgctgaggagcgaaagcgtggggagcgaacaggattagataccctggtagtccacgccgtaaacgatgagtgctaagtgttagggggtttccgccccttagtgctgcagctaacgcattaagcactccgcctggggagtacggtcgcaagactgaaactcaaaggaattgacgggggcccgcacaagcggtggagcatgtggtttaattcgaagcaacgcgaagaaccttaccaggtcttgacatcctctgacaatcctagagataggacgtccccttcgggggcagagtgacaggtggtgcatggttgtcgtcagctcgtgtcgtgagatgttgggttaagtcccgcaacgagcgcaacccttgatcttagttgccagcattcagttgggcactctaaggtgactgccggtgacaaaccggaggaaggtggggatgacgtcaaatcatcatgccccttatgacctgggctacacacgtgctacaatggacagaacaaagggcagcgaaaccgcgaggttaagccaatcccacaaatctgttctcagttcggatcgcagtctgcaactcgactgcgtgaagctggaatcgctagtaatcgcggatcagcatgccgcggtgaatacgttcccgggccttgtacacaccgcccgtcacaccacgagagtttgtaacacccgaagtcggtgaggtaaccttttaggagccagccgccgaaggtgggacagatgattggggtgaagtcgtaacaaggtagccgtatcggaaggtgcggctggatcacctccttt

SEQ ID NO: 1211 - DNA, 1547 bp, artificial sequence; identical to SEQ ID NO: 1210
  GCF_004154535.1_00108_Bifidobacterium_animalis

SEQ ID NO: 1212 - DNA, 1547 bp, artificial sequence; identical to SEQ ID NO: 1210
  GCF_004154555.1_01656_Bifidobacterium_animalis

SEQ ID NO: 1213 - DNA, 1547 bp, artificial sequence
  GCF_004154625.1_01491_Bifidobacterium_animalis
tcggagagtttgatcctggctcaggacgaacgctggcggcgtgcctaatacatgcaagtcgagcggacagatgggagcttgctccctgatgttagcggcggacgggtgagtaacacgtgggcaacctgcctgtgagactgggataactccgggaaaccggggctaataccggatggttgtttgaaccgcatggttcagacataaaaggtggcttcggctaccacttacagatggacccgcggcgcattagctagttggtgaggtaacggctcaccaaggcgacgatgcgtagccgacctgagagggtgatcggccacactgggactgagacacggcccagactcctacgggaggcagcagtagggaatcttccgcaatggacgaaagtctgacggagcaacgccgcgtgagtgatgaaggttttcggatcgtaaagctctgttgttagggaagaacaagtgccgttcaaatagggcggcaccttgacggtacctaaccagaaagccacggctaactacgtgccagcagccgcggtaatacgtaggtggcaagcgttgtccggaattattgggcgtaaagggctcgcaggcggtttcttaagtctgatgtgaaagcccccggctcaaccggggagggtcattggaaactggggaacttgagtgcagaagaggagagtggaattccacgtgtagcggtgaaatgcgtagagatgtggaggaacaccagtggcgaaggcgactctctggtctgtaactgacgctgaggagcgaaagcgtggggagcgaacaggattagataccctggtagtccacgccgtaaacgatgagtgctaagtgttagggggtttccgccccttagtgctgcagctaacgcattaagcactccgcctggggagtacggtcgcaagactgaaactcaaaggaattgacgggggcccgcacaagcggtggagcatgtggtttaattcgaagcaacgcgaagaaccttaccaggtcttgacatcctctgacaatcctagagataggacgtccccttcgggggcagagtgacaggtggtgcatggttgtcgtcagctcgtgtcgtgagatgttgggttaagtcccgcaacgagcgcaacccttgatcttagttgccagcattcagttgggcactctaaggtgactgccggtgacaaaccggaggaaggtggggatgacgtcaaatcatcatgccccttatgacctgggctacacacgtgctacaatggacagaacaaagggcagcgaaaccgcgaggttaagccaatcccacaaatctgttctcagttcggatcgcagtctgcaactcgactgcgtgaagctggaatcgctagtaatcgcggatcagcatgccgcggtgaatacgttcccgggccttgtacacaccgcccgtcacaccacgagagtttgtaacacccgaagtcggtgaggtaaccttttaggagccagccgccgaaggtgggacagatgattggggtgaagtcgtaacaaggtagccgtatcggaaggtgcggctggatcacctccttt

SEQ ID NO: 1214 - DNA, 1545 bp, artificial sequence
  GCF_004154645.1_00458_Bifidobacterium_animalis
gcagagtttgatcctggctcaggacgaacgctggcggcgtgcctaatacatgcaagtcgagcggacagatgggagcttgctccctgatgttagcggcggacgggtgagtaacacgtgggtaacctgcctgtaagactgggataactccgggaaaccggggctaataccggatggttgtttgaaccgcatggttcagacataaaaggtggcttcggctaccacttacagatggacccgcggcgcattagctagttggtgaggtaacggctcaccaaggcgacgatgcgtagccgacctgagagggtgatcggccacactgggactgagacacggcccagactcctacgggaggcagcagtagggaatcttccgcaatggacgaaagtctgacggagcaacgccgcgtgagtgatgaaggttttcggatcgtaaagctctgttgttagggaagaacaagtgccgttcaaatagggcggcaccttgacggtacctaaccagaaagccacggctaactacgtgccagcagccgcggtaatacgtaggtggcaagcgttgtccggaattattgggcgtaaagggctcgcaggcggtttcttaagtctgatgtgaaagcccccggctcaaccggggagggtcattggaaactggggaacttgagtgcagaagaggagagtggaattccacgtgtagcggtgaaatgcgtagagatgtggaggaacaccagtggcgaaggcgactctctggtctgtaactgacgctgaggagcgaaagcgtggggagcgaacaggattagataccctggtagtccacgccgtaaacgatgagtgctaagtgttagggggtttccgccccttagtgctgcagctaacgcattaagcactccgcctggggagtacggtcgcaagactgaaactcaaaggaattgacgggggcccgcacaagcggtggagcatgtggtttaattcgaagcaacgcgaagaaccttaccaggtcttgacatcctctgacaatcctagagataggacgtccccttcgggggcagagtgacaggtggtgcatggttgtcgtcagctcgtgtcgtgagatgttgggttaagtcccgcaacgagcgcaacccttgatcttagttgccagcattcagttgggcactctaaggtgactgccggtgacaaaccggaggaaggtggggatgacgtcaaatcatcatgccccttatgacctgggctacacacgtgctacaatggacagaacaaagggcagcgaaaccgcgaggttaagccaatcccacaaatctgttctcagttcggatcgcagtctgcaactcgactgcgtgaagctggaatcgctagtaatcgcggatcagcatgccgcggtgaatacgttcccgggccttgtacacaccgcccgtcacaccacgagagtttgtaacacccgaagtcggtgaggtaaccttttaggagccagccgccgaaggtgggacagatgattggggtgaagtcgtaacaaggtagccgtatcggaaggtgcggctggatcacctccttt

SEQ ID NO: 1215 - DNA, 1525 bp, artificial sequence
  GCF_004167905.1_01606_Bifidobacterium_animalis
tgaagagtttgatcctggctcagattgaacgctggcggcatgctttacacatgcaagtcgaacggcagcgcggggcaacctggcggcgagtggcgaacgggtgagtaatatatcggaacgtacccaagagtgggggataacgtagcgaaagttacgctaataccgcatacgatctacggatgaaagtgggggatcttcggacctcatgctcctggagcggccgatatctgattagctagttggtgaggtaaaggctcaccaaggcgacgatcagtagctggtctgagaggacgaccagccacactgggactgagacacggcccagactcctacgggaggcagcagtggggaattttggacaatgggcgcaagcctgatccagcaatgccgcgtgagtgaagaaggccttcgggttgtaaagctcttttgtcagggaagaaacggggtcggctaatatccgactctaatgacggtacctgaagaataagcaccggctaactacgtgccagcagccgcggtaatacgtagggtgcaagcgttaatcggaattactgggcgtaaagcgtgcgcaggcggttttgtaagtctgacgtgaaatccccgggcttaacctgggaattgcgttggagactgcaaggctggagtctggcagaggggggtagaattccacgtgtagcagtgaaatgcgtagagatgtggaggaacaccgatggcgaaggcagccccctgggtcaagactgacgctcatgcacgaaagcgtggggagcaaacaggattagataccctggtagtccacgccctaaacgatgtctactagttgtcgggtcttaattgacttggtaacgcagctaacgcgtgaagtagaccgcctggggagtacggtcgcaagattaaaactcaaaggaattgacggggacccgcacaagcggtggatgatgtggattaattcgatgcaacgcgaaaaaccttacctacccttgacatgtcaggaacctccgagagattggagggtgcccgaaagggagcctgaacacaggtgctgcatggctgtcgtcagctcgtgtcgtgagatgttgggttaagtcccgcaacgagcgcaacccttgtcattagttgctacgaaagggcactctaatgagactgccggtgacaaaccggaggaaggtggggatgacgtcaagtcctcatggcccttatgggtagggcttcacacgtcatacaatggtacatacagagggccgccaacccgcgagggggagctaatcccagaaagtgtatcgtagtccggatcgcagtctgcaactcgactgcgtgaagttggaatcgctagtaatcgcggatcagcatgccgcggtgaatacgttcccgggtcttgtacacaccgcccgtcacaccatgggagcgggttttaccagaagtaggtagcttaaccgcaaggagggcgcttaccacggtaggattcgtgactggggtgaagtcgtaacaaggtagccgtatcggaaggtgcggctggatcacctccttt

SEQ ID NO: 1216 - DNA, 1525 bp, artificial sequence
  GCF_005844245.1_00067_Bifidobacterium_animalis
acggagagtttgatcctggctcaggacgaacgctggcggcgtgcttaacacatgcaagtcgaacgatgaagccgcttcggtggtggattagtggcgaacgggtgagtaacacgtgggcaatctgcccttcactctgggacaagccctggaaacggggtctaataccggataacactctgtcccgcatgggacggggttaaaagctccggcggtgaaggatgagcccgcggcctatcagcttgttggtggggtaatggcctaccaaggcgacgacgggtagccggcctgagagggcgaccggccacactgggactgagacacggcccagactcctacgggaggcagcagtggggaatattgcacaatgggcgaaagcctgatgcagcgacgccgcgtgagggatgacggccttcgggttgtaaacctctttcagcagggaagaagcgaaagtgacggtacctgcagaagaagcgccggctaactacgtgccagcagccgcggtaatacgtagggcgcaagcgttgtccggaattattgggcgtaaagagctcgtaggcggcttgtcacgtcggatgtgaaagcccggggcttaaccccgggtctgcattcgatacgggctagctagagtgtggtaggggagatcggaattcctggtgtagcggtgaaatgcgcagatatcaggaggaacaccggtggcgaaggcggatctctgggccattactgacgctgaggagcgaaagcgtggggagcgaacaggattagataccctggtagtccacgccgtaaacgttgggaactaggtgttggcgacattccacgtcgtcggtgccgcagctaacgcattaagttccccgcctggggagtacggccgcaaggctaaaactcaaaggaattgacgggggcccgcacaagcagcggagcatgtggcttaattcgacgcaacgcgaagaaccttaccaaggcttgacatataccggaaagcatcagagatggtgccccccttgtggtcggtatacaggtggtgcatggctgtcgtcagctcgtgtcgtgagatgttgggttaagtcccgcaacgagcgcaacccttgttctgtgttgccagcatgcccttcggggtgatggggactcacaggagactgccggggtcaactcggaggaaggtggggacgacgtcaagtcatcatgccccttatgtcttgggctgcacacgtgctacaatggccggtacaatgagctgcgatgccgcgaggcggagcgaatctcaaaaagccggtctcagttcggattggggtctgcaactcgaccccatgaagtcggagttgctagtaatcgcagatcagcattgctgcggtgaatacgttcccgggccttgtacacaccgcccgtcacgtcacgaaagtcggtaacacccgaagccggtggcccaaccccttgtgggagggagctgtcgaaggtgggactggcgattgggacgaagtcgtaacaaggtagccgtaccggaaggtgcggctggatcacctccttt

SEQ ID NO: 1217 - DNA, 1548 bp, artificial sequence
  GCF_900157045.1_00582_Bifidobacterium_animalis
tatggagagtttgatcctggctcaggacgaacgctggcggcgtgcctaatacatgcaagtcgagcggacagatgggagcttgctccctgatgttagcggcggacgggtgagtaacacgtgggtaacctgcctgtaagactgggataactccgggaaaccggggctaataccggatgcttgtttgaaccgcatggttcaaacataaaaggtggcttcggctaccacttacagatggacccgcggcgcattagctagttggtgaggtaatggctcaccaaggcaacgatgcgtagccgacctgagagggtgatcggccacactgggactgagacacggcccagactcctacgggaggcagcagtagggaatcttccgcaatggacgaaagtctgacggagcaacgccgcgtgagtgatgaaggttttcggatcgtaaagctctgttgttagggaagaacaagtgccgttcaaatagggcggcaccttgacggtacctaaccagaaagccacggctaactacgtgccagcagccgcggtaatacgtaggtggcaagcgttgtccggaattattgggcgtaaagggctcgcaggcggtttcttaagtctgatgtgaaagcccccggctcaaccggggagggtcattggaaactggggaacttgagtgcagaagaggagagtggaattccacgtgtagcggtgaaatgcgtagagatgtggaggaacaccagtggcgaaggcgactctctggtctgtaactgacgctgaggagcgaaagcgtggggagcgaacaggattagataccctggtagtccacgccgtaaacgatgagtgctaagtgttagggggtttccgccccttagtgctgcagctaacgcattaagcactccgcctggggagtacggtcgcaagactgaaactcaaaggaattgacgggggcccgcacaagcggtggagcatgtggtttaattcgaagcaacgcgaagaaccttaccaggtcttgacatcctctgacaatcctagagataggacgtccccttcgggggcagagtgacaggtggtgcatggttgtcgtcagctcgtgtcgtgagatgttgggttaagtcccgcaacgagcgcaacccttgatcttagttgccagcattcagttgggcactctaaggtgactgccggtgacaaaccggaggaaggtggggatgacgtcaaatcatcatgccccttatgacctgggctacacacgtgctacaatggacagaacaaagggcagcgaaaccgcgaggttaagccaatcccacaaatctgttctcagttcggatcgcagtctgcaactcgactgcgtgaagctggaatcgctagtaatcgcggatcagcatgccgcggtgaatacgttcccgggccttgtacacaccgcccgtcacaccacgagagtttgtaacacccgaagtcggtgaggtaaccttttaggagccagccgccgaaggtgggacagatgattggggtgaagtcgtaacaaggtagccgtatcggaaggtgcggctggatcacctccttt

SEQ ID NO: 1218 - DNA, 1541 bp, artificial sequence
  GCF_900157135.1_00034_Bifidobacterium_animalis
ttgaagagtttgatcatggctcagattgaacgctggcggcaggcctaacacatgcaagtcgagcggcagcgggaaagtagcttgctacttttgccggcgagcggcggacgggtgagtaatgcctggggatctgcccagtcgagggggataacagttggaaacgactgctaataccgcatacgccctacgggggaaaggaggggaccttcgggcctttcgcgattggatgaacccaggtgggattagctagttggtggggtaatggctcaccaaggcgacgatccctagctggtctgagaggatgatcagccacactggaactgagacacggtccagactcctacgggaggcagcagtggggaatattgcacaatgggggaaaccctgatgcagccatgccgcgtgtgtgaagaaggccttcgggttgtaaagcactttcagcgaggaggaaaggttggtcgctaataacggccaactgtgacgttactcgcagaagaagcaccggctaactccgtgccagcagccgcggtaatacggagggtgcaagcgttaatcggaattactgggcgtaaagcgcacgcaggcggttggataagttagatgtgaaagccccgggctcaacctgggaattgcatttaaaactgtccagctagagtcttgtagaggggggtagaattccaggtgtagcggtgaaatgcgtagagatctggaggaataccggtggcgaaggcggccccctggacaaagactgacgctcaggtgcgaaagcgtggggagcaaacaggattagataccctggtagtccacgccgtaaacgatgtcgatttggaggctgtgtccttgagacgtggcttccggagctaacgcgttaaatcgaccgcctggggagtacggccgcaaggttaaaactcaaatgaattgacgggggcccgcacaagcggtggagcatgtggtttaattcgatgcaacgcgaagaaccttacctggccttgacatgtctggaatcctgtagagatacgggagtgccttcgggaatcagaacacaggtgctgcatggctgtcgtcagctcgtgtcgtgagatgttgggttaagtcccgcaacgagcgcaacccctgtcctttgttgccagcacgtaatggtgggaactcaagggagactgccggtgataaaccggaggaaggtggggatgacgtcaagtcatcatggcccttacggccagggctacacacgtgctacaatggcgcgtacagagggctgcaagctagcgatagtgagcgaatcccaaaaagcgcgtcgtagtccggatcggagtctgcaactcgactccgtgaagtcggaatcgctagtaatcgcaaatcagaatgttgcggtgaatacgttcccgggccttgtacacaccgcccgtcacaccatgggagtgggttgcaccagaagtagatagcttaaccttcgggagggcgtttaccacggtgtgattcatgactggggtgaagtcgtaacaaggtaaccctaggggaacctggggttggatcacctcctt

SEQ ID NO: 1219 - DNA, 1430 bp, artificial sequence
  STR00186_Blautia_coccoides_group
ttgtgactgagcggcggacgggtgagtaacgcgtgggtaacctgcctcatacagggggataacagttagaaatgactgctaataccgcataagcgcacaggaccgcatggtctggtgtgaaaaactccggtggtatgagatggacccgcgtctgattagctagttggaggggtaacggcccaccaaggcgacgatcagtagccggcctgagagggtgaacggccacattgggactgagacacggcccagactcctacgggaggcagcagtggggaatattgcacaatgggggaaaccctgatgcagcgacgccgcgtgaaggaagaagtatctcggtatgtaaacttctatcagcagggaagaaaatgacggtacctgactaagaagccccggctaactacgtgccagcagccgcggtaatacgtagggggcaagcgttatccggatttactgggtgtaaagggagcgtagacggaagagcaagtctgatgtgaaaggctggggcttaaccccaggactgcattggaaactgttgttctagagtgccggagaggtaagcggaattcctagtgtagcggtgaaatgcgtagatattaggaggaacaccagtggcgaaggcggcttactggacggtaactgacgttgaggctcgaaagcgtggggagcaaacaggattagataccctggtagtccacgccgtaaacgatgaatactaggtgtcgggtggcaaagccattcggtgccgcagcaaacgcaataagtattccacctggggagtacgttcgcaagaatgaaactcaaaggaattgacggggacccgcacaagcggtggagcatgtggtttaattcgaagcaacgcgaagaaccttaccaagtcttgacatccctctgaccgtcccgtaacgggggcttcccttcggggcagaggagacaggtggtgcatggttgtcgtcagctcgtgtcgtgagatgttgggttaagtcccgcaacgagcgcaacccttatccttagtagccagcacatgatggtgggcactctagggagactgccggggataacccggaggaaggcggggacgacgtcaaatcatcatgccccttatgatttgggctacacacgtgctacaatggcgtaaacaaagggaagcgagacagcgatgttgagcgaatcccaaaaataacgtcccagttcggactgcagtctgcaactcgactgcacgaagctggaatcgctagtaatcgcggatcagaatgccgcggtgaatacgttcccgggtcttgtacacaccgcccgtcacaccatgggagtcagtaacgcccgaagtcagtgacctaaccgaaaggaaggagctgccgaaggcgggaccgataactggggtgaagtcgtaacaaggtagccgtatcggaaggtgcggctggatcacctccttt

SEQ ID NO: 1220 - DNA, 1531 bp, artificial sequence
  STR00416_Blautia_coccoides_group
atcagagagtttgatcctggctcaggatgaacgctggcggcgtgcttaacacatgcaagtcgagcgaagcgcttaaacggatttcttcggattgaagtttttgtgactgagcggcggacgggtgagtaacgcgtgggtaacctgcctcatacagggggataacagttagaaatggctgctaataccgcataagcgcacaggaccgcatggtctggtgtgaaaaactccggtggtatgagatggacccgcgtctgattagctagttggaggggtaacggcccaccaaggcgacgatcagtagccggcctgagagggtgaacggccacattgggactgagacacggcccagactcctacgggaggcagcagtggggaatattgcacaatgggggaaaccctgatgcagcgacgccgcgtgaaggaagaagtatctcggtatgtaaacttctatcagcagggaagaaaatgacggtacctgactaagaagccccggctaactacgtgccagcagccgcggtaatacgtagggggcaagcgttatccggatttactgggtgtaaagggagcgtagacggaagagcaagtctgatgtgaaaggctggggcttaaccccaggactgcattggaaactgtttttctagagtgccggagaggtaagcggaattcctagtgtagcggtgaaatgcgtagatattaggaggaacaccagtggcgaaggcggcttactggacggtaactgacgttgaggctcgaaagcgtggggagcaaacaggattagataccctggtagtccacgccgtaaacgatgaatactaggtgtcgggtggcaaagccattcggtgccgcagcaaacgcaataagtattccacctggggagtacgttcgcaagaatgaaactcaaaggaattgacggggacccgcacaagcggtggagcatgtggtttaattcgaagcaacgcgaagaaccttaccaagtcttgacatccctctgaccggcccgtaacggggccttcccttcggggcagaggagacaggtggtgcatggttgtcgtcagctcgtgtcgtgagatgttgggttaagtcccgcaacgagcgcaacccctatccttagtagccagcaggtgaagctgggcactctagggagactgccggggataacccggaggaaggcggggacgacgtcaaatcatcatgccccttatgatttgggctacacacgtgctacaatggcgtaaacaaagggaagcgagacagcgatgttgagcaaatcccaaaaataacgtcccagttcggactgcagtctgcaactcgactgcacgaagctggaatcgctagtaatcgcgaatcagaatgtcgcggtgaatacgttcccgggtcttgtacacaccgcccgtcacaccatgggagtcagtaacgcccgaagtcagtgacccaaccttataggagggagctgccgaaggcgggaccgataactggggtgaagtcgtaacaaggtagccgtatcggaaggtgcggctggatcacctccttt

SEQ ID NO: 1221 - DNA, 1531 bp, artificial sequence
  STR00416.1_Blautia_coccoides_group
atcagagagtttgatcctggctcaggatgaacgctggcggcgtgcttaacacatgcaagtcgagcgaagcacttaagcggatctcttcggattgaaacttatttgactgagcggcggacgggtgagtaacgcgtgggtaacctgcctcatacagggggataacagttagaaatggctgctaataccgcataagcgcacaggaccgcatggtctggtgtgaaaaactccggtggtatgagatggacccgcgtctgattagctagttggaggggtaacggcccaccaaggcgacgatcagtagccggcctgagagggtgaacggccacattgggactgagacacggcccagactcctacgggaggcagcagtggggaatattgcacaatgggggaaaccctgatgcagcgacgccgcgtgaaggaagaagtatctcggtatgtaaacttctatcagcagggaagaaaatgacggtacctgactaagaagccccggctaactacgtgccagcagccgcggtaatacgtagggggcaagcgttatccggatttactgggtgtaaagggagcgtagacggaagagtaagtctgatgtgaaaggctggggcttaaccccaggactgcattggaaactgtttttctagagtgccggagaggtaagcggaattcctagtgtagcggtgaaatgcgtagatattaggaggaacaccagtggcgaaggcggcttactggacggtaactgacgttgaggctcgaaagcgtggggagcaaacaggattagataccctggtagtccacgccgtaaacgatgaatactaggtgtcgggtggcaaagccattcggtgccgcagcaaacgcaataagtattccacctggggagtacgttcgcaagaatgaaactcaaaggaattgacggggacccgcacaagcggtggagcatgtggtttaattcgaagcaacgcgaagaaccttaccaagtcttgacatccctctgaccggcccgtaacggggccttcccttcggggcagaggagacaggtggtgcatggttgtcgtcagctcgtgtcgtgagatgttgggttaagtcccgcaacgagcgcaacccctatccttagtagccagcaggtgaagctgggcactctagggagactgccggggataacccggaggaaggcggggacgacgtcaaatcatcatgccccttatgatttgggctacacacgtgctacaatggcgtaaacaaagggaagcgagacagtgatgttgagcaaatcccaaaaataacgtcccagttcggactgcagtctgcaactcgactgcacgaagctggaatcgctagtaatcgcgaatcagaatgtcgcggtgaatacgttcccgggtcttgtacacaccgcccgtcacaccatgggagtcagtaacgcccgaagtcagtgacccaaccttataggagggagctgccgaaggcgggaccgataactggggtgaagtcgtaacaaggtagccgtatcggaaggtgcggctggatcacctccttt

SEQ ID NO: 1222 - DNA, 1531 bp, artificial sequence
  STR00416.2_Blautia_coccoides_group
atcagagagtttgatcctggctcaggatgaacgctggcggcgtgcttaacacatgcaagtcgagcgaagcacttgaacggatttcttcggattgaagtttttgtgactgagcggcggacgggtgagtaacgcgtgggtaacctgcctcatacagggggataacagttagaaatggctgctaataccgcataagcgcacaggaccgcatggtctggtgtgaaaaactccggtggtatgagatggacccgcgtctgattagctagttggaggggtaacggcccaccaaggcgacgatcagtagccggcctgagagggtgaacggccacattgggactgagacacggcccagactcctacgggaggcagcagtggggaatattgcacaatgggggaaaccctgatgcagcgacgccgcgtgaaggaagaagtatctcggtatgtaaacttctatcagcagggaagaaaatgacggtacctgactaagaagccccggctaactacgtgccagcagccgcggtaatacgtagggggcaagcgttatccggatttactgggtgtaaagggagcgtagacggaagagcaagtctgatgtgaaaggctggggcttaaccccaggactgcattggaaactgtttttctagagtgccggagaggtaagcggaattcctagtgtagcggtgaaatgcgtagatattaggaggaacaccagtggcgaaggcggcttactggacggtaactgacgttgaggctcgaaagcgtggggagcaaacaggattagataccctggtagtccacgccgtaaacgatgaatactaggtgtcgggtggcaaagccattcggtgccgcagcaaacgcaataagtattccacctggggagtacgttcgcaagaatgaaactcaaaggaattgacggggacccgcacaagcggtggagcatgtggtttaattcgaagcaacgcgaagaaccttaccaagtcttgacatccctctgaccggcccgtaacggggccttcccttcggggcagaggagacaggtggtgcatggttgtcgtcagctcgtgtcgtgagatgttgggttaagtcccgcaacgagcgcaacccctatccttagtagccagcaggtgaagctgggcactctagggagactgccggggataacccggaggaaggcggggacgacgtcaaatcatcatgccccttatgatttgggctacacacgtgctacaatggcgtaaacaaagggaagcgagacagtgatgttgagcaaatcccaaaaataacgtcccagttcggactgcagtctgcaactcgactgcacgaagctggaatcgctagtaatcgcgaatcagaatgtcgcggtgaatacgttcccgggtcttgtacacaccgcccgtcacaccatgggagtcagtaacgcccgaagtcagtgacccaaccttataggagggagctgccgaaggcgggaccgataactggggtgaagtcgtaacaaggtagccgtatcggaaggtgcggctggatcacctccttt

SEQ ID NO: 1223 - DNA, 1531 bp, artificial sequence
  STR00416.3_Blautia_coccoides_group
atcagagagtttgatcctggctcaggatgaacgctggcggcgtgcttaacacatgcaagtcgagcgaagcacttgaacggatttcttcggattgaagtttttgtgactgagcggcggacgggtgagtaacgcgtgggtaacctgcctcatacagggggataacagttagaaatggctgctaataccgcataagcgcacaggaccgcatggtctggtgtgaaaaactccggtggtatgagatggacccgcgtctgattagctagttggaggggtaacggcccaccaaggcaacgatcagtagccggcctgagagggtgaacggccacattgggactgagacacggcccagactcctacgggaggcagcagtggggaatattgcacaatgggggaaaccctgatgcagcgacgccgcgtgaaggaagaagtatctcggtatgtaaacttctatcagcagggaagaaaatgacggtacctgactaagaagccccggctaactacgtgccagcagccgcggtaatacgtagggggcaagcgttatccggatttactgggtgtaaagggagcgtagacggaagagcaagtctgatgtgaaaggctggggcttaaccccaggactgcattggaaactgtttttctagagtgccggagaggtaagcggaattcctagtgtagcggtgaaatgcgtagatattaggaggaacaccagtggcgaaggcggcttactggacggtaactgacgttgaggctcgaaagcgtggggagcaaacaggattagataccctggtagtccacgccgtaaacgatgaatactaggtgtcgggtggcaaagccattcggtgccgcagcaaacgcaataagtattccacctggggagtacgttcgcaagaatgaaactcaaaggaattgacggggacccgcacaagcggtggagcatgtggtttaattcgaagcaacgcgaagaaccttaccaagtcttgacatccctctgaccggcccgtaacggggccttcccttcggggcagaggagacaggtggtgcatggttgtcgtcagctcgtgtcgtgagatgttgggttaagtcccgcaacgagcgcaacccctatccttagtagccagcaggtgaagctgggcactctagggagactgccggggataacccggaggaaggcggggacgacgtcaaatcatcatgccccttatgatttgggctacacacgtgctacaatggcgtaaacaaagggaagcgagacagcgatgttgagcaaatcccaaaaataacgtcccagttcggactgcagtctgcaactcgactgcacgaagctggaatcgctagtaatcgcgaatcagaatgtcgcggtgaatacgttcccgggtcttgtacacaccgcccgtcacaccatgggagtcagtaacgcccgaagtcagtgacccaaccttataggagggagctgccgaaggcgggaccgataactggggtgaagtcgtaacaaggtagccgtatcggaaggtgcggctggatcacctccttt

SEQ ID NO: 1224 - DNA, 1531 bp, artificial sequence
  STR00416.4_Blautia_coccoides_group
atcagagagtttgatcctggctcaggatgaacgctggcggcgtgcttaacacatgcaagtcgagcgaagcgcttaaacggatttcttcggattgaagtttttgtgactgagcggcggacgggtgagtaacgcgtgggtaacctgcctcatacagggggataacagttagaaatggctgctaataccgcataagcgcacaggaccgcatggtctggtgtgaaaaactccggtggtatgagatggacccgcgtctgattagctagttggaggggtaacggcccaccaaggcgacgatcagtagccggcctgagagggtgaacggccacattgggactgagacacggcccagactcctacgggaggcagcagtggggaatattgcacaatgggggaaaccctgatgcagcgacgccgcgtgaaggaagaagtatctcggtatgtaaacttctatcagcagggaagaaaatgacggtacctgactaagaagccccggctaactacgtgccagcagccgcggtaatacgtagggggcaagcgttatccggatttactgggtgtaaagggagcgtagacggaagagcaagtctgatgtgaaaggctggggcttaaccccaggactgcattggaaactgtttttctagagtgccggagaggtaagcggaattcctagtgtagcggtgaaatgcgtagatattaggaggaacaccagtggcgaaggcggcttactggacggtaactgacgttgaggctcgaaagcgtggggagcaaacaggattagataccctggtagtccacgccgtaaacgatgaatactaggtgtcgggtggcaaagccattcggtgccgcagcaaacgcaataagtattccacctggggagtacgttcgcaagaatgaaactcaaaggaattgacggggacccgcacaagcggtggagcatgtggtttaattcgaagcaacgcgaagaaccttaccaagtcttgacatccctctgaccggcccgtaacggggccttcccttcggggcagaggagacaggtggtgcatggttgtcgtcagctcgtgtcgtgagatgttgggttaagtcccgcaacgagcgcaacccctatccttagtagccagcaggtgaagctgggcactctagggagactgccggggataacccggaggaaggcggggacgacgtcaaatcatcatgccccttatgatttgggctacacacgtgctacaatggcgtaaacaaagggaagcgagacagcgatgttgagcaaatcccaaaaataacgtcccagttcggactgcagtctgcaactcgactgcacgaagctggaatcgctagtaatcgcgaatcagaatgtcgcggtgaatacgttcccgggtcttgtacacaccgcccgtcacaccatgggagtcagtaacgcccgaagtcagtgacccaaccttttaggagggagctgccgaaggcgggaccgataactggggtgaagtcgtaacaaggtagccgtatcggaaggtgcggctggatcacctccttt

SEQ ID NO: 1225 - DNA, 1531 bp, artificial sequence
  STR00844_Blautia_coccoides_group
atcagagagtttgatcctggctcaggatgaacgctggcggcgtgcttaacacatgcaagtcgagcgaagcatttaagacgatctcttcggattgagtcttatatgactgagcggcggacgggtgagtaacgcgtgggtaacctgcctcatacagggggataacagttagaaatgactgctaataccgcataagcgcacagggctgcatggcctggtgtgaaaaactccggtggtatgagatggacccgcgtctgattagctagttggaggggtaacggcccaccaaggcgacgatcagtagccggcctgagagggtgaacggccacattgggactgagacacggcccagactcctacgggaggcagcagtggggaatattgcacaatgggggaaaccctgatgcagcgacgccgcgtgaaggaagaagtatctcggtatgtaaacttctatcagcagggaagaaaatgacggtacctgactaagaagccccggctaactacgtgccagcagccgcggtaatacgtagggggcaagcgttatccggatttactgggtgtaaagggagcgtagacggaagagcaagtctgatgtgaaaggctggggcttaaccccaggactgcattggaaactgtttttctagagtgccggagaggtaagcggaattcctagtgtagcggtgaaatgcgtagatattaggaggaacaccagtggcgaaggcggcttactggacggtaactgacgttgaggctcgaaagcgtggggagcaaacaggattagataccctggtagtccacgccgtaaacgatgaatactaggtgtcgggtggcaaagccattcggtgccgcagcaaacgcaataagtattccacctggggagtacgttcgcaagaatgaaactcaaaggaattgacggggacccgcacaagcggtggagcatgtggtttaattcgaagcaacgcgaagaaccttaccaagtcttgacatccctctgacgtgcccgtaacggggcattcccttcggggcagaggagacaggtggtgcatggttgtcgtcagctcgtgtcgtgagatgttgggttaagtcccgcaacgagcgcaacccctatccttagtagccagcacatcatggtgggcactctagggagactgccggggataacccggaggaaggcggggacgacgtcaaatcatcatgccccttatgatttgggctacacacgtgctacaatggcgtaaacaaagggaagcgagacagcgatgtttagcaaatcccaaaaataacgtcccagttcggactgcagtctgcaactcgactgcacgaagctggaatcgctagtaatcgcgaatcagaatgtcgcggtgaatacgttcccgggtcttgtacacaccgcccgtcacaccatgggagtcagtaacgcccgaagtcagtgacccaaccttaacggagggagctgccgaaggcgggaccgataactggggtgaagtcgtaacaaggtagccgtatcggaaggtgcggctggatcacctccttt

SEQ ID NO: 1226 - DNA, 1430 bp, artificial sequence
  STR00853_Blautia_coccoides_group
ttgtgactgagcggcggacgggtgagtaacgcgtgggtaacctgcctcatacagggggataacagttagaaatgactgctaataccgcataagcgcacaggaccgcatggtctggtgtgaaaaactccggtggtatgagatggacccgcgtctgattagctagttggaggggtaacggcccaccaaggcgacgatcagtagccggcctgagagggtgaacggccacattgggactgagacacggcccagactcctacgggaggcagcagtggggaatattgcacaatgggggaaaccctgatgcagcgacgccgcgtgaaggaagaagtatctcggtatgtaaacttctatcagcagggaagaaaatgacggtacctgactaagaagccccggctaactacgtgccagcagccgcggtaatacgtagggggcaagcgttatccggatttactgggtgtaaagggagcgtagacggaagagcaagtctgatgtgaaaggctggggcttaaccccaggactgcattggaaactgttgttctagagtgccggagaggtaagcggaattcctagtgtagcggtgaaatgcgtagatattaggaggaacaccagtggcgaaggcggcttactggacggtaactgacgttgaggctcgaaagcgtggggagcaaacaggattagataccctggtagtccacgccgtaaacgatgaatactaggtgtcgggtggcaaagccattcggtgccgcagcaaacgcaataagtattccacctggggagtacgttcgcaagaatgaaactcaaaggaattgacggggacccgcacaagcggtggagcatgtggtttaattcgaagcaacgcgaagaaccttaccaagtcttgacatccctctgaccgtcccgtaatggggacttcccttcggggcagaggagacaggtggtgcatggttgtcgtcagctcgtgtcgtgagatgttgggttaagtcccgcaacgagcgcaacccttatccttagtagccagcacatgatggtgggcactctagggagactgccggggataacccggaggaaggcggggacgacgtcaaatcatcatgccccttatgatttgggctacacacgtgctacaatggcgtaaacaaagggaagcgagacagcgatgttgagcgaatcccaaaaataacgtcccagttcggactgcagtctgcaactcgactgcacgaagctggaatcgctagtaatcgcggatcagaatgccgcggtgaatacgttcccgggtcttgtacacaccgcccgtcacaccatgggagtcagtaacgcccgaagtcagtgacctaaccgaaaggaaggagctgccgaaggcgggaccgataactggggtgaagtcgtaacaaggtagccgtatcggaaggtgcggctggatcacctccttt

SEQ ID NO: 1227 - DNA, 1531 bp, artificial sequence
  STR00858_Blautia_coccoides_group
atcagagagtttgatcctggctcaggatgaacgctggcggcgtgcttaacacatgcaagtcgagcgaagcacttaagtggatctcttcggattgaaacttatttgactgagcggcggacgggtgagtaacgcgtgggtaacctgcctcatacagggggataacagttagaaatggctgctaataccgcataagcgcacaggaccgcatggtctggtgtgaaaaactccggtggtatgagatggacccgcgtctgattagctagttggaggggtaacggcccaccaaggcaacgatcagtagccggcctgagagggtgaacggccacattgggactgagacacggcccagactcctacgggaggcagcagtggggaatattgcacaatgggggaaaccctgatgcagcgacgccgcgtgaaggaagaagtatctcggtatgtaaacttctatcagcagggaagaaaatgacggtacctgactaagaagccccggctaactacgtgccagcagccgcggtaatacgtagggggcaagcgttatccggatttactgggtgtaaagggagcgtagacggaagagcaagtctgatgtgaaaggctggggcttaaccccaggactgcattggaaactgtttttctagagtgccggagaggtaagcggaattcctagtgtagcggtgaaatgcgtagatattaggaggaacaccagtggcgaaggcggcttactggacggtaactgacgttgaggctcgaaagcgtggggagcaaacaggattagataccctggtagtccacgccgtaaacgatgaatactaggtgtcgggtggcaaagccattcggtgccgcagcaaacgcaataagtattccacctggggagtacgttcgcaagaatgaaactcaaaggaattgacggggacccgcacaagcggtggagcatgtggtttaattcgaagcaacgcgaagaaccttaccaagtcttgacatccctctgaccggcccgtaacggggccttcccttcggggcagaggagacaggtggtgcatggttgtcgtcagctcgtgtcgtgagatgttgggttaagtcccgcaacgagcgcaacccctatccttagtagccagcaggtgaagctgggcactctagggagactgccggggataacccggaggaaggcggggacgacgtcaaatcatcatgccccttatgatttgggctacacacgtgctacaatggcgtaaacaaagggaagcgagacagtgatgttgagcaaatcccaaaaataacgtcccagttcggactgcagtctgcaactcgactgcacgaagctggaatcgctagtaatcgcgaatcagaatgtcgcggtgaatacgttcccgggtcttgtacacaccgcccgtcacaccatgggagtcagtaacgcccgaagtcagtgacccaaccttacaggagggagctgccgaaggcgggaccgataactggggtgaagtcgtaacaaggtagccgtatcggaaggtgcggctggatcacctccttt

SEQ ID NO: 1228 - DNA, 1531 bp, artificial sequence
  STR00858.1_Blautia_coccoides_group
atcagagagtttgatcctggctcaggatgaacgctggcggcgtgcttaacacatgcaagtcgagcgaagcacttaagtggatctcttcggattgaagcttatttgactgagcggcggacgggtgagtaacgcgtgggtaacctgcctcatacagggggataacagttagaaatggctgctaataccgcataagcgcacaggaccgcatggtctggtgtgaaaaactccggtggtatgagatggacccgcgtctgattagctagttggaggggtaacggcccaccaaggcgacgatcagtagccggcctgagagggtgaacggccacattgggactgagacacggcccagactcctacgggaggcagcagtggggaatattgcacaatgggggaaaccctgatgcagcgacgccgcgtgaaggaagaagtatctcggtatgtaaacttctatcagcagggaagaaaatgacggtacctgactaagaagccccggctaactacgtgccagcagccgcggtaatacgtagggggcaagcgttatccggatttactgggtgtaaagggagcgtagacggaagagcaagtctgatgtgaaaggctggggcttaaccccaggactgcattggaaactgtttttctagagtgccggagaggtaagcggaattcctagtgtagcggtgaaatgcgtagatattaggaggaacaccagtggcgaaggcggcttactggacggtaactgacgttgaggctcgaaagcgtggggagcaaacaggattagataccctggtagtccacgccgtaaacgatgaatactaggtgtcgggtggcaaagccattcggtgccgcagcaaacgcaataagtattccacctggggagtacgttcgcaagaatgaaactcaaaggaattgacggggacccgcacaagcggtggagcatgtggtttaattcgaagcaacgcgaagaaccttaccaagtcttgacatccctctgaccggcccgtaacggggccttcccttcggggcagaggagacaggtggtgcatggttgtcgtcagctcgtgtcgtgagatgttgggttaagtcccgcaacgagcgcaacccctatccttagtagccagcaggtgaagctgggcactctagggagactgccggggataacccggaggaaggcggggacgacgtcaaatcatcatgccccttatgatttgggctacacacgtgctacaatggcgtaaacaaagggaagcgagacagtgatgttgagcaaatcccaaaaataacgtcccagttcggactgcagtctgcaactcgactgcacgaagctggaatcgctagtaatcgcgaatcagaatgtcgcggtgaatacgttcccgggtcttgtacacaccgcccgtcacaccatgggagtcagtaacgcccgaagtcagtgacccaaccttacaggagggagctgccgaaggcgggaccgataactggggtgaagtcgtaacaaggtagccgtatcggaaggtgcggctggatcacctccttt

SEQ ID NO: 1229 - DNA, 1531 bp, artificial sequence
  STR00858.2_Blautia_coccoides_group
atcagagagtttgatcctggctcaggatgaacgctggcggcgtgcttaacacatgcaagtcgagcgaagcacttaagtggatctcttcggattgaaacttatttgactgagcggcggacgggtgagtaacgcgtgggtaacctgcctcatacagggggataacagttagaaatggctgctaataccgcataagcgcacaggaccgcatggtctggtgtgaaaaactccggtggtatgagatggacccgcgtctgattagctagttggaggggtaacggcccaccaaggcgacgatcagtagccggcctgagagggtgaacggccacattgggactgagacacggcccagactcctacgggaggcagcagtggggaatattgcacaatgggggaaaccctgatgcagcgacgccgcgtgaaggaagaagtatctcggtatgtaaacttctatcagcagggaagaaaatgacggtacctgactaagaagccccggctaactacgtgccagcagccgcggtaatacgtagggggcaagcgttatccggatttactgggtgtaaagggagcgtagacggaagagcaagtctgatgtgaaaggctggggcttaaccccaggactgcattggaaactgtttttctagagtgccggagaggtaagcggaattcctagtgtagcggtgaaatgcgtagatattaggaggaacaccagtggcgaaggcggcttactggacggtaactgacgttgaggctcgaaagcgtggggagcaaacaggattagataccctggtagtccacgccgtaaacgatgaatactaggtgtcgggtggcaaagccattcggtgccgcagcaaacgcaataagtattccacctggggagtacgttcgcaagaatgaaactcaaaggaattgacggggacccgcacaagcggtggagcatgtggtttaattcgaagcaacgcgaagaaccttaccaagtcttgacatccctctgaccggcccgtaacggggccttcccttcggggcagaggagacaggtggtgcatggttgtcgtcagctcgtgtcgtgagatgttgggttaagtcccgcaacgagcgcaacccctatccttagtagccagcaggtgaagctgggcactctagggagactgccggggataacccggaggaaggcggggacgacgtcaaatcatcatgccccttatgatttgggctacacacgtgctacaatggcgtaaacaaagggaagcgagacagcgatgttgagcaaatcccaaaaataacgtcccagttcggactgcagtctgcaactcgactgcacgaagctggaatcgctagtaatcgcgaatcagaatgtcgcggtgaatacgttcccgggtcttgtacacaccgcccgtcacaccatgggagtcagtaacgcccgaagtcagtgacccaaccttataggagggagctgccgaaggcgggaccgataactggggtgaagtcgtaacaaggtagccgtatcggaaggtgcggctggatcacctccttt

SEQ ID NO: 1230 - DNA, 1531 bp, artificial sequence; identical to SEQ ID NO: 1229
  STR00858.3_Blautia_coccoides_group

SEQ ID NO: 1231 - DNA, 1531 bp, artificial sequence
  STR00858.4_Blautia_coccoides_group
atcagagagtttgatcctggctcaggatgaacgctggcggcgtgcttaacacatgcaagtcgagcgaagcacttaaacggatttcttcggattgaagtttttgtgactgagcggcggacgggtgagtaacgcgtgggtaacctgcctcatacagggggataacagttagaaatggctgctaataccgcataagcgcacaggaccgcatggtctggtgtgaaaaactccggtggtatgagatggacccgcgtctgattagctagttggaggggtaacggcccaccaaggcaacgatcagtagccggcctgagagggtgaacggccacattgggactgagacacggcccagactcctacgggaggcagcagtggggaatattgcacaatgggggaaaccctgatgcagcgacgccgcgtgaaggaagaagtatctcggtatgtaaacttctatcagcagggaagaaaatgacggtacctgactaagaagccccggctaactacgtgccagcagccgcggtaatacgtagggggcaagcgttatccggatttactgggtgtaaagggagcgtagacggaagagcaagtctgatgtgaaaggctggggcttaaccccaggactgcattggaaactgtttttctagagtgccggagaggtaagcggaattcctagtgtagcggtgaaatgcgtagatattaggaggaacaccagtggcgaaggcggcttactggacggtaactgacgttgaggctcgaaagcgtggggagcaaacaggattagataccctggtagtccacgccgtaaacgatgaatactaggtgtcgggtggcaaagccattcggtgccgcagcaaacgcaataagtattccacctggggagtacgttcgcaagaatgaaactcaaaggaattgacggggacccgcacaagcggtggagcatgtggtttaattcgaagcaacgcgaagaaccttaccaagtcttgacatccctctgaccggcccgtaacggggccttcccttcggggcagaggagacaggtggtgcatggttgtcgtcagctcgtgtcgtgagatgttgggttaagtcccgcaacgagcgcaacccctatccttagtagccagcaggtgaagctgggcactctagggagactgccggggataacccggaggaaggcggggacgacgtcaaatcatcatgccccttatgatttgggctacacacgtgctacaatggcgtaaacaaagggaagcgagacagtgatgttgagcaaatcccaaaaataacgtcccagttcggactgcagtctgcaactcgactgcacgaagctggaatcgctagtaatcgcgaatcagaatgtcgcggtgaatacgttcccgggtcttgtacacaccgcccgtcacaccatgggagtcagtaacgcccgaagtcagtgacccaaccttacaggagggagctgccgaaggcgggaccgataactggggtgaagtcgtaacaaggtagccgtatcggaaggtgcggctggatcacctccttt

SEQ ID NO: 1232 - DNA, 1531 bp, artificial sequence
  STR01054_Blautia_coccoides_group
atcagagagtttgatcctggctcaggatgaacgctggcggcgtgcttaacacatgcaagtcgagcgaagcacttaagtggatctcttcggattgaagcttatttgactgagcggcggacgggtgagtaacgcgtgggtaacctgcctcatacagggggataacagttagaaatggctgctaataccgcataagcgcacaggaccgcatggtctggtgtgaaaaactccggtggtatgagatggacccgcgtctgattagctagttggaggggtaacggcccaccaaggcgacgatcagtagccggcctgagagggtgaacggccacattgggactgagacacggcccagactcctacgggaggcagcagtggggaatattgcacaatgggggaaaccctgatgcagcgacgccgcgtgaaggaagaagtatctcggtatgtaaacttctatcagcagggaagaaaatgacggtacctgactaagaagccccggctaactacgtgccagcagccgcggtaatacgtagggggcaagcgttatccggatttactgggtgtaaagggagcgtagacggaagagcaagtctgatgtgaaaggctggggcttaaccccaggactgcattggaaactgtttttctagagtgccggagaggtaagcggaattcctagtgtagcggtgaaatgcgtagatattaggaggaacaccagtggcgaaggcggcttactggacggtaactgacgttgaggctcgaaagcgtggggagcaaacaggattagataccctggtagtccacgccgtaaacgatgaatactaggtgtcgggtggcaaagccattcggtgccgcagcaaacgcaataagtattccacctggggagtacgttcgcaagaatgaaactcaaaggaattgacggggacccgcacaagcggtggagcatgtggtttaattcgaagcaacgcgaagaaccttaccaagtcttgacatccctctgaccggcccgtaacggggccttcccttcggggcagaggagacaggtggtgcatggttgtcgtcagctcgtgtcgtgagatgttgggttaagtcccgcaacgagcgcaacccctatccttagtagccagcaggtgaagctgggcactctagggagactgccggggataacccggaggaaggcggggacgacgtcaaatcatcatgccccttatgatttgggctacacacgtgctacaatggcgtaaacaaagggaagcgagacagcgatgttgagcaaatcccaaaaataacgtcccagttcggactgcagtctgcaactcgactgcacgaagctggaatcgctagtaatcgcgaatcagaatgtcgcggtgaatacgttcccgggtcttgtacacaccgcccgtcacaccatgggagtcagtaacgcccgaagtcagtgacccaaccttacaggagggagctgccgaaggcgggaccgataactggggtgaagtcgtaacaaggtagccgtatcggaaggtgcggctggatcacctccttt

SEQ ID NO: 1233 - DNA, 1531 bp, artificial sequence
  STR01090_Blautia_coccoides_group
atcagagagtttgatcctggctcaggatgaacgctggcggcgtgcttaacacatgcaagtcgagcgaagcacttaagtggatctcttcggattgaaacttatttgactgagcggcggacgggtgagtaacgcgtgggtaacctgcctcatacagggggataacagttagaaatggctgctaataccgcataagcgcacaggaccgcatggtctggtgtgaaaaactccggtggtatgagatggacccgcgtctgattagctagttggaggggtaacggcccaccaaggcgacgatcagtagccggcctgagagggtgaacggccacattgggactgagacacggcccagactcctacgggaggcagcagtggggaatattgcacaatgggggaaaccctgatgcagcgacgccgcgtgaaggaagaagtatctcggtatgtaaacttctatcagcagggaagaaaatgacggtacctgactaagaagccccggctaactacgtgccagcagccgcggtaatacgtagggggcaagcgttatccggatttactgggtgtaaagggagcgtagacggaagagcaagtctgatgtgaaaggctggggcttaaccccaggactgcattggaaactgtttttctagagtgccggagaggtaagcggaattcctagtgtagcggtgaaatgcgtagatattaggaggaacaccagtggcgaaggcggcttactggacggtaactgacgttgaggctcgaaagcgtggggagcaaacaggattagataccctggtagtccacgccgtaaacgatgaatactaggtgtcgggtggcaaagccattcggtgccgcagcaaacgcaataagtattccacctggggagtacgttcgcaagaatgaaactcaaaggaattgacggggacccgcacaagcggtggagcatgtggtttaattcgaagcaacgcgaagaaccttaccaagtcttgacatccctctgaccggcccgtaacggggccttcccttcggggcagaggagacaggtggtgcatggttgtcgtcagctcgtgtcgtgagatgttgggttaagtcccgcaacgagcgcaacccctatccttagtagccagcaggtgaagctgggcactctagggagactgccggggataacccggaggaaggcggggacgacgtcaaatcatcatgccccttatgatttgggctacacacgtgctacaatggcgtaaacaaagggaagcgagacagtgatgttgagcaaatcccaaaaataacgtcccagttcggactgcagtctgcaactcgactgcacgaagctggaatcgctagtaatcgcgaatcagaatgtcgcggtgaatacgttcccgggtcttgtacacaccgcccgtcacaccatgggagtcagtaacgcccgaagtcagtgacccaaccttacaggagggagctgccgaaggcgggaccgataactggggtgaagtcgtaacaaggtagccgtatcggaaggtgcggctggatcacctccttt

SEQ ID NO: 1234 - DNA, 1299 bp, artificial sequence
  STR01160_Blautia_coccoides_group
atcagagagtttgatcctggctcaggatgaacgctggcggcgtgcttaacacatgcaagtcgagcgaagcgctaagacggatttcttcggattgaagtctttgtgactgagcggcggacgggtgagtaacgcgtgggtaacctgcctcatacagggggataacagttagaaatgactgctaataccgcataagcgcacaggaccgcatggtctggtgtgaaaaactccggtggtatgagatggacccgcgtctgattagctagttggaggggtaacggcccaccaaggcgacgatcagtagccggcctgagagggtgaacggccacattgggactgagacacggcccagactcctacgggaggcagcagtggggaatattgcacaatgggggaaaccctgatgcagcgacgccgcgtgaaggaagaagtatctcggtatgtaaacttctatcagcagggaagaaaatgacggtacctgactaagaagccccggctaactacgtgccagcagccgcggtaatacgtagggggcaagcgttatccggatttactgggtgtaaagggagcgtagacggaagagcaagtctgatgtgaaaggctggggcttaaccccaggactgcattggaaactgttgttctagagtgccggagaggtaagcggaattcctagtgtagcggtgaaatgcgtagatattaggaggaacaccagtggcgaaggcggcttactggacggtaactgacgttgaggctcgaaagcgtggggagcaaacaggattagataccctggtagtccacgccgtaaacgatgaatactaggtgtcgggtggcaaagccattcggtgccgcagcaaacgcaataagtattccacctggggagtacgttcgcaagaatgaaactcaaaggaattgacggggacccgcacaagcggtggagcatgtggtttaattcgaagcaacgcgaagaaccttaccaagtcttgacatccctctgaccgtcccgtaacggggacttcccttcggggcagaggagacaggtggtgcatggttgtcgtcagctcgtgtcgtgagatgttgggttaagtcccgcaacgagcgcaacccttatccttagtagccagcacatgatggtgggcactctagggagactgccggggataacccggaggaaggcggggacgacgtcaaatcatcatgccccttatgatttgggctacacacgtgctacaatggcgtaaacaaagggaagcgagacagcgatgttgagcgaatcccaaaaataacgtcccagttcggactgca

SEQ ID NO: 1235 - DNA, 1530 bp, artificial sequence
  STR01274_Blautia_coccoides_group
atcagagagtttgatcctggctcaggatgaacgctggcggcgtgcttaacacatgcaagtcgagcgaagcgctaagacggatttcttcggattgaagtctttgtgactgagcggcggacgggtgagtaacgcgtgggtaacctgcctcatacagggggataacagttagaaatgactgctaataccgcataagcgcacaggaccgcatggtctggtgtgaaaaactccggtggtatgagatggacccgcgtctgattagctagttggaggggtaacggcccaccaaggcgacgatcagtagccggcctgagagggtgaacggccacattgggactgagacacggcccagactcctacgggaggcagcagtggggaatattgcacaatgggggaaaccctgatgcagcgacgccgcgtgaaggaagaagtatctcggtatgtaaacttctatcagcagggaagaaaatgacggtacctgactaagaagccccggctaactacgtgccagcagccgcggtaatacgtagggggcaagcgttatccggatttactgggtgtaaagggagcgtagacggaagagcaagtctgatgtgaaaggctggggcttaaccccaggactgcattggaaactgttgttctagagtgccggagaggtaagcggaattcctagtgtagcggtgaaatgcgtagatattaggaggaacaccagtggcgaaggcggcttactggacggtaactgacgttgaggctcgaaagcgtggggagcaaacaggattagataccctggtagtccacgccgtaaacgatgaatactaggtgtcgggtggcaaagccattcggtgccgcagcaaacgcaataagtattccacctggggagtacgttcgcaagaatgaaactcaaaggaattgacggggacccgcacaagcggtggagcatgtggtttaattcgaagcaacgcgaagaaccttaccaagtcttgacatccctctggccgtcccgtaacggggacttcccttcggggcagaggagacaggtggtgcatggttgtcgtcagctcgtgtcgtgagatgttgggttaagtcccgcaacgagcgcaacccttatccttagtagccagcacatgatggtgggcactctagggagactgccggggataacccggaggaaggcggggacgacgtcaaatcatcatgccccttatgatttgggctacacacgtgctacaatggcgtaaacaaagggaagcgagacagcgatgttgagcgaatcccaaaaataacgtcccagttcggactgcagtctgcaactcgactgcacgaagctggaatcgctagtaatcgcggatcagaatgccgcggtgaatacgttcccgggtcttgtacacaccgcccgtcacaccatgggagtcagtaacgcccgaagtcagtgacctaaccgaaaggaaggagctgccgaaggcgggaccgataactggggtgaagtcgtaacaaggtagccgtatcggaaggtgcggctggatcacctccttt

SEQ ID NO: 1236 - DNA, 1531 bp, artificial sequence
  STR01361_Blautia_coccoides_group
atcagagagtttgatcctggctcaggatgaacgctggcggcgtgcttaacacatgcaagtcgagcgaagcacttgaacggatttcttcggattgaagtttttgtgactgagcggcggacgggtgagtaacgcgtgggtaacctgcctcatacagggggataacagttagaaatggctgctaataccgcataagcgcacaggaccgcatggtctggtgtgaaaaactccggtggtatgagatggacccgcgtctgattagctagttggaggggtaacggcccaccaaggcgacgatcagtagccggcctgagagggtgaacggccacattgggactgagacacggcccagactcctacgggaggcagcagtggggaatattgcacaatgggggaaaccctgatgcagcgacgccgcgtgaaggaagaagtatctcggtatgtaaacttctatcagcagggaagaaaatgacggtacctgactaagaagccccggctaactacgtgccagcagccgcggtaatacgtagggggcaagcgttatccggatttactgggtgtaaagggagcgtagacggaagagcaagtctgatgtgaaaggctggggcttaaccccaggactgcattggaaactgtttttctagagtgccggagaggtaagcggaattcctagtgtagcggtgaaatgcgtagatattaggaggaacaccagtggcgaaggcggcttactggacggtaactgacgttgaggctcgaaagcgtggggagcaaacaggattagataccctggtagtccacgccgtaaacgatgaatactaggtgtcgggtggcaaagccattcggtgccgcagcaaacgcaataagtattccacctggggagtacgttcgcaagaatgaaactcaaaggaattgacggggacccgcacaagcggtggagcatgtggtttaattcgaagcaacgcgaagaaccttaccaagtcttgacatccctctgaccggcccgtaacggggccttcccttcggggcagaggagacaggtggtgcatggttgtcgtcagctcgtgtcgtgagatgttgggttaagtcccgcaacgagcgcaacccctatccttagtagccagcaggtgaagctgggcactctagggagactgccggggataacccggaggaaggcggggacgacgtcaaatcatcatgccccttatgatttgggctacacacgtgctacaatggcgtaaacaaagggaagcgagacagcgatgttgagcaaatcccaaaaataacgtcccagttcggactgcagtctgcaactcgactgcacgaagctggaatcgctagtaatcgcgaatcagaatgtcgcggtgaatacgttcccgggtcttgtacacaccgcccgtcacaccatgggagtcagtaacgcccgaagtcagtgacccaaccttataggagggagctgccgaaggcgggaccgataactggggtgaagtcgtaacaaggtagccgtatcggaaggtgcggctggatcacctccttt

SEQ ID NO: 1237 - DNA, 1531 bp, artificial sequence; identical to SEQ ID NO: 1228
  STR01388_Blautia_coccoides_group

SEQ ID NO: 1238 - DNA, 1530 bp, artificial sequence
  STR01497_Blautia_coccoides_group
atcagagagtttgatcctggctcaggatgaacgctggcggcgtgcttaacacatgcaagtcgagcgaagcgctaagacggatttcttcggattgaagtctttgtgactgagcggcggacgggtgagtaacgcgtgggtaacctgcctcatacagggggataacagttagaaatgactgctaataccgcataagcgcacaggaccgcatggtctggtgtgaaaaactccggtggtatgagatggacccgcgtctgattagctagttggaggggtaacggcccaccaaggcgacgatcagtagccggcctgagagggtgaacggccacattgggactgagacacggcccagactcctacgggaggcagcagtggggaatattgcacaatgggggaaaccctgatgcagcgacgccgcgtgaaggaagaagtatctcggtatgtaaacttctatcagcagggaagaaaatgacggtacctgactaagaagccccggctaactacgtgccagcagccgcggtaatacgtagggggcaagcgttatccggatttactgggtgtaaagggagcgtagacggaagagcaagtctgatgtgaaaggctggggcttaaccccaggactgcattggaaactgttgttctagagtgccggagaggtaagcggaattcctagtgtagcggtgaaatgcgtagatattaggaggaacaccagtggcgaaggcggcttactggacggtaactgacgttgaggctcgaaagcgtggggagcaaacaggattagataccctggtagtccacgccgtaaacgatgaatactaggtgtcgggtggcaaagccattcggtgccgcagcaaacgcaataagtattccacctggggagtacgttcgcaagaatgaaactcaaaggaattgacggggacccgcacaagcggtggagcatgtggtttaattcgaagcaacgcgaagaaccttaccaagtcttgacatccctctgaccgtcccgtaacggggacttcccttcggggcagaggagacaggtggtgcatggttgtcgtcagctcgtgtcgtgagatgttgggttaagtcccgcaacgagcgcaacccttatccttagtagccagcacatgatggtgggcactctagggagactgccggggataacccggaggaaggcggggacgacgtcaaatcatcatgccccttatgatttgggctacacacgtgctacaatggcgtaaacaaagggaagcgagacagcgatgttgagcgaatcccaaaaataacgtcccagttcggactgcagtctgcaactcgactgcacgaagctggaatcgctagtaatcgcggatcagaatgccgcggtgaatacgttcccgggtcttgtacacaccgcccgtcacaccatgggagtcagtaacgcccgaagtcagtgacctaaccgaaaggaaggagctgccgaaggcgggaccgataactggggtgaagtcgtaacaaggtagccgtatcggaaggtgcggctggatcacctccttt

SEQ ID NO: 1239 - DNA, 1531 bp, artificial sequence
  STR01533_Blautia_coccoides_group
atcagagagtttgatcctggctcaggatgaacgctggcggcgtgcttaacacatgcaagtcgagcgaagcacttaaacggatctcttcggattgaagcttttgtgactgagcggcggacgggtgagtaacgcgtgggtaacctgcctcatacagggggataacagttagaaatggctgctaataccgcataagcgcacaggaccgcatggtctggtgtgaaaaactccggtggtatgagatggacccgcgtctgattagctagttggaggggtaacggcccaccaaggcgacgatcagtagccggcctgagagggtgaacggccacattgggactgagacacggcccagactcctacgggaggcagcagtggggaatattgcacaatgggggaaaccctgatgcagcgacgccgcgtgaaggaagaagtatctcggtatgtaaacttctatcagcagggaagaaaatgacggtacctgactaagaagccccggctaactacgtgccagcagccgcggtaatacgtagggggcaagcgttatccggatttactgggtgtaaagggagcgtagacggaagagcaagtctgatgtgaaaggctggggcttaaccccaggactgcattggaaactgtttttctagagtgccggagaggtaagcggaattcctagtgtagcggtgaaatgcgtagatattaggaggaacaccagtggcgaaggcggcttactggacggtaactgacgttgaggctcgaaagcgtggggagcaaacaggattagataccctggtagtccacgccgtaaacgatgaatactaggtgtcgggtggcaaagccattcggtgccgcagcaaacgcaataagtattccacctggggagtacgttcgcaagaatgaaactcaaaggaattgacggggacccgcacaagcggtggagcatgtggtttaattcgaagcaacgcgaagaaccttaccaagtcttgacatccctctgaccggcccgtaacggggccttcccttcggggcagaggagacaggtggtgcatggttgtcgtcagctcgtgtcgtgagatgttgggttaagtcccgcaacgagcgcaacccctatccttagtagccagcaggtgaagctgggcactctagggagactgccggggataacccggaggaaggcggggacgacgtcaaatcatcatgccccttatgatttgggctacacacgtgctacaatggcgtaaacaaagggaagcgagacagcgatgttgagcaaatcccaaaaataacgtcccagttcggactgcagtctgcaactcgactgcacgaagctggaatcgctagtaatcgcgaatcagaatgtcgcggtgaatacgttcccgggtcttgtacacaccgcccgtcacaccatgggagtcagtaacgcccgaagtcagtgacccaaccttataggagggagctgccgaaggcgggaccgataactggggtgaagtcgtaacaaggtagccgtatcggaaggtgcggctggatcacctccttt

SEQ ID NO: 1240 - DNA, 1531 bp, artificial sequence; identical to SEQ ID NO: 1236
  STR01539_Blautia_coccoides_group

SEQ ID NO: 1241 - DNA, 1479 bp, artificial sequence
  ERR171261_05561_Blautia_coccoides_group
ctccgtttgatcctggcggaggccactgctatgggggtccgactaagccatgcaagtcgaacgggccttgtgcccgtggcgaacggctcagtaacacgtggacaacctaccctggggtccgggataaccccgggaaactggggctaatcccggataggcgaggtctcctggaatggggcctcgccgaaaggtcttttgaccgccccaggatgggtctgcggccgattaggtagttggtagggtaacggcctaccaagcctacgatcggtacgggttgtgagagcaagagcccggagacggggcctgagacaaggccccgggccctacggggcgcagcaggcgcgaaaactccgcaatgcgcgaaagcgcgacggggggacccccagtgccactccgtaaggagtggcttttccggagtgtaaaaagctccgggaataagggctgggcaagaccggtgccagccgccgcggtaacaccggcagcccgagtggtggccgcgtttattgggcctaaagcgtccgtagccggtccggtaagtctccggtgaaagcccgcagctcaactgcgggagtagccggagatactgccggacttggggccgggagaggccggaggtacccccggggtaggggtgaaatcctgtaatcccggggggaccacctgtggcgaaggcgtccggctggaacgggcccgacggtgagggacgaaagccaggggagcgaaccggattagatacccgggtagtcctggccgtaaacgatgcggacttggtgttggggcaacctcgagttgccccagtgccgaagggaagccgttaagtccgccgcctggggagtacggccgcaaggctgaaacttaaaggaattggcgggggagcaccacaacgcgtggagcctgcggtttaattggattcaacgccggacacctcaccgggggcgacggcaggatgatggccaggttgatgaccttgcctgacgagccgagaggaggtgcatggccgccgtcagctcgtaccgtgaggcgtcctgttaagtcaggcaacgagcgagacccgcgcccctagttgccagcgggtcccgtaagggacgccgggcacactagggggaccgccagcgataagctggaggaaggtgcgggcgacggtaggtccgtatgccccgaaacccccgggctacacgcgggctacaatggccgggacaatgggtaccgaccccgaaagggggaggtaatcccataaacccggccgtagttcggatcgagggctgcaactcgccctcgtgaagctggaatgcgtagtaatcgcgggtcactatcccgcggtgaatacgtccctgctccttgcacacaccgcccgtcacgccacccaaacggggttcggatgaggccatggcctctggccatggtcgaatccgggccccgtgaggagggcgaagtcgtaacaaggtagccgtaggggaacctgcggctggatcacctcct

SEQ ID NO: 1242 - DNA, 1469 bp, artificial sequence
  ERR2221380_05159_Blautia_coccoides_group
attccggttgatcctgccggaggccattgctattgggatccgatttagccatgctagtcgcacgagtttagactcgtggcgaatagctcagtaacacgtggccaaactacccttcggaacacaataccctcgggaaactgaggctaatagtgtataccataccaccactggaatgagtggtatgccaaacgctccggcgccgaaggatgtggctgcggccgattaggtagacggtggggtaacggcccaccgtgccaataatcggtacgggtcatgagagtgagaacccggagacggaatctgagacaagattccgggccctacggggcgcagcaggcgcgaaacctttacactgcacgacagtgcgatagggggatcccaagtgcacaggcatagcgcctgtgcttttcggtaccgtaaggtggtaccagaataagggctgggcaagaccggtgccagccgccgcggtaataccggcagcccaagtgatggccgatcttattgggcctaaagcgtccgtagctggccgcgcaagtccatcgggaaatccacctgctcaacaggtgggcgcccggtagaaactgcgtggcttgggaccggaaggcgcgacgggtacgtccggggtaggagtgaaatcccgtaatcctggacggaccgccgatggcgaaagcacgtcgcgaggacggatccgacagtgagggacgaaagccagggtctcgaaccggattagatacccgggtagtcctggccgtaaacaatgtctgctaggtgtggctcccactacgagtgggtgctgtgccgtagggaagccgctaagcagaccgcctgggaagtacgtccgcaaggatgaaacttaaaggaattggcgggggagcactacaaccggaggagcctgcggtttaattggactcaacgccggacatctcaccagcatcgactgtggtaatgacgatcaggttgatgaccttatccgagcctcagagaggaggtgcatggccgccgtcagctcgtaccgtgaggcgtcctgttaagtcaggcaacgagcgagacccgcacccttacttgccagcagtaccgcgaggtagctggggacagtagggggaccgccgtggctaacacggaggaaggaacgggcaacggtaggtcagtatgccccgaatgtgctgggcaacacgcgggctacaatggtcgagacaaagggttccaactccgaaaggagacggtaatctcagaaactcgatcgtagttcggattgtgggctgcaactcgcccacatgaagctggattcggtagtaatcgcgtgtcacaagcgcgcggtgaatacgtccctgctccttgcacacaccgcccgtcaaagcacccgagtgaggtccggatgaggcgttccacgaacgtcgaatctgggcttcgcaagggggcttaagtcgtaacaaggtagccgtaggggaatctgcggctggatcacctcc

SEQ ID NO: 1243 - DNA, 1527 bp, artificial sequence
  GCF_001689125.2_00208_Blautia_coccoides_group
tgaagagtttgatcctggctcagattgaacgctggcggcatgccttacacatgcaagtcgaacggcagcacgggagcaatcctggtggcgagtggcgaacgggtgagtaatacatcggaacgtgtcctgtagtgggggatagcccggcgaaagccggattaataccgcatacgctctacggaggaaagggggggatcttaggacctcccgctacaggggcggccgatggcagattagctagttggtggggtaaaggcctaccaaggcgacgatctgtagctggtctgagaggacgaccagccacactgggactgagacacggcccagactcctacgggaggcagcagtggggaattttggacaatgggcgaaagcctgatccagcaatgccgcgtgtgtgaagaaggccttcgggttgtaaagcacttttgtccggaaagaaaacctctgggttaataccccggggggatgacggtaccggaagaataagcaccggctaactacgtgccagcagccgcggtaatacgtagggtgcaagcgttaatcggaattactgggcgtaaagcgtgcgcaggcggtccgctaagacagatgtgaaatccccgggcttaacctgggaactgcatttgtgactggcgggctagagtatggcagaggggggtagaattccacgtgtagcagtgaaatgcgtagagatgtggaggaataccgatggcgaaggcagccccctgggccaatactgacgctcatgcacgaaagcgtggggagcaaacaggattagataccctggtagtccacgccctaaacgatgtcaactagttgttgggtcttcattgacttagtaacgtagctaacgcgtgaagttgaccgcctggggagtacggtcgcaagattaaaactcaaaggaattgacggggacccgcacaagcggtggatgatgtggattaattcgatgcaacgcgaaaaaccttacctacccttgacatgtatggaatcctgctgagaggtgggagtgcccgaaagggagccataacacaggtgctgcatggctgtcgtcagctcgtgtcgtgagatgttgggttaagtcccgcaacgagcgcaacccttgtccctagttgctacgcaagagcactctagggagactgccggtgacaaaccggaggaaggtggggatgacgtcaagtcctcatggcccttatgggtagggcttcacacgtcatacaatggtcggaacagagggtcgccaacccgcgagggggagccaatcccagaaaaccgatcgtagtccggatcgcactctgcaactcgagtgcgtgaagctggaatcgctagtaatcgcggatcagcatgccgcggtgaatacgttcccgggtcttgtacacaccgcccgtcacaccatgggagtgggttttaccagaagtggctagtctaaccgcaaggaggacggtcaccacggtaggattcatgactggggtgaagtcgtaacaaggtagccgtatcggaaggtgcggctggatcacctccttt

SEQ ID NO: 1244 - DNA, 1527 bp, artificial sequence
  GCF_001689125.2_00221_Blautia_coccoides_group
tgaagagtttgatcctggctcagattgaacgctggcggcatgccttacacatgcaagtcgaacggcagcacgggggcaaccctggtggcgagtggcgaacgggtgagtaatacatcggaacgtgtcctgtagtgggggatagcccggcgaaagccggattaataccgcatacgctctacggaggaaagggggggatcttaggacctcccgctacaggggcggccgatggcagattagctagttggtggggtaaaggcctaccaaggcgacgatctgtagctggtctgagaggacgaccagccacactgggactgagacacggcccagactcctacgggaggcagcagtggggaattttggacaatgggcgaaagcctgatccagcaatgccgcgtgtgtgaagaaggccttcgggttgtaaagcacttttgtccggaaagaaaacctccgccctaatatggtggggggatgacggtaccggaagaataagcaccggctaactacgtgccagcagccgcggtaatacgtagggtgcaagcgttaatcggaattactgggcgtaaagcgtgcgcaggcggtccgctaagacagatgtgaaatccccgggcttaacctgggaactgcatttgtgactggcgggctagagtatggcagaggggggtagaattccacgtgtagcagtgaaatgcgtagagatgtggaggaataccgatggcgaaggcagccccctgggccaatactgacgctcatgcacgaaagcgtggggagcaaacaggattagataccctggtagtccacgccctaaacgatgtcaactagttgttgggtcttcattgacttagtaacgtagctaacgcgtgaagttgaccgcctggggagtacggtcgcaagattaaaactcaaaggaattgacggggacccgcacaagcggtggatgatgtggattaattcgatgcaacgcgaaaaaccttacctacccttgacatgtatggaatcctgctgagaggtgggagtgcccgaaagggagccataacacaggtgctgcatggctgtcgtcagctcgtgtcgtgagatgttgggttaagtcccgcaacgagcgcaacccttgtccctagttgctacgcaagagcactctagggagactgccggtgacaaaccggaggaaggtggggatgacgtcaagtcctcatggcccttatgggtagggcttcacacgtcatacaatggtcggaacagagggtcgccaacccgcgagggggagccaatcccagaaaaccgatcgtagtccggatcgcactctgcaactcgagtgcgtgaagctggaatcgctagtaatcgcggatcagcatgccgcggtgaatacgttcccgggtcttgtacacaccgcccgtcacaccatgggagtgggttttaccagaagtggctagtctaaccgcaaggaggacggtcaccacggtaggattcatgactggggtgaagtcgtaacaaggtagccgtatcggaaggtgcggctggatcacctccttt

SEQ ID NO: 1245 - DNA, 1527 bp, artificial sequence
  GCF_001689125.2_02212_Blautia_coccoides_group
tgaagagtttgatcctggctcagattgaacgctagcgggatgccttacacatgcaagtcgaacggcagcacggacttcggtctggtggcgagtggcgaacgggtgagtaatgtatcggaacgtgcccagtagcgggggataactacgcgaaagcgtagctaataccgcatacgccctacgggggaaagcaggggatcgcaagaccttgcactattggagcggccgatatcggattagctagttggtggggtaacggctcaccaaggcgacgatccgtagctggtttgagaggacgaccagccacactgggactgagacacggcccagactcctacgggaggcagcagtggggaattttggacaatgggggaaaccctgatccagccatcccgcgtgtgcgatgaaggccttcgggttgtaaagcacttttggcaggaaagaaacgtcgtgggttaataccccgcgaaactgacggtacctgcagaataagcaccggctaactacgtgccagcagccgcggtaatacgtagggtgcaagcgttaatcggaattactgggcgtaaagcgtgcgcaggcggttcggaaagaaagatgtgaaatcccagagcttaactttggaactgcatttttaactaccgggctagagtgtgtcagagggaggtggaattccgcgtgtagcagtgaaatgcgtagatatgcggaggaacaccgatggcgaaggcagcctcctgggataacactgacgctcatgcacgaaagcgtggggagcaaacaggattagataccctggtagtccacgccctaaacgatgtcaactagctgttggggccttcgggccttggtagcgcagctaacgcgtgaagttgaccgcctggggagtacggtcgcaagattaaaactcaaaggaattgacggggacccgcacaagcggtggatgatgtggattaattcgatgcaacgcgaaaaaccttacctacccttgacatgtctggaatgccgaagagatttggcagtgctcgcaagagaaccggaacacaggtgctgcatggctgtcgtcagctcgtgtcgtgagatgttgggttaagtcccgcaacgagcgcaacccttgtcattagttgctacgaaagggcactctaatgagactgccggtgacaaaccggaggaaggtggggatgacgtcaagtcctcatggcccttatgggtagggcttcacacgtcatacaatggtcgggacagagggtcgccaacccgcgagggggagccaatcccagaaacccgatcgtagtccggatcgcagtctgcaactcgactgcgtgaagtcggaatcgctagtaatcgcggatcagcatgtcgcggtgaatacgttcccgggtcttgtacacaccgcccgtcacaccatgggagtgggttttaccagaagtagttagcctaaccgcaaggggggcgattaccacggtaggattcatgactggggtgaagtcgtaacaaggtagccgtatcggaaggtgcggctggatcacctccttt

SEQ ID NO: 1246 - DNA, 1513 bp, artificial sequence
  GCF_001689125.2_03388_Blautia_coccoides_group
atggagagtttgatcctggctcaggatgaacgctagcgggaggcctaacacatgcaagccgagcggtagggtttcttcggagacctgagagcggcgcacgggtgcggaacacgtgtgcaacctgcctttatctgggggatagcctttcgaaagggagattaataccccataatatatttatcggcatcgatgaatattgaaaactccggtggatagagatgggcacgcgcaagattagatagttggtgaggtaacggctcaccaagtctgcgatctttagggggcctgagagggtgatcccccacactggtactgagacacggaccagactcctacgggaggcagcagtgaggaatattggacaatgggtgagagcctgatccagccatcccgcgtgaaggacgacggccctatgggttgtaaacttcttttgtatagggataaacctactctcgtgagagtagctgaaggtactatacgaataagcaccggctaactccgtgccagcagccgcggtaatacggagggtgcaagcgttatccggatttattgggtttaaagggtccgtaggcggatctgtaagtcagtggtgaaatctcacagcttaactgtgaaactgccattgatactgcaggtcttgagtgttgttgaagtagctggaataagtagtgtagcggtgaaatgcatagatattacttagaacaccaattgcgaaggcaggttactaagcaacaactgacgctgatggacgaaagcgtggggagcgaacaggattagataccctggtagtccacgccgtaaacgatgctaactcgtttttggattttcggattcagagactaagcgaaagtgataagttagccacctggggagtacgaacgcaagtttgaaactcaaaggaattgacgggggcccgcacaagcggtggattatgtggtttaattcgatgatacgcgaggaaccttaccaaggcttaaatgggaaatgacaggtttagaaatagacttttcttcggacatttttcaaggtgctgcatggttgtcgtcagctcgtgccgtgaggtgttaggttaagtcctgcaacgagcgcaacccctgtcactagttgccatcattaagttggggactctagtgagactgcctacgcaagtagagaggaaggtggggatgacgtcaaatcatcacggcccttacgccttgggccacacacgtaatacaatggccggtacagagggcagctacacagcgatgtgatgcaaatctcgaaagccggtctcagttcggattggagtctgcaactcgactctatgaagctggaatcgctagtaatcgcgcatcagccatggcgcggtgaatacgttcccgggccttgtacacaccgcccgtcaagccatggaagtctggggtacctgaagtcggtgaccgtaacaggagctgcctagggtaaaacaggtaactagggctaagtcgtaacaaggtagccgtaccggaaggtgcggctggaacatctcatt

SEQ ID NO: 1247 - DNA, 1484 bp, artificial sequence
  GCF_001689125.2_03998_Blautia_coccoides_group
cttgagagtttgatcctggctcagagcgaacgctggcggcaggcttaacacatgcaagtcgagcgggcgtagcaatacgtcagcggcagacgggtgagtaacgcgtgggaacgtaccttttggttcggaacaacacagggaaacttgtgctaataccggataagcccttacggggaaagatttatcgccgaaagatcggcccgcgtctgattagctagttggtagggtaatggcctaccaaggcgacgatcagtagctggtctgagaggatgatcagccacattgggactgagacacggcccaaactcctacgggaggcagcagtggggaatattggacaatgggggcaaccctgatccagccatgccgcgtgagtgatgaaggccctagggttgtaaagctcttttgtgcgggaagataatgacggtaccgcaagaataagccccggctaacttcgtgccagcagccgcggtaatacgaagggggctagcgttgctcggaatcactgggcgtaaagggtgcgtaggcgggtctttaagtcaggggtgaaatcctggagctcaactccagaactgcctttgatactgaagatcttgagttcgggagaggtgagtggaactgcgagtgtagaggtgaaattcgtagatattcgcaagaacaccagtggcgaaggcggctcactggcccgatactgacgctgaggcacgaaagcgtggggagcaaacaggattagataccctggtagtccacgccgtaaacgatgaatgccagccgttagtgggtttactcactagtggcgcagctaacgctttaagcattccgcctggggagtacggtcgcaagattaaaactcaaaggaattgacgggggcccgcacaagcggtggagcatgtggtttaattcgacgcaacgcgcagaaccttaccagcccttgacatgtccaggaccggtcgcagagatgtgaccttctcttcggagcctggaacacaggtgctgcatggctgtcgtcagctcgtgtcgtgagatgttgggttaagtcccgcaacgagcgcaacccccgtccttagttgctaccatttagttgagcactctaaggagactgccggtgataagccgcgaggaaggtggggatgacgtcaagtcctcatggcccttacgggctgggctacacacgtgctacaatggcggtgacaatgggaagcgaaggggcaacccctagcaaatctcaaaaagccgtctcagttcggattgggctctgcaactcgagcccatgaagttggaatcgctagtaatcgtggatcagcacgccacggtgaatacgttcccgggccttgtacacaccgcccgtcacaccatgggagttggttttacctgaagacggtgcgctaaccgaaagggggcagccggccacggtagggtcagcgactggggtgaagtcgtaacaaggtagccgtaggggaacctgcggctggatcacctccttt

SEQ ID NO: 1248 - DNA, 1540 bp, artificial sequence
  GCF_002221555.2_01860_Blautia_coccoides_group
tgaagagtttgatcctggctcagattgaacgctggcggcatgcttaacacatgcaagtcgaacggcagcacggtctagcttgctagatgggtggcgagtggcgaacgggtgagtaacgcgtaggaatatgccttaaagtgggggacaacttggggaaactcaagctaataccgcatagatctctgaggagagaagctggggaccttcgggcctggcgctttaagattagcctgcgtccgattagctagttggtggggtaagggcctaccaaggcgacgatcggtagctggtctgagaggatgaccagccacactggaactgagacacggtccagactcctacgggaggcagcagtggggaatattggacaatggggggaaccctgatccagcaatgccgcgtgtgtgaagaaggcctgagggttgtaaagcactttcagtggggaggagggttgacaggttaagagctggttgactggacgttacccacagaagaagcaccggctaactccgtgccagcagccgcggtaatacggagggtgcgagcgttaatcggaattactgggcgtaaagggtgcgtaggtggtttgataagttatctgtgaaagccctgggctcaacctgggaactgcagataagactgttggactcgagtataggagagggtagtggaatttccggtgtagcggtgaaatgcgtagagatcggaaggaacaccagtggcgaaggcggctacctggcctaatactgacactgaggcacgaaagcgtggggagcaaacaggattagataccctggtagtccacgctgtaaacgatgtcaactagctgttggtcttatgaatgagattagtggcgcagcaaacgcgataagttgaccgcctggggagtacggtcgcaagattaaaactcaaaggaattgacgggggcccgcacaagcggtggagcatgtggtttaattcgatgcaacgcgaagaaccttacctacccttgacatacagtgaacctttcagagatgagagggtgccttcgggagcactgatacaggtgctgcatggctgtcgtcagctcgtgtcgtgagatgttgggttaagtcccgtaacgagcgcaacccttatccttagttaccagcgcgtagaggcggggactctagggagactgccggtgacaaaccggaggaaggcggggacgacgtcaagtcatcatggcccttacgggtagggctacacacgtgctacaatggccggtacagagggaagcgaaggggcgacctggagccaatctttaaaagccggtcgtagtccggattggagtctgcaactcgactccatgaagtcggaatcgctagtaatcgcgaatcagcatgtcgcggtgaatacgttcccgggccttgtacacaccgcccgtcacaccatgggagtgggttgcaccagaagtagatagtctaaccttcggggggacgtttaccacggtgtgattcatgactggggtgaagtcgtaacaaggtagccgtaggggaacctgcggctggatcacctcctt

SEQ ID NO: 1249 - DNA, 1540 bp, artificial sequence; identical to SEQ ID NO: 1248
  GCF_002221555.2_03035_Blautia_coccoides_group

SEQ ID NO: 1250 - DNA, 1528 bp, artificial sequence
  GCF_002221555.2_03644_Blautia_coccoides_group
acggagagtttgatcctggctcaggacgaacgctggcggcgtgcttaacacatgcaagtcgaacgctgaagcttggtgcttgcactgggtggatgagtggcgaacgggtgagtaatacgtgagtaacctgcccttgactctgggataagcctgggaaactgggtctaatactggatacgacatgtcaccgcatggtggtgtgtggaaagggttttactggttttggatgggctcacggcctatcagcttgttggtggggtaatggctcaccaaggcgacgacgggtagccggcctgagagggtgaccggccacactgggactgagacacggcccagactcctacgggaggcagcagtggggaatattgcacaatgggcgaaagcctgatgcagcgacgccgcgtgagggatgacggccttcgggttgtaaacctctttcagcacggaagaagcgaaagtgacggtacgtgcagaagaagcgccggctaactacgtgccagcagccgcggtaatacgtagggcgcaagcgttgtccggaattattgggcgtaaagagctcgtaggcggtttgtcgcgtctgctgtgaaagcccggggcttaaccccgggtgtgcagtgggtacgggcagacttgagtgcagtaggggagactggaattcctggtgtagcggtgaaatgcgcagatatcaggaggaacaccgatggcgaaggcaggtctctgggctgttactgacgctgaggagcgaaagcatggggagcgaacaggattagataccctggtagtccatgccgtaaacgttgggcactaggtgtggggaacattccacgttttccgcgccgtagctaacgcattaagtgccccgcctggggagtacggccgcaaggctaaaactcaaaggaattgacgggggcccgcacaagcggcggagcatgcggattaattcgatgcaacgcgaagaaccttaccaaggcttgacatacaccggaccgggccagagatggtctttcccccttgtggggctggtgtacaggtggtgcatggttgtcgtcagctcgtgtcgtgagatgttgggttaagtcccgcaacgagcgcaaccctcgttctatgttgccagcacgtgatggtggggactcataggagactgccggggtcaactcggaggaaggtggggatgacgtcaaatcatcatgccccttatgtcttgggcttcacgcatgctacaatggccagtacaatgggttgcgatgccgcgaggtggagctaatcccaaaaagctggtctcagttcggatcgtggtctgcaactcgaccacgtgaagtcggagtcgctagtaatcgcagatcagcaacgctgcggtgaatacgttcccgggccttgtacacaccgcccgtcaagtcacgaaagttggtaacacccgaagccggtggcctaacccttgtggggggagccgtcgaaggtgggactggcgattgggactaagtcgtaacaaggtagccgtaccggaaggtgcggctggatcacctccttt

SEQ ID NO: 1251 - DNA, 1539 bp, artificial sequence
  GCF_002221555.2_04642_Blautia_coccoides_group
ttgaagagtttgatcatggctcagattgaacgctggcggcaggcctaacacatgcaagtcgagcggcagcacaagtgagtttactcatgaggtggcgagcggcggacgggtgagtaatgcctagggatctgcccagtcgagggggataacagttggaaacgactgctaataccgcatacgccctacgggggaaagagggggactttcgggcctctcgcgattggatgaacctaggtgggattagctagttggtgaggtaatggctcaccaaggcgacgatccctagctgttctgagaggatgatcagccacactgggactgagacacggcccagactcctacgggaggcagcagtggggaatattgcacaatgggggaaaccctgatgcagccatgccgcgtgtgtgaagaaggccttcgggttgtaaagcactttcagtagggaggaaagggtaagtcctaatacgacttatctgtgacgttacctacagaagaaggaccggctaactccgtgccagcagccgcggtaatacggagggtccgagcgttaatcggaattactgggcgtaaagcgtgcgcaggcggtttgttaagcgagatgtgaaagccctgggctcaacctaggaatcgcatttcgaactgaccaactagagtcttgtagaggggggtagaattccaggtgtagcggtgaaatgcgtagagatctggaggaataccggtggcgaaggcggccccctggacaaagactgacgctcatgcacgaaagcgtggggagcaaacaggattagataccctggtagtccacgccgtaaacgatgtctactcggagtttggtgtcttgaacactgggctctcaagctaacgcattaagtagaccgcctggggagtacggccgcaaggttaaaactcaaatgaattgacgggggcccgcacaagcggtggagcatgtggtttaattcgatgcaacgcgaagaaccttacctactcttgacatccacggaagactgcagagatgcggttgtgccttcgggaaccgtgagacaggtgctgcatggctgtcgtcagctcgtgttgtgaaatgttgggttaagtcccgcaacgagcgcaacccctatccttatttgccagcacgtaatggtgggaactctagggagactgccggtgataaaccggaggaaggtggggacgacgtcaagtcatcatggcccttacgagtagggctacacacgtgctacaatggcgagtacagagggttgcaaagccgcgaggtggagctaatctcacaaagctcgtcgtagtccggattggagtctgcaactcgactccatgaagtcggaatcgctagtaatcgtggatcagaatgccacggtgaatacgttcccgggccttgtacacaccgcccgtcacaccatgggagtgggctgcaaaagaagtgggtagcttaaccttcgggggggcgctcaccactttgtggttcatgactggggtgaagtcgtaacaaggtagccctaggggaacctggggctggatcacctcctt

SEQ ID NO: 1252 - DNA, 1539 bp, artificial sequence
  GCF_002221555.2_04655_Blautia_coccoides_group
ttgaagagtttgatcatggctcagattgaacgctggcggcaggcctaacacatgcaagtcgagcggcagcacaagtgagtttactcatgaggtggcgagcggcggacgggtgagtaatgcctagggatctgcccagtcgagggggataacagttggaaacgactgctaataccgcatacgccctacgggggaaagagggggactttcgggcctctcgcgattggatgaacctaggtgggattagctagttggtgaggtaatggctcaccaaggcgacgatccctagctgttctgagaggatgatcagccacactgggactgagacacggcccagactcctacgggaggcagcagtggggaatattgcacaatgggggaaaccctgatgcagccatgccgcgtgtgtgaagaaggccttcgggttgtaaagcactttcagtagggaggaaagggtaagtcctaatacggcttatctgtgacgttacctacagaagaaggaccggctaactccgtgccagcagccgcggtaatacggagggtccgagcgttaatcggaattactgggcgtaaagcgtgcgcaggcggtttgttaagcgagatgtgaaagccctgggctcaacctaggaatcgcatttcgaactgaccaactagagtcttgtagaggggggtagaattccaggtgtagcggtgaaatgcgtagagatctggaggaataccggtggcgaaggcggccccctggacaaagactgacgctcatgcacgaaagcgtggggagcaaacaggattagataccctggtagtccacgccgtaaacgatgtctactcggagtttggtgtcttgaacactgggctctcaagctaacgcattaagtagaccgcctggggagtacggccgcaaggttaaaactcaaatgaattgacgggggcccgcacaagcggtggagcatgtggtttaattcgatgcaacgcgaagaaccttacctactcttgacatccacggaagactgcagagatgcggttgtgccttcgggaaccgtgagacaggtgctgcatggctgtcgtcagctcgtgttgtgaaatgttgggttaagtcccgcaacgagcgcaacccctatccttatttgccagcacgtaatggtgggaactctagggagactgccggtgataaaccggaggaaggtggggacgacgtcaagtcatcatggcccttacgagtagggctacacacgtgctacaatggcgagtacagagggttgcaaagccgcgaggtggagctaatctcacaaagctcgtcgtagtccggattggagtctgcaactcgactccatgaagtcggaatcgctagtaatcgtggatcagaatgccacggtgaatacgttcccgggccttgtacacaccgcccgtcacaccatgggagtgggctgcaaaagaagtgggtagcttaaccttcgggggggcgctcaccactttgtggttcatgactggggtgaagtcgtaacaaggtagccctaggggaacctggggctggatcacctcctt

SEQ ID NO: 1253 - DNA, 1464 bp, artificial sequence
  GCF_002270465.1_00001_Blautia_coccoides_group
atccgactgagtggcgaactggtgagtaacacgtgggtaacctgcccagaagaaggggataacacctggaaacagatgctaataccgtataacaacaagaaccacatggttcttgtttgaaagctggcctttgtgctagtgcttctggatggacccgcggcgtattagctagttggtgagataatagctcaccaaggcaatgatacgtagcagacctgagagggtaatctgccacaatgggactgagacacggcccatactcctacgggaggcagcagtagggaatcttccacaatggacgaaagtctgatggagcaacgccgcgtgagtgaagaagggtttcggctcgtaaaactctgttgttagagaagaacagccgtgagagcaactgctcacggtatgacggtatctaaccagaaagtcacggctaactacgtgccagcagccgcggtaatacgtaggtggcaaacgttgtccggatttattgggcgtaaagggagcgcaggcggtttattaagtctgatgtgaaagccttcggcttaaccggagaagtgcatcggaaactgataaacttgagtgcagaaaaggatagtggaacttcatgtgtagcggtgaaatgcgtagatatatgaaggaacaccagtggcgaaggcggctatctggtctgtaactgacgctgaggctcgaaagcatgggtagcaaacaggattagataccctggtagtccatgccgtaaacgatgaatgctaggtgttggaaggtttccgcctttcagtgccgcagctaacgcattaagcattccgcctggggagtacgaccgcaaggttgaaactcaaaggaattgacggggacccgcacaagcggtggagcatgtggtttaattcgatgctacgcgaagaaccttaccaggacttgacatcttctgccaatctaagagattagacgttcccttcggggacagaatgacaggtggtgcatggttgtcgtcagctcgtgtcgtgagatgttgggttaagtcccgcaacgagcgcaacccttgtctttagttgccagcattaagttgggcactctagagagactgccggtgataaaccggaggaaggtggggatgacgtcaaatcatcatgccccttatgtcctgggctacacacgtgctacaatgggcgatacaacgagttgcgaaaccgcgaggtcaagctaatctcttaaagtcgttctcagttcggattgcagtctgcaactcgactgcatgaagttggaatcgctagtaatcgtggatcagcatgccacggtgaatacgttcccgggtcttgtacacaccgcccgtcacaccatgagagtttgtaacacccaaagtcggttggataacctttttaggagtccgccgcctaaggtgggacagatgattagggtgaagtcgtaacaaggtagccgtaggagaacctgcggctggatcacctcctt

SEQ ID NO: 1254 - DNA, 1536 bp, artificial sequence
  GCF_002915535.1_04581_Blautia_coccoides_group
ttgaagagtttgatcatggctcagattgaacgctggcggcaggcctaacacatgcaagtcgagcggtagcacagggagcttgctcctgggtgacgagcggcggacgggtgagtaatgtctgggaaactgcctgatggagggggataactactggaaacggtagctaataccgcataacgtcttcggaccaaagagggggaccttcgggcctcttgccatcagatgtgcccagatgggattagctagtaggtgaggtaatggctcacctaggcgacgatccctagctggtctgagaggatgaccagccacactggaactgagacacggtccagactcctacgggaggcagcagtggggaatattgcacaatgggcgcaagcctgatgcagccatgccgcgtgtatgaagaaggccttcgggttgtaaagtactttcagcgaggaggaaggcgttaaggttaataaccttggcgattgacgttactcgcagaagaagcaccggctaactccgtgccagcagccgcggtaatacggagggtgcaagcgttaatcggaattactgggcgtaaagcgcacgcaggcggtctgtcaagtcggatgtgaaatccccgggctcaacctgggaactgcattcgaaactggcaggctagagtcttgtagaggggggtagaattccaggtgtagcggtgaaatgcgtagagatctggaggaataccggtggcgaaggcggccccctggacaaagactgacgctcaggtgcgaaagcgtggggagcaaacaggattagataccctggtagtccacgccgtaaacgatgtcgacttggaggttgttcccttgaggagtggcttccggagctaacgcgttaagtcgaccgcctggggagtacggccgcaaggttaaaactcaaatgaattgacgggggcccgcacaagcggtggagcatgtggtttaattcgatgcaacgcgaagaaccttacctactcttgacatccacagaattcggcagagatgccttagtgccttcgggaactgtgagacaggtgctgcatggctgtcgtcagctcgtgttgtgaaatgttgggttaagtcccgcaacgagcgcaacccttatcctttgttgccagcggttcggccgggaactcaaaggagactgccagtgataaactggaggaaggtggggatgacgtcaagtcatcatggcccttacgagtagggctacacacgtgctacaatggcgcatacaaagagaagcgacctcgcgagagcaagcggacctcataaagtgcgtcgtagtccggatcggagtctgcaactcgactccgtgaagtcggaatcgctagtaatcgtagatcagaatgctacggtgaatacgttcccgggccttgtacacaccgcccgtcacaccatgggagtgggttgcaaaagaagtaggtagcttaaccttcgggagggcgcttaccactttgtgattcatgactggggtgaagtcgtaacaaggtaaccgtaggggaacctgcggttggatcacctcctt

SEQ ID NO: 1255 - DNA, 1553 bp, artificial sequence
  GCF_003478165.1_05135_Blautia_coccoides_group
tgaagagtttgatcctggctcagaatgaacgctggcggcaggcctaacacatgcaagtcggacggaaacgacaagaacaaacccttcggggggcgatcttgggcgtcgagtggcggacgggtgagtaacgcgtgggaatctgccctttagtcggggacaacctgtggaaacgcaggctaataccggatgtgctctacggagtaaaggtgccctctacttgtaaggtatcgctaaaggatgagcccacgttagattagctggttggtagggtaaaggcctaccaaggcgacgatctatagctggtttgagaggatgatcagccacactgggactgagacacggcccagactcctacgggaggcagcagtggggaatattgcacaatgagggaaaccttgatgcagccatgccgcgtgtgtgaagaaggcccgagggttgtaaagcactttcagtggtgaagaaaggtatttgattaataatcaagtactgtgacattagccacagaagaagcaccggctaactctgtgccagcagccgcggtaatacagagggtgcaagcgttattcggaattactgggcgtaaagcgcgcgtaggcggactgttaagtcggttgtgaaagccctgggctcaacctaggaattgcatccgatactggcagtctagagtttaagagaggcaaggggaattccaggtgtagcagtgaaatgcgtagatatctggaggaacatcagtggcgaaggcgccttgctggcttaaaactgacgctgaggtgcgaaagcgtgggtagcgaacgggattagataccccggtagtccatgccgtaaacgatgtcaactagctgttggtcttattaaaaagattagtagcgcagctaacgcgataagttgaccgcctggggagtacggtcgcaagattaaaactcaaaggaattgacgggggcccgcacaagcggtggagcatgtggtttaattcgatgcaacgcgaagaaccttaccatcccttgacatcctgcgaactttctagagatagattggtgccttcgggaacgcagtgacaggtgctgcatggctgtcgtcagctcgtgtcgtgagatgttgggttaagtcccgcaacgagcgcaacccttatcattagttgctaccatttagttgagaactctagtgagactgccggtgataaaccggaggaaggcggggacgacgtcaagtcatcatggcccttatgggatgggctacacacgtgctacaatgggaggagacaaagagcagccaactggcaacagtgcgcaaatctcacaaaacctctcgtagtccggattggagtctgcaactcgactccatgaagtcggaatcgctagtaatcgcgaatcagaatgtcgcggtgaatacgttcccgggccttgtacacaccgcccgtcacaccatgggagtgggttgctccagaagtggttagtctaaccttcgggaggacgatcaccacggagtgattcatgactggggtgaagtcgtaacaaggtagccctagcggaagctggggctggatcacctccttt

SEQ ID NO: 1256 - DNA, 1478 bp, artificial sequence
  GCF_003479705.1_01785_Blautia_coccoides_group
gagagtttgatcctggctcagagcgaacgctggcggcatgcttaacacatgcaagtcgcacggatctttcgggattagtggcggacgggtgagtaacgcgtagggatctatccatgggtgggggacaactccgggaaactggagctaataccgcatgatacctgagggtcaaaggcgcaagtcgcctgtggaggaacctgcgttcgattagctagttggtggggtaaaggcctaccaaggcgatgatcgatagctggtttgagaggatgatcagccacactgggactgagacacggcccagactcctacgggaggcagcagtggggaatattggacaatgggcgaaagcctgatccagcaatgccgcgtgtgtgaagaaggtcttcggattgtaaagcactttcgacggggacgatgatgacggtacccgtagaagaagccccggctaacttcgtgccagcagccgcggtaatacgaagggggctagcgttgctcggaatgactgggcgtaaagggcgcgtaggcggttgatgcagtcagatgtgaaatccccgggcttaacctgggaactgcatttgagacgcattgactagagttcgagagagggttgtggaattcccagtgtagaggtgaaattcgtagatattgggaagaacaccggtggcgaaggcggcaacctggctcgatactgacgctgaggcgcgaaagcgtggggagcaaacaggattagataccctggtagtccacgctgtaaacgatgtgtgctggatgttgggtaacttagttactcagtgtcgaagctaacgcgctaagcacaccgcctggggagtacggccgcaaggttgaaactcaaaggaattgacgggggcccgcacaagcggtggagcatgtggtttaattcgaagcaacgcgcagaaccttaccagggcttgcatggggaggacgtactcagagatgggtatttcttcggacctcccgcacaggtgctgcatggctgtcgtcagctcgtgtcgtgagatgttgggttaagtcccgcaacgagcgcaacccttgtctttagttgccagcactttcaggtgggcactctagagagactgccggtgacaagccggaggaaggtggggatgacgtcaagtcctcatggcccttatgtcctgggctacacacgtgctacaatggcggtgacagtgggaagctatgtggtgacacagtgctgatctctaaaagccgtctcagttcggattgtactctgcaactcgagtacatgaaggtggaatcgctagtaatcgcggatcagcatgccgcggtgaatacgttcccgggccttgtacacaccgcccgtcacaccatgggagttggttcgaccttaagccggtgagcgaaccgcaaggacgcagccgaccacggacgggtcagcgactggggtgaagtcgtaacaaggtagccgtaggggaacctgcggctggatcacctccttt

SEQ ID NO: 1257 - DNA, 1523 bp, artificial sequence
  GCF_004210255.1_00702_Blautia_coccoides_group
acggagagtttgatcctggctcaggacgaacgctggcggcgtgcttaacacatgcaagtcgaacgatgaagcccttcggggtggattagtggcgaacgggtgagtaacacgtgggcaatctgcccttcactctgggacaagccctggaaacggggtctaataccggataacactctgtcccgcatgggacggggttaaaagctccggcggtgaaggatgagcccgcggcctatcagcttgttggtggggtaatggcctaccaaggcgacgacgggtagccggcctgagagggcgaccggccacactgggactgagacacggcccagactcctacgggaggcagcagtggggaatattgcacaatgggcgaaagcctgatgcagcgacgccgcgtgagggatgacggccttcgggttgtaaacctctttcagcagggaagaagcgaaagtgacggtacctgcagaagaagcgccggctaactacgtgccagcagccgcggtaatacgtagggcgcaagcgttgtccggaattattgggcgtaaagagctcgtaggcggcttgtcacgtcggatgtgaaagcccggggcttaaccccgggtctgcattcgatacgggctagctagagtgtggtaggggagatcggaattcctggtgtagcggtgaaatgcgcagatatcaggaggaacaccggtggcgaaggcggatctctgggccattactgacgctgaggagcgaaagcgtggggagcgaacaggattagataccctggtagtccacgccgtaaacgttgggaactaggtgttggcgacattccacgtcgtcggtgccgcagctaacgcattaagttccccgcctggggagtacggccgcaaggctaaaactcaaaggaattgacgggggcccgcacaagcagcggagcatgtggcttaattcgacgcaacgcgaagaaccttaccaaggcttgacatataccggaaagcatcagagatggtgccccccttgtggtcggtatacaggtggtgcatggctgtcgtcagctcgtgtcgtgagatgttgggttaagtcccgcaacgagcgcaacccttgttctgtgttgccagcatgcccttcggggtgatggggactcacaggagactgccggggtcaactcggaggaaggtggggacgacgtcaagtcatcatgccccttatgtcttgggctgcacacgtgctacaatggccggtacaatgagctgcgatgccgcgaggcggagcgaatctcaaaaagccggtctcagttcggattggggtctgcaactcgaccccatgaagtcggagttgctagtaatcgcagatcagcattgctgcggtgaatacgttcccgggccttgtacacaccgcccgtcacgtcacgaaagtcggtaacacccgaagccggtggcccaaccccttgtgggagggagctgtcgaaggtgggactggcgattgggacgaagtcgtaacaaggtagccgtaccggaaggtgcggctggatcacctccttt

SEQ ID NO: 1258 - DNA, 1056 bp, artificial sequence
  GCF_004210255.1_01568_Blautia_coccoides_group
cttgagagtttgatcctggctcagaacgaacgctggcggcaggcttaacacatgcaagtcgagcgcctcgcaagaggagcggcagacgggtgagtaacgcgtgggaatctacccatctctacggaacaactccgggaaactggagctaataccgtatacgtccttcgggagaaagatttatcggagatggatgagcccgcgttggattagctagttggtggggtaatggcctaccaaggcgacgatccatagctggtctgagaggatgatcagccacactgggactgagacacggcccagactcctacgggaggcagcagtggggaatattggacaatgggcgaaagcctgatccagccatgccgcgtgagtgatgaaggccctagggttgtaaagctctttcaacggtgaagataatgacggtaaccgtagaagaagccccggctaacttcgtgccagcagccgcggtaatacgaagggggctagcgttgttcggaattactgggcgtaaagcgcacgtaggcggattgttaagttaggggtgaaatcccagggctcaaccctggaactgcctttaatactggcaatctcgagtccgagagaggtgagtggaattccgagtgtagaggtgaaattcgtagatattcggaggaacaccagtggcgaaggcggctcactggctcggtactgacgctgaggtgcgaaagcgtggggagcaaacaggattagataccctggtagtccacgccgtaaactatgagagctagccgtcggcaagtttacttgtcggtggcgcagctaacgcattaagctctccgcctggggagtacggtcgcaagattaaaactcaaaggaattgacgggggcccgcacaagcggtggagcatgtggtttaattcgaagcaacgcgcagaaccttaccagcccttgacatcccggtcgcggtttccagagatggattccttcagttcggctggaccggtgacaggtgctgcatggctgtcgtcagctcgtgtcgtgagatgttgggttaagtcccgcaacgagcgcaaccct

SEQ ID NO: 1259 - DNA, 1269 bp, artificial sequence
  GCF_004210255.1_03096_Blautia_coccoides_group
gacgggtgagtaacgcgtgggaatctacccatctctacggaacaactccgggaaactggagctaataccgtatacgtccttcgggagaaagatttatcggagatggatgagcccgcgttggattagctagttggtggggtaatggcctaccaaggcgacgatccatagctggtctgagaggatgatcagccacactgggactgagacacggcccagactcctacgggaggcagcagtggggaatattggacaatgggcgaaagcctgatccagccatgccgcgtgagtgatgaaggccctagggttgtaaagctctttcaacggtgaagataatgacggtaaccgtagaagaagccccggctaacttcgtgccagcagccgcggtaatacgaagggggctagcgttgttcggaattactgggcgtaaagcgcacgtaggcggattgttaagttaggggtgaaatcccagggctcaaccctggaactgcctttaatactggcaatctcgagtccgagagaggtgagtggaattccgagtgtagaggtgaaattcgtagatattcggaggaacaccagtggcgaaggcggctcactggctcggtactgacgctgaggtgcgaaagcgtggggagcaaacaggattagataccctggtagtccacgccgtaaactatgagagctagccgtcggcaagtttacttgtcggtggcgcagctaacgcattaagctctccgcctggggagtacggtcgcaagattaaaactcaaaggaattgacgggggcccgcacaagcggtggagcatgtggtttaattcgaagcaacgcgcagaaccttaccagcccttgacatcccggtcgcggtttccagagatggattccttcagttcggctggaccggtgacaggtgctgcatggctgtcgtcagctcgtgtcgtgagatgttgggttaagtcccgcaacgagcgcaaccctcgcccttagttgccagcattaagttgggcactctaaggggactgccggtgataagccgagaggaaggtggggatgacgtcaagtcctcatggcccttacgggctgggctacacacgtgctacaatggtggtgacagtgggcagcgagaccgcgaggtcgagctaatctccaaaagccatctcagttcggattgcactctgcaactcgagtgcatgaagttggaatcgctagtaatcgcggatcagcatgccgcggtgaatacgttcccgggccttgtacacaccgcccgtcacacca

SEQ ID NO: 1260 - DNA, 1529 bp, artificial sequence
  GCF_004210255.1_05287_Blautia_coccoides_group
tgaagagtttgatcatggctcagattgaacgctggcggtatgcttaacacatgcaagtcgaacggtagcaggccttcgggcgctgacgagtggcggacgggtgagtaatgcataggaatctgcctattagtgggggacaacgtggggaaactcacgctaataccgcatacgccctacgggggaaagctggggatcttcggacctggcgctaatagatgagcctatgttggattagctagttggtagggtaaaggcctaccaaggcgacgatccatagctggtctgagaggatgatcagccacactgggactgagacacggcccagactcctacgggaggcagcagtggggaatattggacaatgggcgaaagcctgatccagcaataccgcgtgtgtgaagaaggcctgagggttgtaaagcactttcaataggaaggaatacctgccggttaatacccggtagactgacattacctatacaagaagcaccggctaactccgtgccagcagccgcggtaatacggagggtgcaagcgttaatcggaattactgggcgtaaagcgtgcgtaggcggttgtttaagtcagatgtgaaagccctgggcttaacctgggaactgcatttgatactgggcaactagagtttagtagaggggagtggaatttcaggtgtagcggtgaaatgcgtagagatctgaaggaacaccagtggcgaaggcggctccctggactaaaactgacgctgaggtacgaaagcgtgggtagcaaacaggattagataccctggtagtccacgccgtaaacgatgtcaactaactgttgggttcttaaagaacttagtagtggagctaacgtattaagttgaccgcctggggagtacggccgcaaggctaaaactcaaatgaattgacgggggcccgcacaagcggtggagcatgtggtttaattcgatgcaacgcgaagaaccttacctacccttgacatccagagaatctgttagagatagcggagtgccttcgggagctctgagacaggtgctgcatggctgtcgtcagctcgtgttgtgaaatgttgggttaagtcccgtaacgagcgcaacccttatccttagttgccagcgggtcatgccgggaactctagggagactgccggtgataaaccggaggaaggtggggacgacgtcaagtcatcatggcccttatgggtagggctacacacgtgctacaatggccggtacagagggctgcgaactcgcgagagtaagcgaatcccaaaaagccggtcccagtccggatcgcagtctgcaactcgactgcgtgaagtcggaatcgctagtaatcgcggatcagaatgccgcggtgaatacgttcccgggccttgtacacaccgcccgtcacaccatgggagtgggttgcaaaagaagtaggtagtttaaccttcgggagggcgcttaccactttgtgattcatgactggggtgaagtcgtaacaaggtagccctaggggaacctggggctggatcacctcctt

SEQ ID NO: 1261 - DNA, 1529 bp, artificial sequence; identical to SEQ ID NO: 1260
  GCF_004210255.1_05304_Blautia_coccoides_group

SEQ ID NO: 1262 - DNA, 1533 bp, artificial sequence
  GCF_004340925.1_05332_Blautia_coccoides_group
tgaagagtttgatcatggctcagattgaacgctggcggcaggcttaacacatgcaagtcgagcggagagaggtagcttgctactgatcttagcggcggacgggtgagtaatgcttaggaatctgcctattagtgggggacaacatttcgaaaggaatgctaataccgcatacgtcctacgggagaaagcaggggatcttcggaccttgcgctaatagatgagcctaagtcggattagctagttggtggggtaaaggcctaccaaggcgacgatctgtagcgggtctgagaggatgatccgccacactgggactgagacacggcccagactcctacgggaggcagcagtggggaatattggacaatgggcgcaagcctgatccagccatgccgcgtgtgtgaagaaggccttatggttgtaaagcactttaagcgaggaggaggctactttagttaatacctagagatagtggacgttactcgcagaataagcaccggctaactctgtgccagcagccgcggtaatacagagggtgcaagcgttaatcggatttactgggcgtaaagcgcgcgtaggcggctaattaagtcaaatgtgaaatccccgagcttaacttgggaattgcattcgatactggttagctagagtgtgggagaggatggtagaattccaggtgtagcggtgaaatgcgtagagatctggaggaataccgatggcgaaggcagccatctggcctaacactgacgctgaggtgcgaaagcatggggagcaaacaggattagataccctggtagtccatgccgtaaacgatgtctactagccgttggggcctttgaggctttagtggcgcagctaacgcgataagtagaccgcctggggagtacggtcgcaagactaaaactcaaatgaattgacgggggcccgcacaagcggtggagcatgtggtttaattcgatgcaacgcgaagaaccttacctggccttgacatagtaagaactttccagagatggattggtgccttcgggaacttacatacaggtgctgcatggctgtcgtcagctcgtgtcgtgagatgttgggttaagtcccgcaacgagcgcaacccttttccttatttgccagcgagtaatgtcgggaactttaaggatactgccagtgacaaactggaggaaggcggggacgacgtcaagtcatcatggcccttacggccagggctacacacgtgctacaatggtcggtacaaagggttgctacctagcgataggatgctaatctcaaaaagccgatcgtagtccggattggagtctgcaactcgactccatgaagtcggaatcgctagtaatcgcggatcagaatgccgcggtgaatacgttcccgggccttgtacacaccgcccgtcacaccatgggagtttgttgcaccagaagtagctagcctaactgcaaagagggcggttaccacggtgtggccgatgactggggtgaagtcgtaacaaggtagccgtaggggaacctgcggctggatcacctcctt

SEQ ID NO: 1263 - DNA, 1391 bp, artificial sequence
  GCF_900258535.1_00757_Blautia_coccoides_group
acctgcctcatagtggggaatagccttccgaaaggaagattaataccgcataatactcggaaatcacatgatttctgagccaaaggatttattcgctatgagatggacccgcggcgcattagcttgttggtgaggtaacggctcaccaaggcttcgatgcgtagccgacctgagagggtgatcggccacattggaactgagacacggtccagactcctacgggaggcagcagtggggaatattgcacaatgggggaaaccctgatgcagcaacgccgcgtgagtgatgaaggtcttcggatcgtaaaactctgtcttatgggacgataatgacggtaccataggaggaagccacggctaactacgtgccagcagccgcggtaatacgtaggtggcaagcgttgtccggatttactgggcgtaaaggatgtgtaggcggatatttaagtgagatgtgaaatccccgggcttaacttgggggctgcatttcaaactggatgtctggagtgcaggagaggaaggcagaattcctagtgtagcggtgaaatgcgtagagattaggaagaataccagtggcgaaggcggccttctggactgtaactgacgctgaggcatgaaagcgtggggagcaaacaggattagataccctggtagtccacgccgtaaacgatgaatactaggtgtaggaggtatcgactccttctgtgccgcagttaacacaataagtattccgcctgggaagtacggtcgcaagattaaaactcaaaggaattgacggggacccgcacaagcagcggagcatgtggtttaattcgaagcaacgcgaagaaccttacctagacttgacatctcctgaattagtccgtaatggatgaaatcccttcggggacaggatgacaggtggtgcatggttgtcgtcagctcgtgtcgtgagatgttgggttaagtcccgcaacgagcgcaacccttatcattagttgctaacatttagttgagcactctagtgagactgcccgggttaaccgggaggaaggtggggatgacgtcaaatcatcatgccccttatgtctagggctacacacgtgctacaatggtagggacaaaaagatgctataccgcaaggtggagctaaactcaaaaccctatcccagttcggattgtaggctgaaactcgcctacatgaagccggagttgctagtaatcgcgaatcagaatgtcgcggtgaatacgttcccgggtcttgtacacaccgcccgtcacaccatgagagtcggcaacacccgaagcccgtgaggtaaccttttggaaccagcggtcgaaggtggggttgatgattggggtgaagtcgtaacaaggtagccgtaggagaacctgcggctggatcacctcctt

SEQ ID NO: 1264 - DNA, 1528 bp, artificial sequence
  GCF_900258535.1_00901_Blautia_coccoides_group
acggagagtttgatcctggctcaggacgaacgctggcggcgtgcttaacacatgcaagtcgaacgatgaagccgcttcggtggtggattagtggcgaacgggtgagtaacacgtgggcaatctgccctgcactctgggacaagccctggaaacggggtctaataccggataataccttcgggggcatccttgaaggttgaaagctccggcggtgcaggatgagcccgcggcctatcagcttgttggtggggtgatggcctaccaaggcgacgacgggtagccggcctgagagggcgaccggccacactgggactgagacacggcccagactcctacgggaggcagcagtggggaatattgcacaatgggcgaaagcctgatgcagcgacgccgcgtgagggatgacggccttcgggttgtaaacctctttcagcagggaagaagcgagagtgacggtacctgcagaagaagcgccggctaactacgtgccagcagccgcggtaatacgtagggcgcaagcgttgtccggaattattgggcgtaaagagctcgtaggcggcttgtcacgtcgggtgtgaaagcccggggcttaaccccgggtctgcattcgatacgggcaggctagagtgtggtaggggagatcggaattcctggtgtagcggtgaaatgcgcagatatcaggaggaacaccggtggcgaaggcggatctctgggccattactgacgctgaggagcgaaagcgtggggagcgaacaggattagataccctggtagtccacgccgtaaacgttgggaactaggtgttggcgacattccacgtcgtcggtgccgcagctaacgcattaagttccccgcctggggagtacggccgcaaggctaaaactcaaaggaattgacgggggcccgcacaagcagcggagcatgtggcttaattcgacgcaacgcgaagaaccttaccaaggcttgacatacaccggaaagcattagagatagtgccccccttgtggtcggtgtacaggtggtgcatggctgtcgtcagctcgtgtcgtgagatgttgggttaagtcccgcaacgagcgcaacccttgtcccgtgttgccagcaagcccccttgtggggtgttggggactcacgggagaccgccggggtcaactcggaggaaggtggggacgacgtcaagtcatcatgccccttatgtcttgggctgcacacgtgctacaatggccggtacaaagagctgcgatgccgtgaggcggagcgaatctcaaaaagccggtctcagttcggattggggtctgcaactcgaccccatgaagtcggagttgctagtaatcgcagatcagcattgctgcggtgaatacgttcccgggccttgtacacaccgcccgtcacgtcacgaaagtcggtaacacccgaagccggtggcccaaccccttgtgggagggagctgtcgaaggtgggactggcgattgggacgaagtcgtaacaaggtagccgtaccggaaggtgcggctggatcacctccttt

SEQ ID NO: 1265 - DNA, 1528 bp, artificial sequence; identical to SEQ ID NO: 1264
  GCF_900258535.1_01900_Blautia_coccoides_group

SEQ ID NO: 1266 - DNA, 1528 bp, artificial sequence; identical to SEQ ID NO: 1264
  GCF_900258535.1_02432_Blautia_coccoides_group

SEQ ID NO: 1267 - DNA, 1528 bp, artificial sequence; identical to SEQ ID NO: 1264
  GCF_900258535.1_03914_Blautia_coccoides_group

SEQ ID NO: 1268 - DNA, 1532 bp, artificial sequence
  GCF_900461125.1_02026_Blautia_coccoides_group
tgaagagtttgatcatggctcagattgaacgctggcggcaggcctaacacatgcaagtcgagcggtagagagaagcttgcttctcttgagagcggcggacgggtgagtaatgcctaggaatctgcctggtagtgggggataacgttcggaaacggacgctaataccgcatacgtcctacgggagaaagcaggggaccttcgggccttgcgctatcagatgagcctaggtcggattagctagttggtggggtaatggctcaccaaggcgacgatccgtaactggtctgagaggatgatcagtcacactggaactgagacacggtccagactcctacgggaggcagcagtggggaatattggacaatgggcgaaagcctgatccagccatgccgcgtgtgtgaagaaggtcttcggattgtaaagcactttaagttgggaggaagggcagttacctaatacgtgattgttttgacgttaccgacagaataagcaccggctaactctgtgccagcagccgcggtaatacagagggtgcaagcgttaatcggaattactgggcgtaaagcgcgcgtaggtggtttgttaagttggatgtgaaatccccgggctcaacctgggaactgcattcaaaactgactgactagagtatggtagagggtggtggaatttcctgtgtagcggtgaaatgcgtagatataggaaggaacaccagtggcgaaggcgaccacctggactaatactgacactgaggtgcgaaagcgtggggagcaaacaggattagataccctggtagtccacgccgtaaacgatgtcaactagccgttggaagccttgagcttttagtggcgcagctaacgcattaagttgaccgcctggggagtacggccgcaaggttaaaactcaaatgaattgacgggggcccgcacaagcggtggagcatgtggtttaattcgaagcaacgcgaagaaccttaccaggccttgacatccaatgaactttccagagatggattggtgccttcgggaacattgagacaggtgctgcatggctgtcgtcagctcgtgtcgtgagatgttgggttaagtcccgtaacgagcgcaacccttgtccttagttaccagcacgttatggtgggcactctaaggagactgccggtgacaaaccggaggaaggtggggatgacgtcaagtcatcatggcccttacggcctgggctacacacgtgctacaatggtcggtacagagggttgccaagccgcgaggtggagctaatcccataaaaccgatcgtagtccggatcgcagtctgcaactcgactgcgtgaagtcggaatcgctagtaatcgcgaatcagaatgtcgcggtgaatacgttcccgggccttgtacacaccgcccgtcacaccatgggagtgggttgcaccagaagtagctagtctaaccttcgggaggacggttaccacggtgtgattcatgactggggtgaagtcgtaacaaggtagccgtaggggaacctgcggctggatcacctcctt

SEQ ID NO: 1269 - DNA, 1532 bp, artificial sequence
  GCF_900461125.1_02041_Blautia_coccoides_group
tgaagagtttgatcatggctcagattgaacgctggcggcaggcctaacacatgcaagtcgagcggtagagagaagcttgcttctcttgagagcggcggacgggtgagtaatgcctaggaatctgcctggtagtgggggataacgttcggaaacggacgctaataccgcatacgtcctacgggagaaagcaggggaccttcgggccttgcgctatcagatgagcctaggtcggattagctagttggtggggtaatggctcaccaaggcgacgatccgtaactggtctgagaggatgatcagtcacactggaactgagacacggtccagactcctacgggaggcagcagtggggaatattggacaatgggcgaaagcctgatccagccatgccgcgtgtgtgaagaaggtcttcggattgtaaagcactttaagttgggaggaagggcagttacctaatacgtgattgttttgacgttaccgacagaataagcaccggctaactctgtgccagcagccgcggtaatacagagggtgcaagcgttaatcggaattactgggcgtaaagcgcgcgtaggtggtttgttaagttggatgtgaaatccccgggctcaacctgggaactgcattcaaaactgactgactagagtatggtagagggtggtggaatttcctgtgtagcggtgaaatgcgtagatataggaaggaacaccagtggcgaaggcgaccacctggactaatactgacactgaggtgcgaaagcgtggggagcaaacaggattagataccctggtagtccacgccgtaaacgatgtcaactagccgttggaagccttgagcttttagtggcgcagctaacgcattaagttgaccgcctggggagtacggccgcaaggttaaaactcaaatgaattgacgggggcccgcacaagcggtggagcatgtggtttaattcgaagcaacgcgaagaaccttaccaggccttgacatccaatgaactttctagagatagattggtgccttcgggaacattgagacaggtgctgcatggctgtcgtcagctcgtgtcgtgagatgttgggttaagtcccgtaacgagcgcaacccttgtccttagttaccagcacgtaatggtgggcactctaaggagactgccggtgacaaaccggaggaaggtggggatgacgtcaagtcatcatggcccttacggcctgggctacacacgtgctacaatggtcggtacagagggttgccaagccgcgaggtggagctaatcccataaaaccgatcgtagtccggatcgcagtctgcaactcgactgcgtgaagtcggaatcgctagtaatcgcgaatcagaatgtcgcggtgaatacgttcccgggccttgtacacaccgcccgtcacaccatgggagtgggttgcaccagaagtagctagtctaaccttcgggaggacggttaccacggtgtgattcatgactggggtgaagtcgtaacaaggtagccgtaggggaacctgcggctggatcacctcctt

SEQ ID NO: 1270 - DNA, 1532 bp, artificial sequence
  GCF_900461125.1_03138_Blautia_coccoides_group
tgaagagtttgatcatggctcagattgaacgctggcggcaggcctaacacatgcaagtcgagcggtagagagaagcttgcttctcttgagagcggcggacgggtgagtaatgcctaggaatctgcctggtagtgggggataacgttcggaaacggacgctaataccgcatacgtcctacgggagaaagcaggggaccttcgggccttgcgctatcagatgagcctaggtcggattagctagttggtggggtaatggctcaccaaggcgacgatccgtaactggtctgagaggatgatcagtcacactggaactgagacacggtccagactcctacgggaggcagcagtggggaatattggacaatgggcgaaagcctgatccagccatgccgcgtgtgtgaagaaggtcttcggattgtaaagcactttaagttgggaggaagggcagttacctaatacgtgattgttttgacgttaccgacagaataagcaccggctaactctgtgccagcagccgcggtaatacagagggtgcaagcgttaatcggaattactgggcgtaaagcgcgcgtaggtggtttgttaagttggatgtgaaatccccgggctcaacctgggaactgcattcaaaactgactgactagagtatggtagagggtggtggaatttcctgtgtagcggtgaaatgcgtagatataggaaggaacaccagtggcgaaggcgaccacctggactaatactgacactgaggtgcgaaagcgtggggagcaaacaggattagataccctggtagtccacgccgtaaacgatgtcaactagccgttggaagccttgagcttttagtggcgcagctaacgcattaagttgaccgcctggggagtacggccgcaaggttaaaactcaaatgaattgacgggggcccgcacaagcggtggagcatgtggtttaattcgaagcaacgcgaagaaccttaccaggccttgacatccaatgaactttctagagatagattggtgccttcgggaacattgagacaggtgctgcatggctgtcgtcagctcgtgtcgtgagatgttgggttaagtcccgtaacgagcgcaacccttgtccttagttaccagcacgttatggtgggcactctaaggagactgccggtgacaaaccggaggaaggtggggatgacgtcaagtcatcatggcccttacggcctgggctacacacgtgctacaatggtcggtacagagggttgccaagccgcgaggtggagctaatcccataaaaccgatcgtagtccggatcgcagtctgcaactcgactgcgtgaagtcggaatcgctagtaatcgcgaatcagaatgtcgcggtgaatacgttcccgggccttgtacacaccgcccgtcacaccatgggagtgggttgcaccagaagtagctagtctaaccttcgggaggacggttaccacggtgtgattcatgactggggtgaagtcgtaacaaggtagccgtaggggaacctgcggctggatcacctcctt

SEQ ID NO: 1271 - DNA, 1534 bp, artificial sequence
  GCF_900461125.1_03724_Blautia_coccoides_group
tgaagagtttgatcatggctcagattgaacgctggcggcaggcctaacacatgcaagtcgagcggcagcacgggtacttgtacctggtggcgagcggcggacgggtgagtaatgcctaggaatctgcctggtagtgggggataacgctcggaaacggacgctaataccgcatacgtcctacgggagaaagcaggggaccttcgggccttgcgctatcagatgagcctaggtcggattagctagttggtgaggtaatggctcaccaaggcgacgatccgtaactggtctgagaggatgatcagtcacactggaactgagacacggtccagactcctacgggaggcagcagtggggaatattggacaatgggcgaaagcctgatccagccatgccgcgtgtgtgaagaaggtcttcggattgtaaagcactttaagttgggaggaagggcagttacctaatacgtgattgttttgacgttaccgacagaataagcaccggctaactctgtgccagcagccgcggtaatacagagggtgcaagcgttaatcggaattactgggcgtaaagcgcgcgtaggtggtttgttaagttgaatgtgaaatccccgggctcaacctgggaactgcatccaaaactggcaagctagagtatggtagagggtggtggaatttcctgtgtagcggtgaaatgcgtagatataggaaggaacaccagtggcgaaggcgaccacctggactgatactgacactgaggtgcgaaagcgtggggagcaaacaggattagataccctggtagtccacgccgtaaacgatgtcaactagccgttgggagccttgagctcttagtggcgcagctaacgcattaagttgaccgcctggggagtacggccgcaaggttaaaactcaaatgaattgacgggggcccgcacaagcggtggagcatgtggtttaattcgaagcaacgcgaagaaccttaccaggccttgacatccaatgaactttccagagatggattggtgccttcgggaacattgagacaggtgctgcatggctgtcgtcagctcgtgtcgtgagatgttgggttaagtcccgtaacgagcgcaacccttgtccttagttaccagcacgtcatggtgggcactctaaggagactgccggtgacaaaccggaggaaggtggggatgacgtcaagtcatcatggcccttacggcctgggctacacacgtgctacaatggtcggtacagagggttgccaagccgcgaggtggagctaatctcacaaaaccgatcgtagtccggatcgcagtctgcaactcgactgcgtgaagtcggaatcgctagtaatcgcgaatcagaatgtcgcggtgaatacgttcccgggccttgtacacaccgcccgtcacaccatgggagtgggttgcaccagaagtagctagtctaaccttcggggggacggttaccacggtgtgattcatgactggggtgaagtcgtaacaaggtagccgtaggggaacctgcggctggatcacctcctt

SEQ ID NO: 1272 - DNA, 1539 bp, artificial sequence
  GCF_900461125.1_05308_Blautia_coccoides_group
ttgaagagtttgatcatggctcagattgaacgctggcggcaggcctaacacatgcaagtcgggcggcagcggggggaagcttgcttccccgccggcgagcggcggacgggtgagtaatgtctggggatctgcctgatggagggggataactactggaaacggtagctaataccgcatgacgtcgcaagaccaaagtgggggaccttcgggcctcacgccatcggatgaacccagatgggattagctggtaggtggggtaacggctcacctaggcgacgatccctagctggtctgagaggatgaccagccacactggaactgagacacggtccagactcctacgggaggcagcagtggggaatattgcacaatgggggaaaccctgatgcagccatgccgcgtgtgtgaagaaggccttcgggttgtaaagcactttcagcggggaggaagggagcagggttaataaccttgttcattgacgttacccgcagaagaagcaccggctaactccgtgccagcagccgcggtaatacggagggtgcaagcgttaatcggaatgactgggcgtaaagcgcacgcaggcggtctgttaagttggatgtgaaatccccgggcttaacctgggaactgcattcaaaactgacaggctagagtctcgtagaggggggtagaattccaggtgtagcggtgaaatgcgtagagatctggaggaataccggtggcgaaggcggccccctggacgaagactgacgctcaggtgcgaaagcgtggggagcaaacaggattagataccctggtagtccacgctgtaaacgatgtcgatttggaggttgtgcccttgaggcgtggcttccggagctaacgcgttaaatcgaccgcctggggagtacggccgcaaggttaaaactcaaatgaattgacgggggcccgcacaagcggtggagcatgtggtttaattcgatgcaacgcgaagaaccttacctactcttgacatccagagaagactgcagagatgcggttgtgccttcgggagctctgagacaggtgctgcatggctgtcgtcagctcgtgttgtgaaatgttgggttaagtcccgcaacgagcgcaacccttatcctctgttgccagcacgttatggtgggaactcaggggagactgccggtgataaaccggaggaaggtggggatgacgtcaagtcatcatggcccttacgagtagggctacacacgtgctacaatggcgcatacaaagagaagcgacctcgcgagagcaagcggacctcataaagtgcgtcgtagtccggattggagtctgcaactcgactccatgaagtcggaatcgctagtaatcgtagatcagaatgctacggtgaatacgttcccgggccttgtacacaccgcccgtcacaccatgggagtgggttgcaaaagaagtaggtagcttaaccttcgggagggcgcttaccactttgtgattcatgactggggtgaagtcgtaacaaggtaaccgtaggggaacctgcggttggatcacctcctt

SEQ ID NO: 1273 - DNA, 1210 bp, artificial sequence
  STR00652_Butyricicoccus_sp2
gaacggccacattgggactgagacacggcccagactcctacgggaggcagcagtggggaatattgcgcaatgggggaaaccctgacgcagcaacgccgcgtgattgaagaaggccttcgggttgtaaagatctttaattggggacgaaaaatgacggtacccaaagaataagctccggctaactacgtgccagcagccgcggtaatacgtagggagcaagcgttatccggatttactgggtgtaaagggcgagtaggcgggctggcaagttgggagtgaaatcccggggcttaaccccggaactgctttcaaaactgctggtcttgagtgatggagaggcaggcggaattccgtgtgtagcggtgaaatgcgtagatatacggaggaacaccagtggcgaaggcggcctgctggacattaactgacgctgaggagcgaaagcgtggggagcaaacaggattagataccctggtagtccacgccgtaaacgatggatactaggtgtgggaggtattgaccccttccgtgccggagttaacacaataagtatcccacctggggagtacggccgcaaggttgaaactcaaaggaattgacgggggcccgcacaagcagtggagtatgtggtttaattcgaagcaacgcgaagaaccttaccaggtcttgacatccctctgaccgccctagagatagggtttcccttcggggcagaggtgacaggtggtgcatggttgtcgtcagctcgtgtcgtgagatgttgggttaagtcccgcaacgagcgcaacccttacggttagttgatacgcaagatcactctagccggactgccgttgacaaaacggaggaaggtggggacgacgtcaaatcatcatgccccttatgacctgggctacacacgtactacaatggcagtcatacagagggaagcaaaacagtgatgtggagcaaatccctaaaagctgtcccagttcagattgcaggctgcaactcgcctgcatgaagtcggaattgctagtaatcgcggatcagcatgccgcggtgaatacgttcccgggccttgtacacaccgcccgtcacaccatgagagccggtaatacccgaagtccgtagcctaaccgcaaggagggcgcggccgaaggtaggactggtaattagggtgaagtcgtaacaaggtagccgtatcggaaggtgcggctggatcacctccttt

SEQ ID NO: 1274 - DNA, 1493 bp, artificial sequence
  STR01662_Butyricicoccus_sp2
gctggcggcgtgcctaacacatgcaagtcgaacggagttattttggaaatctcttcggggatggaattcataacttagtggcggacgggtgagtaacgcgtgagcaatctgcccttaggtgggggataacagccggaaacggctgctaataccgcataacacattgaagccgcatggttttgatgtcaaagatttattgcctttggatgagctcgcgtctgattagctggttggcggggtaacggcccaccaaggcgacgatcagtagccggactgagaggttgaacggccacattgggactgagacacggcccagactcctacgggaggcagcagtggggaatattgcgcaatgggggaaaccctgacgcagcaacgccgcgtgattgaagaaggccttcgggttgtaaagatctttaattggggacgaaaaatgacggtacccaaagaataagctccggctaactacgtgccagcagccgcggtaatacgtagggagcaagcgttatccggatttactgggtgtaaagggcgagtaggcgggctggcaagttgggagtgaaatcccggggcttaaccccggaactgctttcaaaactgctggtcttgagtgatggagaggcaggcggaattccgtgtgtagcggtgaaatgcgtagatatacggaggaacaccagtggcgaaggcggcctgctggacattaactgacgctgaggagcgaaagcgtggggagcaaacaggattagataccctggtagtccacgccgtaaacgatggatactaggtgtgggaggtattgaccccttccgtgccggagttaacacaataagtatcccacctggggagtacggccgcaaggttgaaactcaaaggaattgacgggggcccgcacaagcagtggagtatgtggtttaattcgaagcaacgcgaagaaccttaccaggtcttgacatccctctgaccgccctagagatagggtttcccttcggggcagaggtgacaggtggtgcatggttgtcgtcagctcgtgtcgtgagatgttgggttaagtcccgcaacgagcgcaacccttacggttagttgatacgcaagatcactctagccggactgccgttgacaaaacggaggaaggtggggacgacgtcaaatcatcatgccccttatgacctgggctacacacgtactacaatggcagtcatacagagggaagcaaaacagtgatgtggagcaaatccctaaaagctgtcccagttcagattgcaggctgcaactcgcctgcatgaagtcggaattgctagtaatcgcggatcagcatgccgcggtgaatacgttcccgggccttgtacacaccgcccgtcacaccatgagagccggtaatacccgaagtccgtagcctaaccgcaaggagggcgcggccgaaggtaggactggtaattagggtgaagtcgtaacaaggtagccgtatcggaaggtgcggctggatcacctccttt

SEQ ID NO: 1275 - DNA, 1534 bp, artificial sequence
  STR01765_Christensenella_minuta
aattaagagtttgatcctggctcaggacgaacgctggcggcgtgcttaacacatgcaagtcgaacgaggttgccctttgtgaatccttcgggaggaactgtgggtataccgagtggcggacgggtgagtaacgcgtgagcaacctgccctgcaacgggggacaacagttggaaacgactgctaataccgcatgagaccacgaaaccgcatggttttgaggtaaaaggatttattcgatgcaggatgggctcgcgtcccattagatagttggtgaggtaacggcccaccaagtcaacgatgggtagccgacctgagagggtgatcggccacactggaactgagacacggtccagactcctacgggaggcagcagtggggaatattgggcaatgggggaaaccctgacccagcaacgccgcgtgagggaagaaggtcttcggattgtaaacctttgtcctatgggacgaaagaaatgacggtaccataggaggaagctccggctaactacgtgccagcagccgcggtaatacgtagggagcaagcgttgtccggaattactgggcgtaaagggtgcgtaggtggtcatgtaagtcagatgtgaaagaccggggcttaaccccggggttgcatttgaaactgtgtgacttgagtacaggagagggaagtggaattcctagtgtagcggtgaaatgcgtagatattaggaggaacaccagtggcgaaggcgactttctggactgtaactgacactgaggcacgaaagcgtggggagcaaacaggattagataccctggtagtccacgccgtaaacgatggatactaggtgtggggcccgatagggttccgtgccgaagcaaacgcattaagtatcccgcctggggagtacgatcgcaaggttgaaactcaaaggaattgacgggggcccgcacaagcagcggagcatgtggtttaattcgaagcaacgcgaagaaccttaccaaggcttgacatcctctgacgactgtagagatacagtttcccttcggggcagagagacaggtggtgcatggttgtcgtcagctcgtgtcgtgagatgttgggttaagtcccgcaacgagcgcaacccttattgctagttgccagcgcgtaaaggcgggaactctagtgagactgccggggacaactcggaggaaggtggggacgacgtcaaatcatcatgccccttatgtcttgggctacacacgtgctacaatggccggtacaaagggcagcgaacccgtaaggggaagcgaatctcaaaaagccggtcccagttcggattgtgggctgcaacccgcccacatgaagtcggagttgctagtaatcgcgaatcagcatgtcgcggtgaatgcgttcccgggccttgtacacaccgcccgtcacaccacggaagttgggagcacccgaagccagtggcttaaccgtaaggagagagctgtcgaaggtgagatcaatgactggggtgaagtcgtaacaaggtagccgtatcggaaggtgcggctggatcacctccttt

SEQ ID NO: 1276 - DNA, 1534 bp, artificial sequence; identical to SEQ ID NO: 1275
  STR01948_Christensenella_minuta

SEQ ID NO: 1277 - DNA, 1545 bp, artificial sequence
  GCF_001571425.1_02575_Christensenella_minuta
aatgagagtttgatcctggctcaggacgaacgctggcggcgtgcctaatacatgcaagtagaacgctgaggtttggtgtttacactagactgatgagttgcgaacgggtgagtaacgcgtaggtaacctgcctcatagcgggggataactattggaaacgatagctaataccgcataagagtaattaacacatgttggttatttaaaaggagcaattgcttcactgtgagatggacctgcgttgtattagctagttggtgaggtaaaggctcaccaaggcgacgatacatagccgacctgagagggtgatcggccacactgggactgagacacggcccagactcctacgggaggcagcagtagggaatcttcggcaatggacggaagtctgaccgagcaacgccgcgtgagtgaagaaggttttcggatcgtaaagctctgttgttagagaagaacgttggtaggagtggaaaatctaccaagtgacggtaactaaccagaaagggacggctaactacgtgccagcagccgcggtaatacgtaggtcccgagcgttgtccggatttattgggcgtaaagcgagcgcaggcggttctttaagtctgaagttaaaggcagtggcttaaccattgtacgctttggaaactggaggacttgagtgcagaaggggagagtggaattccatgtgtagcggtgaaatgcgtagatatatggaggaacaccggtggcgaaagcggctctctggtctgtaactgacgctgaggctcgaaagcgtggggagcaaacaggattagataccctggtagtccacgccgtaaacgatgagtgctaggtgttaggccctttccggggcttagtgccgcagctaacgcattaagcactccgcctggggagtacgaccgcaaggttgaaactcaaaggaattgacgggggcccgcacaagcggtggagcatgtggtttaattcgaagcaacgcgaagaaccttaccaggtcttgacatccttctgaccggcctagagataggctttctcttcggagcagaagtgacaggtggtgcatggttgtcgtcagctcgtgtcgtgagatgttgggttaagtcccgcaacgagcgcaacccctattgttagttgccatcattaagttgggcactctagcgagactgccggtaataaaccggaggaaggtggggatgacgtcaaatcatcatgccccttatgacctgggctacacacgtgctacaatggttggtacaacgagtcgcaagccggtgacggcaagctaatctcttaaagccaatctcagttcggattgtaggctgcaactcgcctacatgaagtcggaatcgctagtaatcgcggatcagcacgccgcggtgaatacgttcccgggccttgtacacaccgcccgtcacaccacgagagtttgtaacacccgaagtcggtgaggtaaccttttaggagccagccgcctaaggtgggatagatgattggggtgaagtcgtaacaaggtagccgtatcggaaggtgcggctggatcacctcctt

SEQ ID NO: 1278 - DNA, 1548 bp, artificial sequence
  GCF_001652705.1_01023_Christensenella_minuta
catggagagtttgatcctggctcaggacgaacgctggcggcgtgcctaatacatgcaagtcgagcggacagatgggagcttgctccctgatgtcagcggcggacgggtgagtaacacgtgggtaacctgcctgtaagactgggataactccgggaaaccggggctaataccggatgcttgattgaaccgcatggttcaattataaaaggtggcttttagctaccacttacagatggacccgcggcgcattagctagttggtgaggtaacggctcaccaaggcgacgatgcgtagccgacctgagagggtgatcggccacactgggactgagacacggcccagactcctacgggaggcagcagtagggaatcttccgcaatggacgaaagtctgacggagcaacgccgcgtgagtgatgaaggttttcggatcgtaaaactctgttgttagggaagaacaagtaccgttcgaatagggcggtaccttgacggtacctaaccagaaagccacggctaactacgtgccagcagccgcggtaatacgtaggtggcaagcgttgtccggaattattgggcgtaaagcgcgcgcaggcggtttcttaagtctgatgtgaaagcccccggctcaaccggggagggtcattggaaactggggaacttgagtgcagaagaggagagtggaattccacgtgtagcggtgaaatgcgtagagatgtggaggaacaccagtggcgaaggcgactctctggtctgtaactgacgctgaggcgcgaaagcgtggggagcgaacaggattagataccctggtagtccacgccgtaaacgatgagtgctaagtgttagagggtttccgccctttagtgctgcagcaaacgcattaagcactccgcctggggagtacggtcgcaagactgaaactcaaaggaattgacgggggcccgcacaagcggtggagcatgtggtttaattcgaagcaacgcgaagaaccttaccaggtcttgacatcctctgacaaccctagagatagggcttccccttcgggggcagagtgacaggtggtgcatggttgtcgtcagctcgtgtcgtgagatgttgggttaagtcccgcaacgagcgcaacccttgatcttagttgccagcattcagttgggcactctaaggtgactgccggtgacaaaccggaggaaggtggggatgacgtcaaatcatcatgccccttatgacctgggctacacacgtgctacaatggacagaacaaagggcagcgaagccgcgaggctaagccaatcccacaaatctgttctcagttcggatcgcagtctgcaactcgactgcgtgaagctggaatcgctagtaatcgcggatcagcatgccgcggtgaatacgttcccgggccttgtacacaccgcccgtcacaccacgagagtttgtaacacccgaagtcggtgaggtaaccttttggagccagccgccgaaggtgggacagatgattggggtgaagtcgtaacaaggtagccgtatcggaaggtgcggctggatcacctccttt

SEQ ID NO: 1279 - DNA, 1550 bp, artificial sequence
  GCF_001678845.1_01469_Christensenella_minuta
tttggagagtttgatcctggctcaggacgaacgctggcggcgtgcctaatacatgcaagtcgagcggactgatgggagcttgcttcctgaagtcagcggcggacgggtgagtaacacgtgggcaacctgcctgcaagaccgggataacttcgggaaaccggagctaataccggataatcctctttcccgcatgggaaagagctgaaagatggcttcggctatcacttgcagatgggcccgcggcgcattagctggttggtgaggtaacggctcaccaaggcgacgatgcgtagccgagtgagagggtgatcggccacactgggactgagacacggcccagactcctacgggaggcagcagtagggaatcttccgcaatggacgaaagtctgacggagcaacgccgcgtgagcgaagaaggccttcgggtcgtaaagctctgttgtcagagaagaataagtaccgttcgaatagggcggtgccttgacggtacctgaccagaaagccacggctaactacgtgccagcagccgcggtaatacgtaggtggcaagcgttgtccggaattattgggcgtaaagcgcgtgcaggcggttccttaagtctgatgtgaaagcccacggctcaaccgtggagggtcattggaaactggggaacttgagtgcagaagaggagagcggaattccacgtgtagcggtgaaatgcgtagagatgtggaggaacaccagtggcgaaggcggctctctggtctgtaactgacgctgaggcgcgaaagcgtggggagcaaacaggattagataccctggtagtccacgccgtaaacgatgagtgctaagtgttagagggtttccgccctttagtgctgcagctaacgcattaagcactccgcctggggagtacggccgcaaggctgaaactcaaaggaattgacgggggcccgcacaagcggtggagcatgtggtttaattcgaagcaacgcgaagaaccttaccaggtcttgacatcctctgacaatcctggagacaggacgttccccttcgggggacagagtgacaggtggtgcatggttgtcgtcagctcgtgtcgtgagatgttgggttaagtcccgcaacgagcgcaacccttgaccttagttgccagcattcagttgggcactctaaggtgactgccggtgacaaaccggaggaaggtggggatgacgtcaaatcatcatgccccttatgacctgggctacacacgtgctacaatggatggtacaaagggctgctaagccgcgaggcctgagccaatcccaaaaaaccattctcagttcggattgcaggctgcaactcgcctgcatgaagccggaatcgctagtaatcgcggatcagcatgccgcggtgaatacgttcccgggccttgtacacaccgcccgtcacaccacgagagtttgtaacacccgaagtcggtgaggtaacctttaaggagccagccgcctaaggtgggacagatgattggggtgaagtcgtaacaaggtagccgtatcggaaggtgcggctggatcacctccttt

SEQ ID NO: 1280 - DNA, 1551 bp, artificial sequence
  GCF_001678855.1_01976_Christensenella_minuta
tttggagagtttgatcctggctcaggacgaacgctggcggcgtgcctaatacatgcaagtcgagcggactgatggaagcttgcttcctgaagtcagcggcggacgggtgagtaacacgtgggcaacctgcctgcaagaccgggataacttcgggaaaccggagctaataccggataatcctctttcccgcatgggaaagagctgaaagatggcttcggctatcacttgcagatgggcccgcggcgcattagctggttggtgaggtaacggctcaccaaggcgacgatgcgtagccgacctgagagggtgatcggccacactgggactgagacacggcccagactcctacgggaggcagcagtagggaatcttccgcaatggacgaaagtctgacggagcaacgccgcgtgagcgaagaaggccttcgggtcgtaaagctctgttgtcagggaagaacaagtaccgttcgaatagggcggtgccttgacggtacctgaccagaaagccacggctaactacgtgccagcagccgcggtaatacgtaggtggcaagcgttgtccggaattattgggcgtaaagcgcgcgcaggcggttccttaagtctgatgtgaaagcccacggctcaaccgtggagggtcattggaaactggggaacttgagtgcagaagaggagagcggaattccacgtgtagcggtgaaatgcgtagagatgtggaggaacaccagtggcgaaggcggctctctggtctgtaactgacgctgaggcgcgaaagcgtggggagcaaacaggattagataccctggtagtccacgccgtaaacgatgagtgctaagtgttagagggtttccgccctttagtgctgcagctaacgcattaagcactccgcctggggagtacggccgcaaggctgaaactcaaaggaattgacgggggcccgcacaagcggtggagcatgtggtttaattcgaagcaacgcgaagaaccttaccaggtcttgacatcctctgacaatcctggagacaggacgttccccttcgggggacagagtgacaggtggtgcatggttgtcgtcagctcgtgtcgtgagatgttgggttaagtcccgcaacgagcgcaacccttgaccttagttgccagcattcagttgggcactctaaggtgactgccggtgacaaaccggaggaaggtggggatgacgtcaaatcatcatgccccttatgacctgggctacacacgtgctacaatggatggtacaaagggctgctaagccgcgaggcctgagccaatcccaaaaaaccattctcagttcggattgcaggctgcaactcgcctgcatgaagccggaatcgctagtaatcgcggatcagcatgccgcggtgaatacgttcccgggccttgtacacaccgcccgtcacaccacgagagtttgtaacacccgaagtcggtgaggtaacctttaaggagccagccgcctaaggtgggacagatgattggggtgaagtcgtaacaaggtagccgtatcggaaggtgcggctggatcacctccttt

SEQ ID NO: 1281 - DNA, 1444 bp, artificial sequence
  GCF_003628755.1_00446_Christensenella_minuta
cgagcggcggacgggtgagtaatgtatggggatctgcctgatggcgggggataactactggaaacggtagctaataccgcataatgtcttcggaccaaagcgggggacctccgggcctcgcgccatcagatgaacccatatgggattagctagtaggtgaggtaacggcttacctaggcgacgatccctagctggtctgagaggatgatcagccacactgggactgagacacggcccagactcctacgggaggcagcagtggggaatattgcacaatgggcgcaagcctgatgcagccatgccgcgtgtatgaagaaggccttcgggttgtaaagtactttcagtcgggaggaaggtgtcaaggttaataaccttggcaattgacgttaccgacagaagaagcaccggctaactccgtgccagcagccgcggtaatacggagggtgcaagcgttaatcggaattactgggcgtaaagcgcacgcaggcggttgattgagtcagatgtgaaatccccgggcttaacccgggaattgcatctgatactggtcagctagagtcttgtagaggggggtagaattccatgtgtagcggtgaaatgcgtagagatgtggaggaataccggtggcgaaggcggccccctggacaaagactgacgctcaggtgcgaaagcgtggggagcaaacaggattagataccctggtagtccacgctgtaaacgatgtcgacttggaggttgtgcccttgaggcgtggcttccggagctaacgcgttaagtcgaccgcctggggagtacggccgcaaggttaaaactcaaatgaattgacgggggcccgcacaagcggtggagcatgtggtttaattcgatgcaacgcgaagaaccttacctactcttgacatccagagaacttagcagagatgctttggtgccttcgggaactctgagacaggtgctgcatggctgtcgtcagctcgtgttgtgaaatgttgggttaagtcccgcaacgagcgcaacccttatcctttgttgccagcgcgtgatggcgggaactcaaaggagactgccggtgataaaccggaggaaggtggggatgacgtcaagtcatcatggcccttacgagtagggctacacacgtgctacaatggcgtatacaaagggaagcgaccccgcgagggcaagcggaactcataaagtacgtcgtagtccggattggagtctgcaactcgactccatgaagtcggaatcgctagtaatcgtagatcagaatgctacggtgaatacgttcccgggccttgtacacaccgcccgtcacaccatgggagtgggttgcaaaagaagtaggtagcttaacctccgggagggcgcttaccactttgtgattcatgactggggtgaagtcgtaacaaggtaaccgtaggggaacctgcggttggatcacctcctt

SEQ ID NO: 1282 - DNA, 1539 bp, artificial sequence
  GCF_003628755.1_01624_Christensenella_minuta
ttgaagagtttgatcatggctcagattgaacgctggcggcaggcctaacacatgcaagtcgggcggtaacagggagaagcttgcttctctgctgacgagcggcggacgggtgagtaatgtatggggatctgcctgatggcgggggataactactggaaacggtagctaataccgcataatgtcttcggaccaaagcgggggacctccgggcctcgcgccatcagatgaacccatatgggattagctagtaggtgaggtaacggcttacctaggcgacgatccctagctggtctgagaggatgatcagccacactgggactgagacacggcccagactcctacgggaggcagcagtggggaatattgcacaatgggcgcaagcctgatgcagccatgccgcgtgtatgaagaaggccttcgggttgtaaagtactttcagtcgggaggaaggtgtcaaggttaataaccttggcaattgacgttaccgacagaagaagcaccggctaactccgtgccagcagccgcggtaatacggagggtgcaagcgttaatcggaattactgggcgtaaagcgcacgcaggcggttgattgagtcagatgtgaaatccccgggcttaacccgggaattgcatctgatactggtcagctagagtcttgtagaggggggtagaattccatgtgtagcggtgaaatgcgtagagatgtggaggaataccggtggcgaaggcggccccctggacaaagactgacgctcaggtgcgaaagcgtggggagcaaacaggattagataccctggtagtccacgctgtaaacgatgtcgacttggaggttgtgcccttgaggcgtggcttccggagctaacgcgttaagtcgaccgcctggggagtacggccgcaaggttaaaactcaaatgaattgacgggggcccgcacaagcggtggagcatgtggtttaattcgatgcaacgcgaagaaccttacctactcttgacatccagagaactttccagagatggattggtgccttcgggaactctgagacaggtgctgcatggctgtcgtcagctcgtgttgtgaaatgttgggttaagtcccgcaacgagcgcaacccttatcctttgttgccagcgcgtgatggcgggaactcaaaggagactgccggtgataaaccggaggaaggtggggatgacgtcaagtcatcatggcccttacgagtagggctacacacgtgctacaatggcgtatacaaagggaagcgaccccgcgagggcaagcggaactcataaagtacgtcgtagtccggattggagtctgcaactcgactccatgaagtcggaatcgctagtaatcgtagatcagaatgctacggtgaatacgttcccgggccttgtacacaccgcccgtcacaccatgggagtgggttgcaaaagaagtaggtagcttaacctccgggagggcgcttaccactttgtgattcatgactggggtgaagtcgtaacaaggtaaccgtaggggaacctgcggttggatcacctcctt

SEQ ID NO: 1283 - DNA, 1484 bp, artificial sequence
  GCF_900087015.1_00004_Christensenella_timonensis
tctgagagtttgatcctggctcagagcgaacgctggcggcaggcttaacacatgcaagtcgaacgggcacttcggtgctagtggcagacgggtgagtaacacgtgggaacgtacctttcggttcggaataatacagggaaacttgtactaataccggatacgcccttcgggggaaagatttatcgccgattgatcggcccgcgtctgattagctagttggtgaggtaatggctcaccaaggcgacgatcagtagctggtctgagaggatgatcagccacactgggactgagacacggcccagactcctacgggaggcagcagtggggaatattggacaatgggcgcaagcctgatccagccatgccgcgtgtgtgatgaaggccttagggttgtaaagcacttttgtccgggaagataatgactgtaccggaagaataagccccggctaacttcgtgccagcagccgcggtaatacgaagggggctagcgttgctcggaatcactgggcgtaaagggcgcgtaggcggactcttaagtcgggggtgaaagcccagggctcaaccctggaattgccttcgatactgagagtcttgagttcggaagaggttggtggaactgcgagtgtagaggtgaaattcgtagatattcgcaagaacaccagtggcgaaggcggccaactggtccgatactgacgctgaggcgcgaaagcgtggggagcaaacaggattagataccctggtagtccacgccgtaaacgatgaatgccagccgttggggtgcatgcacctcagtggcgcagctaacgctttaagcattccgcctggggagtacggtcgcaagattaaaactcaaaggaattgacgggggcccgcacaagcggtggagcatgtggtttaattcgaagcaacgcgcagaaccttaccagcttttgacatgtccggtttgatcggcagagatgcctttcttcagttcggctggccggaacacaggtgctgcatggctgtcgtcagctcgtgtcgtgagatgttgggttaagtcccgcaacgagcgcaaccctcgcccctagttgccatcattcagttgggaactctagggggactgccggtgataagccgcgaggaaggtggggatgacgtcaagtcctcatggcccttacaggctgggctacacacgtgctacaatggcggtgacaatgggcagcgaaggagcgatccggtgctaatcccaaaaagccgtctcagttcagattgcactctgcaactcgagtgcatgaaggtggaatcgctagtaatcgtggatcagcatgccacggtgaatacgttcccgggccttgtacacaccgcccgtcacaccatgggagttgggtttacccgaaggcgtcgcgctaaccgcaaggaggcaggcgaccacggtaggctcagcgactggggtgaagtcgtaacaaggtagccgtaggggaacctgcggctggatcacctccttt

SEQ ID NO: 1284 - DNA, 1522 bp, artificial sequence
  GCF_900087015.1_00321_Christensenella_timonensis
tacggagagtttgatcctggctcaggatgaacgctggcggcgtgcttaacacatgcaagtcgaacggtgaacacggagcttgctctgtgggatcagtggcgaacgggtgagtaacacgtgagcaacctgcccctgactctgggataagcgctggaaacggcgtctaatactggatatgtgacgtgaccgcatggtctgcgtctggaaagaatttcggttggggatgggctcgcggcctatcagcttgttggtgaggtaatggctcaccaaggcgtcgacgggtagccggcctgagagggtgaccggccacactgggactgagacacggcccagactcctacgggaggcagcagtggggaatattgcacaatgggcgcaagcctgatgcagcaacgccgcgtgagggacgacggccttcgggttgtaaacctcttttagcagggaagaagcgaaagtgacggtacctgcagaaaaagcgccggctaactacgtgccagcagccgcggtaatacgtagggcgcaagcgttatccggaattattgggcgtaaagagctcgtaggcggtttgtcgcgtctgctgtgaaatccggaggctcaacctccggcctgcagtgggtacgggcagactagagtgcggtaggggagattggaattcctggtgtagcggtggaatgcgcagatatcaggaggaacaccgatggcgaaggcagatctctgggccgtaactgacgctgaggagcgaaagggtggggagcaaacaggcttagataccctggtagtccaccccgtaaacgttgggaactagttgtggggtccattccacggattccgtgacgcagctaacgcattaagttccccgcctggggagtacggccgcaaggctaaaactcaaaggaattgacggggacccgcacaagcggcggagcatgcggattaattcgatgcaacgcgaagaaccttaccaaggcttgacatatacgagaacgggccagaaatggtcaactctttggacactcgtaaacaggtggtgcatggttgtcgtcagctcgtgtcgtgagatgttgggttaagtcccgcaacgagcgcaaccctcgttctatgttgccagcacgtaatggtgggaactcatgggatactgccggggtcaactcggaggaaggtggggatgacgtcaaatcatcatgccccttatgtcttgggcttcacgcatgctacaatggccggtacaaagggctgcaataccgcgaggtggagcgaatcccaaaaagccggtcccagttcggattgaggtctgcaactcgacctcatgaagtcggagtcgctagtaatcgcagatcagcaacgctgcggtgaatacgttcccgggtcttgtacacaccgcccgtcaagtcatgaaagtcggtaacacctgaagccggtggcctaacccttgtggagggagccgtcgaaggtgggatcggtaattaggactaagtcgtaacaaggtagccgtaccggaaggtgcggctggatcacctccttt

SEQ ID NO: 1285 - DNA, 1482 bp, artificial sequence
  GCF_900087015.1_00325_Christensenella_timonensis
cttgagagtttgatcctggctcagaacgaacgctggcggcaggcttaacacatgcaagtcgagcgccccgcaaggggagcggcagacgggtgagtaacgcgtgggaacgtaccatttgctacggaataactcagggaaacttgtgctaataccgtatgtgcccgaaaggggaaagatttatcggcaaatgatcggcccgcgttggattagctagttggtggggtaaaggcccaccaaggcgacgatccatagctggtctgagaggatgatcagccacactgggactgagacacggcccagactcctacgggaggcagcagtggggaatattggacaatgggcgcaagcctgatccagccatgccgcgtgagtgatgaaggccctagggttgtaaagctctttcaccggtgaagataatgacggtaaccggagaagaagccccggctaacttcgtgccagcagccgcggtaatacgaagggggctagcgttgttcggatttactgggcgtaaagcgcacgtaggcggacttttaagtcaggggtgaaatcccggggctcaaccccggaactgcctttgatactggaagtcttgagtatggtagaggtgagtggaattccgagtgtagaggtgaaattcgtagatattcggaggaacaccagtggcgaaggcggctcactggaccattactgacgctgaggtgcgaaagcgtggggagcaaacaggattagataccctggtagtccacgccgtaaacgatgaatgttagccgtcggggtgtttacacttcggtggcgcagctaacgcattaaacattccgcctggggagtacggtcgcaagattaaaactcaaaggaattgacgggggcccgcacaagcggtggagcatgtggtttaattcgaagcaacgcgcagaaccttaccagcccttgacatcccggtcgcggttagtggagacactatccttcagttaggctggaccggagacaggtgctgcatggctgtcgtcagctcgtgtcgtgagatgttgggttaagtcccgcaacgagcgcaaccctcgcccttagttgccagcattcagttgggcactctaaggggactgccggtgataagccgagaggaaggtggggatgacgtcaagtcctcatggcccttacgggctgggctacacacgtgctacaatggtggtgacagtgggcagcgagcacgcgagtgtgagctaatctccaaaagccatctcagttcggattgcactctgcaactcgagtgcatgaagttggaatcgctagtaatcgcggatcagcatgccgcggtgaatacgttcccgggccttgtacacaccgcccgtcacaccatgggagttggttttacccgaaggcgctgtgctaaccgcaaggaggcaggcgaccacggtagggtcagcgactggggtgaagtcgtaacaaggtagccgtaggggaacctgcggctggatcacctccttt

SEQ ID NO: 1286 - DNA, 1495 bp, artificial sequence; identical to SEQ ID NO: 1074
  ERR1022455_02439_Christensenellaceae_NG16_sp1

SEQ ID NO: 1287 - DNA, 1494 bp, artificial sequence
  GCA_900066905_01585_Christensenellaceae_NG16_sp1
attccggttgatcctgccggaccagaccgctatgggagtagggataagccatgggagtcgaacgcttccgggaaggaggcgtggcagacggctgagtaacacgtggttaacttaccctcgggacctggataactccgggaaactggagctaatccggggcagataaaggttgctggaatgctcctttatctaaaggcctctaggctgttcccgtctagaggtgcccgaggataggactgcgacccatcaggttgttgggggagtaatggtcccccaagcctataacgggtaggggccctgagagggggagcccccagttgggcactgagacaagggcccaggccctacggggcgcaccaggcgcgaaacgtctccaatgcggggaaccgtgagagcgctactcccagtgctcccgtaagggagcttttcctcactctagataggtgagggaataagcggggggcaagactggtgtcagccgccgcggtaataccagccccgcgagtggtctggacgcttactgggcttaaagcgcccgtagccggccctacaagtcactgtttaaagatccgggctcaacccggggaagggcagtgatactgtggggctagggggcgagagaggtcggaggtattcctggagtaggggcgaaatccttagatcccgggaagaccaccagtggcgaaagcgtccggccagagcgcgcccgacggtgaggggcgaaagccggggtagcaaaagggattagatacccctgtagtcccggctgtaaactatgcaggctaggtgtagcgtaggctttgcgcctacgctgtgccgcagagaaattggtaagcctgccgcctggggagtacgaccgcaaggttgaaacttaaaggaattggcgggggagcaccacaaggggtggaacctgcggctcaattggagtcaacgcctggaatcttaccgggagagaccgcagtttgacggccaggctaacgaccttgccagactcgcggagaggaggcgcatggccgtcgccagctcgtgttgtgaaatgtccggttaagtccggcaacgagcgagaccctcgctgctagttggaatctgtccctctgggggcggaccacactagcggaactgccgtcgtaaggcggaggaaggagagggccacggcaggtcagcatgccccgaaactcccgggccgcacgcgggttacaatggctgggacagcgggttccgactccgaaaggagaaggtaatccctaaaccctgcctcagttgggatcgagggttggaacccaccctcgtgaacgaggaatccctagtaaccgcaggtcaacaacctgcggtgaatacgtccctgctccttgcacacaccgcccgtcgctccacccgagtgaggaagaagtgaggtttcttgcctttcggggtgggggatcgaacttcttcctcgcgaggggggagaagtcgtaacaaggtagccgtaggggaacctgcggctggatcacctca

SEQ ID NO: 1288 - DNA, 1520 bp, artificial sequence
  GCF_005845105.1_00122_Christensenellaceae_NG16_sp1
tacggagagtttgatcctggctcaggatgaacgctggcggcgtgcttaacacatgcaagtcgaacggtgaagccaagcttgcttggtggatcagtggcgaacgggtgagtaacacgtgagcaacctgccctggactctgggataagcgctggaaacggcgtctaatactggatatgagacgtgatcgcatggtcgtgtttggaaagatttttcggtctgggatgggctcgcggcctatcagcttgttggtgaggtaatggctcaccaaggcgtcgacgggtagccggcctgagagggtgaccggccacactgggactgagacacggcccagactcctacgggaggcagcagtggggaatattgcacaatgggcggaagcctgatgcagcaacgccgcgtgagggatgacggccttcgggttgtaaacctcttttagcagggaagaagcgaaagtgacggtacctgcagaaaaagcgccggctaactacgtgccagcagccgcggtaatacgtagggcgcaagcgttatccggaattattgggcgtaaagagctcgtaggcggtttgtcgcgtctgctgtgaaatcccgaggctcaacctcgggtctgcagtgggtacgggcagactagagtgcggtaggggagattggaattcctggtgtagcggtggaatgcgcagatatcaggaggaacaccgatggcgaaggcagatctctgggccgtaactgacgctgaggagcgaaagggtggggagcaaacaggcttagataccctggtagtccaccccgtaaacgttgggaactagttgtggggaccattccacggtttccgtgacgcagctaacgcattaagttccccgcctggggagtacggccgcaaggctaaaactcaaaggaattgacggggacccgcacaagcggcggagcatgcggattaattcgatgcaacgcgaagaaccttaccaaggcttgacatatacgagaacgggccagaaatggtcaactctttggacactcgtaaacaggtggtgcatggttgtcgtcagctcgtgtcgtgagatgttgggttaagtcccgcaacgagcgcaaccctcgttctatgttgccagcacgtaatggtgggaactcatgggatactgccggggtcaactcggaggaaggtggggatgacgtcaaatcatcatgccccttatgtcttgggcttcacgcatgctacaatggccggtacaaagggctgcaataccgtgaggtggagcgaatcccaaaaagccggtcccagttcggattgaggtctgcaactcgacctcatgaagtcggagtcgctagtaatcgcagatcagcaacgctgcggtgaatacgttcccgggtcttgtacacaccgcccgtcaagtcatgaaagtcggtaacacctgaagccggtggcccaacccttgtggagggagccgtcgaaggtgggatcggtaattaggactaagtcgtaacaaggtagccgtaccggaaggtgcggctggatcacctccttt

SEQ ID NO: 1289 - DNA, 1480 bp, artificial sequence
  GCF_000821265.1_00776_Collinsella_bouchesdurhonensis
cttgagagtttgatcctggctcagaacgaacgctggcggcaggcttaacacatgcaagtcgagcgccccgcaaggggagcggcagacgggtgagtaacgcgtgggaacgtaccttttgctacggaataactcagggaaacttgtgctaataccgtatgtgcccttcgggggaaagatttatcggcaaaggatcggcccgcgttggattagctagttggtgaggtaaaggctcaccaaggcgacgatccatagctggtctgagaggatgatcagccacactgggactgagacacggcccagactcctacgggaggcagcagtggggaatattggacaatgggcgcaagcctgatccagccatgccgcgtgagtgatgaaggccctagggttgtaaagctctttcaccggtgaagataatgacggtaaccggagaagaagccccggctaacttcgtgccagcagccgcggtaatacgaagggggctagcgttgttcggatttactgggcgtaaagcgcacgtaggcggacttttaagtcaggggtgaaatcccggggctcaaccccggaactgcctttgatactggaagtcttgagtatggtagaggtgagtggaattccgagtgtagaggtgaaattcgtagatattcggaggaacaccagtggcgaaggcggctcactggaccattactgacgctgaggtgcgaaagcgtggggagcaaacaggattagataccctggtagtccacgccgtaaacgatgaatgttagccgttggggagtttactcttcggtggcgcagctaacgcattaaacattccgcctggggagtacggtcgcaagattaaaactcaaaggaattgacgggggcccgcacaagcggtggagcatgtggtttaattcgaagcaacgcgcagaaccttaccagcccttgacataccggtcgcggacacagagatgtgtctttcagttcggctggaccggatacaggtgctgcatggctgtcgtcagctcgtgtcgtgagatgttgggttaagtcccgcaacgagcgcaaccctcgcccttagttgccagcatttagttgggcactctaaggggactgccggtgataagccgagaggaaggtggggatgacgtcaagtcctcatggcccttacgggctgggctacacacgtgctacaatggtggtgacagtgggcagcgagcacgcgagtgtgagctaatctccaaaagccatctcagttcggattgcactctgcaactcgagtgcatgaagttggaatcgctagtaatcgcggatcagcatgccgcggtgaatacgttcccgggccttgtacacaccgcccgtcacaccatgggagttggttttacccgaaggcgctgtgctaaccgcaaggaggcaggcgaccacggtagggtcagcgactggggtgaagtcgtaacaaggtagccgtaggggaacctgcggctggatcacctccttt

SEQ ID NO: 1290 - DNA, 1480 bp, artificial sequence; identical to SEQ ID NO: 1289
  GCF_000821265.1_01327_Collinsella_bouchesdurhonensis

SEQ ID NO: 1291 - DNA, 1482 bp, artificial sequence
  GCF_005845055.1_01365_Collinsella_bouchesdurhonensis
cttgagagtttgatcctggctcagagcgaacgctggcggcaggcttaacacatgcaagtcgagcgggcaccttcgggtgtcagcggcagacgggtgagtaacacgtgggaacgtacccttcggttcggaataacgctgggaaactagcgctaataccggatacgcccttttggggaaaggtttactgccgaaggatcggcccgcgtctgattagctagttggtggggtaatggcctaccaaggcgacgatcagtagctggtctgagaggatgatcagccacactgggactgagacacggcccagactcctacgggaggcagcagtggggaatattggacaatgggcgcaagcctgatccagccatgccgcgtgagtgatgaaggccttagggttgtaaagctcttttgtccgggacgataatgacggtaccggaagaataagccccggctaacttcgtgccagcagccgcggtaatacgaagggggctagcgttgctcggaatcactgggcgtaaagggcgcgtaggcggccattcaagtcgggggtgaaagcctgtggctcaaccacagaattgccttcgatactgtttggcttgagtatggcagaggtcagtggaactgcgagtgtagaggtgaaattcgtagatattcgcaagaacaccagtggcgaaggcggctgactgggccattactgacgctgaggcgcgaaagcgtggggagcaaacaggattagataccctggtagtccacgccgtaaacgatgaatgctagctgttggggtgcttgcaccgcagtagcgcagctaacgctttaagcattccgcctggggagtacggtcgcaagattaaaactcaaaggaattgacgggggcccgcacaagcggtggagcatgtggtttaattcgaagcaacgcgcagaaccttaccatcccttgacatgtcgtgccagctggagagatccagggttcccttcggggacgcgaacacaggtgctgcatggctgtcgtcagctcgtgtcgtgagatgttgggttaagtcccgcaacgagcgcaacccacgtccttagttgccatcattcagttgggcactctagggagactgccggtgataagccgcgaggaaggtgtggatgacgtcaagtcctcatggcccttacgggatgggctacacacgtgctacaatggcggtgacagtgggaagcgaaggagcgatctggagcaaatccccaaaaaccgtctcagttcagattgcactctgcaactcgagtgcatgaaggcggaatcgctagtaatcgtggatcagcatgccacggtgaatacgttcccgggccttgtacacaccgcccgtcacaccatgggagttggtcttacccgacggcgctgcgccaaccgcaaggaggcaggcgaccacggtagggtcagcgactggggtgaagtcgtaacaaggtagccgtaggggaacctgcggctggatcacctccttt

SEQ ID NO: 1292 - DNA, 1542 bp, artificial sequence; identical to SEQ ID NO: 545
  GCF_900155365.1_00011_Collinsella_bouchesdurhonensis

SEQ ID NO: 1293 - DNA, 1515 bp, artificial sequence
  GCF_000420465.1_00287_Desulfovibrio_desulfuricans
  misc_feature (174)..(174): n is a, c, g, or t
  misc_feature (177)..(179): n is a, c, g, or t
  misc_feature (181)..(181): n is a, c, g, or t
  misc_feature (187)..(190): n is a, c, g, or t
  misc_feature (192)..(192): n is a, c, g, or t
acggagagtttgatcctggctcaggacgaacgctggcggcgtgcttaacacatgcaagtcgagcggtaaggcctttcggggtacacgagcggcgaacgggtgagtaacacgtgggtgatctgccctgcacttcgggataagcctgggaaactgggtctaataccggatatgacntcnnntngcatgnnnngnggtggaaagatttatcggtgcaggatgggcccgcggcctatcagcttgttggtggggtaatggcctaccaaggcgacgacgggtagccgacctgagagggtgaccggccacactgggactgagacacggcccagactcctacgggaggcagcagtggggaatattgcacaatgggcgaaagcctgatgcagcgacgccgcgtgagggatgacggccttcgggttgtaaacctctttcagcagggacgaagcgcaagtgacggtacctgcagaagaagcaccggctaactacgtgccagcagccgcggtaatacgtagggtgcaagcgttgtccggaattactgggcgtaaagagttcgtaggcggtttgtcgcgtcgtttgtgaaaaccagcagctcaactgctggcttgcaggcgatacgggcagacttgagtactgcaggggagactggaattcctggtgtagcggtgaaatgcgcagatatcaggaggaacaccggtggcgaaggcgggtctctgggcagtaactgacgctgaggaacgaaagcgtgggtagcgaacaggattagataccctggtagtccacgccgtaaacggtgggcgctaggtgtgggttccttccacggaatccgtgccgtagctaacgcattaagcgccccgcctggggagtacggccgcaaggctaaaactcaaaggaattgacgggggcccgcacaagcggcggagcatgtggattaattcgatgcaacgcgaagaaccttacctgggtttgacatataccggaaagctgcagagatgtggccccccttgtggtcggtatacaggtggtgcatggctgtcgtcagctcgtgtcgtgagatgttgggttaagtcccgcaacgagcgcaacccctatcttatgttgccagcacgttatggtggggactcgtaagagactgccggggtcaactcggaggaaggtggggacgacgtcaagtcatcatgccccttatgtccagggcttcacacatgctacaatggccagtacagagggctgcgagaccgtgaggtggagcgaatcccttaaagctggtctcagttcggatcggggtctgcaactcgaccccgtgaagtcggagtcgctagtaatcgcagatcagcaacgctgcggtgaatacgttcccgggccttgtacacaccgcccgtcacgtcatgaaagtcggtaacacccgaagccggtggcttaaccccttgtgggagggagccgtcgaaggtgggatcggcgattgggacgaagtcgtaacaaggtagccgtaccggaaggtgcggctggatcacctccttt

SEQ ID NO: 1294 - DNA, 1538 bp, artificial sequence
  GCF_004801255.1_00389_Desulfovibrio_desulfuricans
ttgaagagtttgatcatggctcagattgaacgctggcggcaggcctaacacatgcaagtcgaacggtaacaggaagcagcttgctgctttgctgacgagtggcggacgggtgagtaatgtctgggaaactgcctgatggagggggataactactggaaacggtagctaataccgcataacgtcgcaagaccaaagagggggaccttcgggcctcttgccatcggatgtgcccagatgggattagctagtaggtggggtaacggctcacctaggcgacgatccctagctggtctgagaggatgaccagccacactggaactgagacacggtccagactcctacgggaggcagcagtggggaatattgcacaatgggcgcaagcctgatgcagccatgccgcgtgtatgaagaaggccttcgggttataaagtactttcagcggggaggaaggtgttgaggttaataacctcagcaattgacgttacccgcagaagaagcaccggctaactccgtgccagcagccgcggtaatacggagggtgcaagcgttaatcggaattactgggcgtaaagcgcacgcaggcggtctgtcaagtcggatgtgaaatccccgggctcaacctgggaactgcattcgaaactggcaggctagagtcttgtagaggggggtagaattccaggtgtagcggtgaaatgcgtagagatctggaggaataccggtggcgaaggcggccccctggacaaagactgacgctcaggtgcgaaagcgtggggagcaaacaggattagataccctggtagtccacgccgtaaacgatgtcgacttggaggttgtgcccttgaggcgtggcttccggagctaacgcgttaagtcgaccgcctggggagtacggccgcaaggttaaaactcaaatgaattgacgggggcccgcacaagcggtggagcatgtggtttaattcgatgcaacgcgaagaaccttacctactcttgacatccagagaactttccagagatggattggtgccttcgggaactctgagacaggtgctgcatggctgtcgtcagctcgtgttgtgaaatgttgggttaagtcccgcaacgagcgcaacccttatcctttgttgccagcggtccggccgggaactcaaaggagactgccagtgataaactggaggaaggtggggatgacgtcaagtcatcatggcccttacgagtagggctacacacgtgctacaatggcgcatacaaagagaagcgacctcgcgagagcaagcggacctcataaagtgcgtcgtagtccggattggagtctgcaactcgactccatgaagtcggaatcgctagtaatcgtggatcagaatgccacggtgaatacgttcccgggccttgtacacaccgcccgtcacaccatgggagtgggttgcaaaagaagtaggtagcttaaccttcgggagggcgcttaccactttgtgattcatgactggggtgaagtcgtaacaaggtaaccgtaggggaacctgcggttggatcacctcctt

SEQ ID NO: 1295 - DNA, 1268 bp, artificial sequence
  GCF_004801255.1_00996_Desulfovibrio_desulfuricans
ttgaagagtttgatcatggctcagattgaacgctggcggcaggcctaacacatgcaagtcgaacggtaacaggaagcagcttgctgcttcgctgacgagtggcggacgggtgagtaatgtctgggaaactgcctgatggagggggataactactggaaacggtagctaataccgcataacgtcgcaagaccaaagagggggaccttcgggcctcttgccatcggatgtgcccagatgggattagctagtaggtggggtaacggctcacctaggcgacgatccctagctggtctgagaggatgaccagccacactggaactgagacacggtccagactcctacgggaggctgcagtggggaatattgcacaatgggcgcaagcctgatgcagccatgccgcgtgtatgaagaaggccttcgggttgtaaagtactttcagcggggaggaaggcgataaggttaataaccttgtcgattgacgttacccgcagaagaagcaccggctaactccgtgccagcagccgcggtaatacggagggtgcaagcgttaatcggaattactgggcgtaaagcgcacgcaggcggtctgtcaagtcggatgtgaaatccccgggctcaacctgggaactgcattcgaaactggcaggctagagtcttgtagaggggggtagaattccaggtgtagcggtgaaatgcgtagagatctggaggaataccggtggcgaaggcggccccctggacaaagactgacgctcaggtgcgaaagcgtggggagcaaacaggattagataccctggtagtccacgccgtaaacgatgtcgacttggaggttgtgcccttgaggcgtggcttccggagctaacgcgttaagtcgaccgcctggggagtacggccgcaaggttaaaactcaaatgaattgacgggggcccgcacaagcggtggagcatgtggtttaattcgatgcaacgcgaagaaccttacctactcttgacatccagagaacttagcagagatgctttggtgccttcgggaactctgagacaggtgctgcatggctgtcgtcagctcgtgttgtgaaatgttgggttaagtcccgcaacgagcgcaacccttatcctttgttgccagcggttaggccgggaactcaaaggagactgccagtgataaactggaggaaggtggggatgacgtcaagtcatcatggcccttacgagtagggctacacacgtgctacaatggcgcatacaaagagaagcgacctcgcgaga

SEQ ID NO: 1296 - DNA, 1426 bp, artificial sequence
  GCF_004801255.1_01986_Desulfovibrio_desulfuricans
agaccggcgcacgggtgcgtaacgcgtatgcaatctaccttttacagagggatagcccagagaaatttggattaatacctcatagtataacgactcggcatcgagatgttattaaagtcacaacggtaaaagatgagcatgcgtcccattagctagttggtaaggtaacggcttaccaaggcgacgatgggtaggggtcctgagagggagatcccccacactggtactgagacacggaccagactcctacgggaggcagcagtgaggaatattggacaatgggcgcaagcctgatccagccatgccgcgtgcaggatgacggtcctatggattgtaaactgcttttgtacaggaagaaacaacgctacgtgtagcgtcttgacggtactgtaagaataaggatcggctaactccgtgccagcagccgcggtaatacggaggatccaagcgttatccggaatcattgggtttaaagggtccgtaggcggtttggtaagtcagtggtgaaagcccatcgctcaacggtggaacggccattgatactgccagacttgaattactgggaagtaactagaatatgtagtgtagcggtgaaatgcttagagattacatggaataccaattgcgaaggcaggttactaccagtggattgacgctgatggacgaaagcgtgggtagcgaacaggattagataccctggtagtccacgccgtaaacgatggatactagctgttgggggcaacttcagtggctaagcgaaagtgataagtatcccacctggggagtacgttcgcaagaatgaaactcaaaggaattgacgggggcccgcacaagcggtggagcatgtggtttaattcgatgatacgcgaggaaccttaccaaggcttaaatgtagtctgaccgatttggaaacagatctttcgcaagacagattacaaggtgctgcatggttgtcgtcagctcgtgccgtgaggtgtcaggttaagtcctataacgagcgcaacccctgttgttagttgccagcgagtcatgtcgggaactctaacgagactgccagtgcaaactgtgaggaaggtggggatgacgtcaaatcatcacggcccttacgccttgggctacacacgtgctacaatggccggtacagagagcagccacctcgcgagggggagcgaatctataaaaccggtcacagttcggatcggagtctgcaactcgactccgtgaagctggaatcgctagtaatcggatatcagccatgatccggtgaatacgttcccgggccttgtacacaccgcccgtcaagccatggaagctgggggtgcctgaagtcggtgaccgcaaggagctgcctagggtaaaactggtaactagggctaagtcgtaacaaggtagccgtaccggaaggtgcggctggaacacctccttt

SEQ ID NO: 1297 - DNA, 1539 bp, artificial sequence; identical to SEQ ID NO: 943
  GCF_000160055.1_00534_Dialister_invisus

SEQ ID NO: 1298 - DNA, 1539 bp, artificial sequence; identical to SEQ ID NO: 943
  GCF_000160055.1_00810_Dialister_invisus

SEQ ID NO: 1299 - DNA, 1325 bp, artificial sequence
  GCF_000160055.1_01219_Dialister_invisus
acgccatcagatgtgcccagatgggattagctagtaggtggggtaatggctcacctaggcgacgatctctagctggtctgagaggatgaccagccacactggaactgagacacggtccagactcctacgggaggcagcagtggggaatattgcacaatgggcgcaagcctgatgcagccatgccgcgtgtatgaagaaggccttcgggttgtaaagtactttcagcgaggaggaaggcattgtggttaataaccacagtgattgacgttactcgcagaagaagcaccggctaactccgtgccagcagccgcggtaatacggagggtgcaagcgttaatcggaattactgggcgtaaagcgcacgcaggcggttgattaagtcagatgtgaaatccccgagcttaacttgggaactgcatttgaaactggtcagctagagtcttgtagaggggggtagaattccaggtgtagcggtgaaatgcgtagagatctggaggaataccggtggcgaaggcggccccctggacaaagactgacgctcaggtgcgaaagcgtggggagcaaacaggattagataccctggtagtccacgctgtaaacgatgtcgacttggaggttgtgcccttgaggcgtggcttccggagctaacgcgttaagtcgaccgcctggggagtacggccgcaaggttaaaactcaaatgaattgacgggggcccgcacaagcggtggagcatgtggtttaattcgatgcaacgcgaagaaccttacctactcttgacatccagagaatttgctagagatagcttagtgccttcgggaactctgagacaggtgctgcatggctgtcgtcagctcgtgttgtgaaatgttgggttaagtcccgcaacgagcgcaacccttatcctttgttgccagcacgtaatggtgggaactcaaaggagactgccggtgataaaccggaggaaggtggggatgacgtcaagtcatcatggcccttacgagtagggctacacacgtgctacaatggcatatacaaagagaagcgaactcgcgagagcaagcggacctcataaagtatgtcgtagtccggattggagtctgcaactcgactccatgaagtcggaatcgctagtaatcgtagatcagaatgctacggtgaatacgttcccgggccttgtacacaccgcccgtcacaccatgggagtgggttgcaaaagaagtaggtagcttaaccttcgggagggcgcttaccactttgtgattcatgactggggtgaagtcgtaacaaggtaaccgtaggggaacctgcggttggatcacctcctt

SEQ ID NO: 1300 - DNA, 1517 bp, artificial sequence
  STR00447_Eisenbergiella_massiliensis
agagagtttgatcctggctcaggatgaacgctggcggcgtgcctaacacatgcaagtcgaacggagttatgcagaggaagttttcggatggaatcggcgtaacttagtggcggacgggtgagtaacgcgtgggaaacctgccctgtaccgggggataacacttagaaataggtgctaataccgcataagcgcacagcttcacatgaggcagtgtgaaaaactccggtggtacaggatggtcccgcgtctgattagccagttggcagggtaacggcctaccaaagcgacgatcagtagccggcctgagagggtgaacggccacattgggactgagacacggcccaaactcctacgggaggcagcagtggggaatattgcacaatgggggaaaccctgatgcagcgacgccgcgtgagtgaagaagtatttcggtatgtaaagctctatcagcagggaagaaaatgacggtacctgactaagaagccccggctaactacgtgccagcagccgcggtaatacgtagggggcaagcgttatccggatttactgggtgtaaagggagcgtagacggcatgacaagccagatgtgaaaacccagggctcaaccctgggactgcatttggaactgccaggctggagtgcaggagaggtaagcggaattcctagtgtagcggtgaaatgcgtagatattaggaggaacaccagtggcgaaggcggcttactggactgtaactgacgttgaggctcgaaagcgtggggagcaaacaggattagataccctggtagtccacgcggtaaacgatgattgctaggtgtaggtgggtatggacccatcggtgccgcagctaacgcaataagcaatccacctggggagtacgttcgcaagaatgaaactcaaaggaattgacggggacccgcacaagcggtggagcatgtggtttaattcgaagcaacgcgaagaaccttaccaagtcttgacatcccaatgacgtgtccgtaacggggcattctcttcggagcattggagacaggtggtgcatggttgtcgtcagctcgtgtcgtgagatgttgggttaagtcccgcaacgagcgcaacccttatccttagtagccagcaggtaaagctgggcactctagggagactgccggggataacccggaggaaggcggggatgacgtcaaatcatcatgccccttatgatttgggctacacacgtgctacaatggcgtaaacaaagggaagcgagacagtgatgttgagcaaatcccagaaataacgtctcagttcggattgtagtctgcaactcgactacatgaagctggaatcgctagtaatcgcgaatcagcatgtcgcggtgaatacgttcccgggtcttgtacacaccgcccgtcacaccatgggagttggaaatgcccgaagcctgtgacctaaccgcaagggaggagcagtcgaaggcaggtctaataactggggtgaagtcgtaacaaggtagccgtatcggaaggtgcggctggat

SEQ ID NO: 1301 - DNA, 1434 bp, artificial sequence
  STR00606_Eisenbergiella_massiliensis
agagagtttgatcctggctcaggatgaacgctggcggcgtgcctaacacatgcaagtcgaacggagttatgcagaggaagttttcggatggaatcggcgtaacttagtggcggacgggtgagtaacgcgtgggaaacctgccctgtaccgggggataacacttagaaataggtgctaataccgcataagcgcacagcttcacatgaggcagtgtgaaaaactccggtggtacaggatggtcccgcgtctgattagccagttggcagggtaacggcctaccaaagcgacgatcagtagccggcctgagagggtgaacggccacattgggactgagacacggcccaaactcctacgggaggcagcagtggggaatattgcacaatgggggaaaccctgatgcagcgacgccgcgtgagtgaagaagtatttcggtatgtaaagctctatcagcagggaagaaaatgacggtacctgactaagaagccccggctaactacgtgccagcagccgcggtaatacgtagggggcaagcgttatccggatttactgggtgtaaagggagcgtagacggcatgacaagccagatgtgaaaacccagggctcaaccctgggactgcatttggaactgccaggctggagtgcaggagaggtaagcggaattcctagtgtagcggtgaaatgcgtagatattaggaggaacaccagtggcgaaggcggcttactggactgtaactgacgttgaggctcgaaagcgtggggagcaaacaggattagataccctggtagtccacgcggtaaacgatgattgctaggtgtaggtgggtatggacccatcggtgccgcagctaacgcaataagcaatccacctggggagtacgttcgcaagaatgaaactcaaaggaattgacggggacccgcacaagcggtggagcatgtggtttaattcgaagcaacgcgaagaaccttaccaagtcttgacatcccaatgacgtgtccgtaacggggcattctcttcggagcattggagacaggtggtgcatggttgtcgtcagctcgtgtcgtgagatgttgggttaagtcccgcaacgagcgcaacccttatccttagtagccagcaggtaaagctgggcactctagggagactgccggggataacccggaggaaggcggggatgacgtcaaatcatcatgccccttatgatttgggctacacacgtgctacaatggcgtaaacaaagggaagcgagacagtgatgttgagcaaatcccagaaataacgtctcagttcggattgtagtctgcaactcgactacatgaagctggaatcgctagtaatcgcgaatcagcatgtcgcggtgaatacgttcccgggtcttgtacacaccgcccgtcacaccatgggagttggaaatgcccgaagcctgtgacctaacc

SEQ ID NO: 1302 - DNA, 1527 bp, artificial sequence
  STR02616_Eisenbergiella_massiliensis
agagagtttgatcctggctcaggatgaacgctggcggcgtgcctaacacatgcaagtcgaacggagttatgcagaggaagttttcggatggaatcggcgtaacttagtggcggacgggtgagtaacgcgtgggaaacctgccctgtaccgggggataacacttagaaataggtgctaataccgcataagcgcacagcttcacatgaggcagtgtgaaaaactccggtggtacaggatggtcccgcgtctgattagccagttggcagggtaacggcctaccaaagcgacgatcagtagccggcctgagagggtgaacggccacattgggactgagacacggcccaaactcctacgggaggcagcagtggggaatattgcacaatgggggaaaccctgatgcagcgacgccgcgtgagtgaagaagtatttcggtatgtaaagctctatcagcagggaagaaaatgacggtacctgactaagaagccccggctaactacgtgccagcagccgcggtaatacgtagggggcaagcgttatccggatttactgggtgtaaagggagcgtagacggcatgacaagccagatgtgaaaacccagggctcaaccctgggactgcatttggaactgccaggctggagtgcaggagaggtaagcggaattcctagtgtagcggtgaaatgcgtagatattaggaggaacaccagtggcgaaggcggcttactggactgtaactgacgttgaggctcgaaagcgtggggagcaaacaggattagataccctggtagtccacgcggtaaacgatgattgctaggtgtaggtgggtatggacccatcggtgccgcagctaacgcaataagcaatccacctggggagtacgttcgcaagaatgaaactcaaaggaattgacggggacccgcacaagcggtggagcatgtggtttaattcgaagcaacgcgaagaaccttaccaagtcttgacatcccaatgacgtgtccgtaacggggcattctcttcggagcattggagacaggtggtgcatggttgtcgtcagctcgtgtcgtgagatgttgggttaagtcccgcaacgagcgcaacccttatccttagtagccagcaggtaaagctgggcactctagggagactgccggggataacccggaggaaggcggggatgacgtcaaatcatcatgccccttatgatttgggctacacacgtgctacaatggcgtaaacaaagggaagcgagacagtgatgttgagcaaatcccagaaataacgtctcagttcggattgtagtctgcaactcgactacatgaagctggaatcgctagtaatcgcgaatcagcatgtcgcggtgaatacgttcccgggtcttgtacacaccgcccgtcacaccatgggagttggaaatgcccgaagcctgtgacctaaccgcaagggaggagcagtcgaaggcaggtctaataactggggtgaagtcgtaacaaggtagccgtatcggaaggtgcggctggatcacctccttt

SEQ ID NO: 1303 - DNA, 1522 bp, artificial sequence
  GCF_000466465.2_02434_Eisenbergiella_massiliensis
tggagggttcgattctggctcaggatgaacgctggcggcgtgcttaacacatgcaagtcgaacgggatctgaccagcttgctggttggtgagagtggcgaacgggtgagtaatgcgtgaccaacctgccccatgctccagaatagctcttggaaacgggtggtaatgctggatgctccaacttgacgcatgtcttgttgggaaagtgtttagtggcatgggatggggtcgcgtcctatcagcttgtaggcggggtaatggcccacctaggcttcgacgggtagccggcctgagagggcggacggccacattgggactgagatacggcccagactcctacgggaggcagcagtggggaatattgcgcaatgggggaaaccctgacgcagcgacgccgcgtgcgggatgaaggccttcgggttgtaaaccgcttttgattgggagcaagctttcgggtgagtgtacctttcgaataagcgccggctaactacgtgccagcagccgcggtaatacgtagggcgcaagcgttatccggaattattgggcgtaaagagcttgtaggcggttcgtcgcgtctggtgtgaaagcccatcgcttaacggtgggtctgcgccgggtacgggcgggctagagtgcagtaggggagactggaattcccggtgtaacggtggaatgtgtagatatcgggaagaacaccaatggcgaaggcaggtctctgggctgttactgacgctgagaagcgaaagcgtggggagcgaacaggattagataccctggtagtccacgccgtaaacggtggacgctggatgtggggcccattccacgggttccgtgtcggagctaacgcgttaagcgtcccgcctggggagtacggccgcaaggctaaaactcaaagaaattgacgggggcccgcacaagcggcggagcatgcggattaattcgatgcaacgcgaagaaccttacctgggcttgacatgtgcctgtcgactgcagagatgtggtttcccttcggggcaggttcacaggtggtgcatggtcgtcgtcagctcgtgtcgtgagatgttgggttaagtcccgcaacgagcgcaacccttgccctgtgttgccagcgggttatgccgggaactcacgggggaccgccggggttaactcggaggaaggtggggatgacgtcagatcatcatgccccttacgtccagggcttcacgcatgctacaatggccagtacaacgggttgcgacatggtgacatggagctaatcccttaaaactggtctcagttcggatcgtagtctgcaactcgactacgtgaaggcggagtcgctagtaatcgcgaatcagcaacgtcgcggtgaatgcgttcccgggccttgtacacaccgcccgtcaagtcatgaaagtgggcagcacccgaagccggtggcctgacctttttggagggagccgtctaaggtgaggctcgtgattgggactaagtcgtaacaaggtagccgtaccggaaggtgcggctggatcacctccttt

SEQ ID NO: 1304 - DNA, 1546 bp, artificial sequence
  GCF_000509145.1_00024_Eisenbergiella_massiliensis
tatggagagtttgatcctggctcaggacgaacgctggcggcgtgcctaatacatgcaagtcgagcgaacagagaaggagcttgctccttcgacgttagcggcggacgggtgagtaacacgtgggcaacctaccttatagtttgggataactccgggaaaccggggctaataccgaataatctgtttcacctcatggtgaaacactgaaagacggtttcggctgtcgctataggatgggcccgcggcgcattagctagttggtgaggtaacggctcaccaaggcgacgatgcgtagccgacctgagagggtgatcggccacactgggactgagacacggcccagactcctacgggaggcagcagtagggaatcttccacaatgggcgaaagcctgatggagcaacgccgcgtgagtgagaggatttcggttcgtaaactctgttgtaagggaagaaaagtacagtagtaactggctgtaccttgacggtaccttattagaaagccacggctaactacgtgccagcagccgcggtaatacgtaggtggcaagcgttgtccggaattattgggcgtaaagcgcgcgcaggtggtttcttaagtctgatgtgaaagcccacggctcaaccgtggagggtcattggaaactgggagacttgagtgcagaagaggatagtggaattccaagtgtagcggtgaaatgcgtagagatttggaggaacaccagtggcgaaggcgactatctggtctgtaactgacactgaggcgcgaaagcgtggggagcaaacaggattagataccctggtagtccacgccgtaaacgatgagtgctaagtgttagggggtttccgccccttagtgctgcagctaacgcattaagcactccgcctggggagtacggtcgcaagactgaaactcaaaggaattgacgggggcccgcacaagcggtggagcatgtggtttaattcgaagcaacgcgaagaaccttaccaggtcttgacatcccgttgaccactgtagagatatggtttccccttcgggggcaacggtgacaggtggtgcatggttgtcgtcagctcgtgtcgtgagatgttgggttaagtcccgcaacgagcgcaacccttgatcttagttgccatcatttagttgggcactctaaggtgactgccggtgacaaaccggaggaaggtggggatgacgtcaaatcatcatgccccttatgacctgggctacacacgtgctacaatggacgatacaaacggttgccaactcgcgagagggagctaatccgataaagtcgttctcagttcggattgtaggctgcaactcgcctacatgaagccggaatcgctagtaatcgcggatcagcatgccgcggtgaatacgttcccgggccttgtacacaccgcccgtcacaccacgagagtttgtaacacccgaagtcggtgaggtaaccttttggagccagccgccgaaggtgggatagatgattggggtgaagtcgtaacaaggtagccgtatcggaaggtgcggctggatcacctccttt

SEQ ID NO: 1305 - DNA, 1522 bp, artificial sequence
  GCF_003435265.1_01852_Eisenbergiella_massiliensis
atgaagagtttgatcctggctcaggatgaacgctagcggcaggcctaacacatgcaagtcgaggggcagcatagatagcttgctatctgatggcgaccggcgcacgggtgcgtaacgcgtatacaacctacctattactgagggatagcccgaagaaatttggattaatacctcatagtattataagatggcatcatttaataattaaaggttacggtaatagatgggtatgcgtcctattagctagatggtgaggtaacggctcaccatggcaacgataggtaggggtcctgagagggagatcccccacactggtactgagacacggaccagactcctacgggaggcagcagtgaggaatattggacaatggaggcaactctgatccagccatgccgcgtgtaggaagacggccctatgggttgtaaactacttttgtacgggaagaaatacagtcacgtgtgattgtttgacggtaccgtaagaataagcaccggctaactccgtgccagcagccgcggtaatacggagggtgcaagcgttatccggaatcattgggtttaaagggtccgtaggcgggtaattaagtcagtggtgaaatgcaggggctcaactccggcactgccattgatactggttatcttgaattattgtgaagtggttagaatatgtagtgtagcggtgaaatgcttagatattacatagaataccgattgcgaaggcagatcactaacaatatattgacgctgatggacgaaagcgtggggagcgaacaggattagataccctggtagtccacgccgtaaacgatggttactagctgtttggatcgattgagatctgagtggccaagcgaaagtgataagtaacccacctggggagtacgttcgcaagaatgaaactcaaaggaattgacgggggcccgcacaagcggtggagcatgtggtttaattcgatgatacgcgaggaaccttaccagggcttaaatgcagtatgacagatttggaaacagatttttcttcggacatattgcaaggtgctgcatggttgtcgtcagctcgtgccgtgaggtgtcaggttaagtcctataacgagcgcaacccctatttctagttgccagcacataatggtggggactctagagagactgccggtgcaaaccgtgaggaaggtggggatgacgtcaaatcatcacggcccttacgtcctgggctacacacgtgctacaatggtagggacagagagcagccacttcgcgagaaggagcgaatctacaaaccctatctcagttcggatcgcagtctgcaactcgactgcgtgaagctggaatcgctagtaatcgcatatcagccatgatgcggtgaatacgttcccgggccttgtacacaccgcccgtcaagccatggaagctgggggtgcctgaagtcggtgaccgaaaggagctgcctagggtaaaactagtaactggggctaagtcgtaacaaggtagccgtaccggaaggtgcggctggaacacctcctt

SEQ ID NO: 1306 - DNA, 1536 bp, artificial sequence; identical to SEQ ID NO: 1085
  GCF_003435485.1_04587_Eisenbergiella_massiliensis

SEQ ID NO: 1307 - DNA, 1560 bp, artificial sequence
  GCF_900243045.1_00785_Eisenbergiella_massiliensis
atgagagtttgatcctggctcaggacgaacgctggcggcatgcctaatacatgcaagtcgaacgaaccatcctgaagattgaagcttgcttcatgattcagaccttggtgagtggcggacgggtgagtaacacgtgggtaacctgccagaagtgggggataacatttggaaacaagtgctaataccgcataacacttagatcacatgatctttgtttaaaagatggttttgctatctcttctggatggacccgcggcgtattagctagttggtgaggtaatagctcaccaaggcgatgatacgtagccgacctgagagggtaatcggccacattgggactgagacacggcccaaactcctacgggaggcagcagtagggaatcttccacaatggacgaaagtctgatggagcaatgccgcgtgagtgaagaaggttttcggatcgtaaaactctgttgttgaagaagaacatatgtgagagtaactgttcacgtactgacggtattcaaccagaaagccacggctaactacgtgccagcagccgcggtaatacgtaggtggcaagcgttgtccggatttattgggcgtaaagagaatgtaggcggtttattaagtttgaagtgaaagccctcggctcaaccgaggaagtgcttcgaaaactggtaaacttgagtgcagaagaggaaagtggaactccatgtgtagcggtggaatgcgtagatatatggaagaacaccagtggcgaaggcggctttctggtctgtaactgacgctgagattcgaaagcatgggtagcaaacaggattagataccctggtagtccatgccgtaaacgatgagtgctaagtgttggagggtttccgcccttcagtgctgcagctaacgcattaagcactccgcctggggagtacgatcgcaagattgaaactcaaaggaattgacgggggcccgcacaagcggtggagcatgtggtttaattcgaagcaacgcgaagaaccttaccaggtcttgacataccatgaaaagcttagagataagtctttcccttcggggacatggatacaggtggtgcatggttgtcgtcagctcgtgtcgtgagatgttgggttaagtcccgcaacgagcgcaacccttattatcagttgccagcattcagttgggcactctggtgagactgccggtgataaaccggaggaaggtggggacgacgtcaaatcatcatgccccttatgacctgggctacacacgtgctacaatggtcggtacaacgtgctgcgaactcgcgagggcaagcaaatcacttaaaaccgatctcagttcggattgtaggctgcaactcgcctacatgaagctggaatcgctagtaatcgcggatcagcatgccgcggtgaatacgttcccgggccttgtacacaccgcccgtcacaccatgagagtttgtaacacccaaagtcggtggggtaacccttcggggaactagccgcctaaggtgggacaaatgattagggtgaagtcgtaacaaggtagccgtaggagaacctgcggctggatcacctcctt

SEQ ID NO: 1308 - DNA, 1562 bp, artificial sequence
  GCF_900243045.1_05500_Eisenbergiella_massiliensis
atgagagtttgatcctggctcaggacgaacgctggcggcatgcctaatacatgcaagtcgaacgaaccaaactgttgattgaagcttgcttcttgattcagatcttggtgagtggcggacgggtgagtaacacgtgggtaacctgcccagaagtgggggataacatttggaaacaagtgctaataccgcataacaacttagatcacatgatctttgtttaaaagatggttttgctatctcttctggatggacccgcggcgtattagctagttggtgaggtaatagctcaccaaggcgatgatacgtagccgacctgagagggtaatcggccacattgggactgagacacggcccaaactcctacgggaggcagcagtagggaatcttccacaatggacgaaagtctgatggagcaatgccgcgtgagtgaagaaggttttcggatcgtaaaactctgttgttgaagaagaacatatgtgagagtaactgttcacgtactgacggtattcaaccagaaagccacggctaactacgtgccagcagccgcggtaatacgtaggtggcaagcgttgtccggatttattgggcgtaaagagaatgtaggcggtttattaagtttgaagtgaaagccctcggctcaaccgaggaagtgcttcgaaaactggtaaacttgagtgcagaagaggaaagtggaactccatgtgtagcggtggaatgcgtagatatatggaagaacaccagtggcgaaggcggctttctggtctgtaactgacgctgagattcgaaagcatgggtagcaaacaggattagataccctggtagtccatgccgtaaacgatgagtgctaagtgttggagggtttccgcccttcagtgctgcagctaacgcattaagcactccgcctggggagtacgatcgcaagattgaaactcaaaggaattgacgggggcccgcacaagcggtggagcatgtggtttaattcgaagcaacgcgaagaaccttaccaggtcttgacataccatgaaaagctcagagatgagtctttcctttcggggacatggatacaggtggtgcatggttgtcgtcagctcgtgtcgtgagatgttgggttaagtcccgcaacgagcgcaacccttattatcagttgccagcatttagttgggcactctggtgagactgccggtgataaaccggaggaaggtggggacgacgtcaaatcatcatgccccttatgacctgggctacacacgtgctacaatggtcggtacaacgtgctgcgaactcgcgagggcaagcaaatcacttaaaaccgatctcagttcggattgtaggctgcaactcgcctacatgaagctggaatcgctagtaatcgcggatcagcatgccgcggtgaatacgttcccgggccttgtacacaccgcccgtcacaccatgagagtttgtaacacccaaagtcggtggggtaacccttcggggaactagccgcctaaggtgggacaaatgattagggtgaagtcgtaacaaggtagccgtaggagaacctgcggctggatcacctcctt

SEQ ID NO: 1309 - DNA, 1515 bp, artificial sequence
  STR00317_Emergencia_timonensis
aattaagagtttgatcctggctcaggatgaacgctggcggcgtgcctaacacatgcaagtcgagcgagaagccattgactgaaacttcggtagaaggatatggtggaaagcggcggacgggtgagtaacgcgtaggcaacctgccccttacagagggatagccattggaaacgatgattaaaacctcataacgcatccccctcacatggaggggatgccaaagattcatcggtaagggatgggcctgcgtctgattagcttgttggcggggtaacggcccaccaaggcgacgatcagtagccgacctgagagggtgatcggccacattggaactgagacacggtccaaactcctacgggaggcagcagtggggaatattgcacaatgggcgaaagcctgatgcagcaacgccgcgtgagggatgaaggccttcgggtcgtaaacctctgtccttggggaagaaacaaatgacggtacccatggaggaagccccggctaactacgtgccagcagccgcggtaatacgtagggggcgagcgttatccggaattattgggcgtaaagagtgcgtaggtggttacctaagcgcagggtctaaggcaatggctcaaccattgttcgccctgcgaactgggctacttgagtgcaggagaggaaagcggaattcctagtgtagcggtgaaatgcgtagatattaggaggaacaccagtggcgaaggcggctttctggactgttactgacactgaggcacgaaagcgtggggagcaaacaggattagataccctggtagtccacgccgtaaacgatgagcactaggtgtcggggccgcaaggcttcggtgccgcagttaacgcattaagtgctccgcctggggagtacgcacgcaagtgtgaaactcaaaggaattgacggggacccgcacaagcagcggagcatgtggtttaattcgaagcaacgcgaagaaccttaccaggacttgacatcccactgacagatccctaaccggatccttcttcggacagtggagacaggtggtgcatggttgtcgtcagctcgtgtcgtgagatgttgggttaagtcccgcaacgagcgcaacccttgccattagttgccatcattcagttgggcactctaatgggactgccggggacaactcggaggaaggtggggatgacgtcaaatcatcatgccccttatgttctgggctacacacgtgctacaatggccggtacagcaagaagcaaaaccgcgaggtggagcaaatctcaaaaaccggtcccagttcggactgcaggctgaaacccgcctgcacgaagccggagttgctagtaatcgtggatcagaatgccacggtgaatgcgttcccgggtcttgtacacaccgcccgtcacaccatggaagttgggggtgcccgaagccggcagggaaatatgctgtctaaggcaaaaccaatgactggggtgaagtcgtaacaaggtagccgtatcggaaggtgcggctggatcacctccttt

SEQ ID NO: 1310 - DNA, 1515 bp, artificial sequence
  STR00317.1_Emergencia_timonensis
aattaagagtttgatcctggctcaggatgaacgctggcggcgtgcctaacacatgcaagtcgagcgagaagccattgactgaaacttcggtagaaggatatggtggaaagcggcggacgggtgagtaacgcgtaggcaacctgccccttacagagggatagccattggaaacgatgattaaaacctcataacgcatcccccccacatggaggggaagccaaagattcatcggtaagggatgggcctgcgtctgattagcttgttggcggggtaacggcccaccaaggcgacgatcagtagccgacctgagagggtgatcggccacattggaactgagacacggtccaaactcctacgggaggcagcagtggggaatattgcacaatgggcgaaagcctgatgcagcaacgccgcgtgagggatgaaggccttcgggtcgtaaacctctgtccttggggaagaaacaaatgacggtacccatggaggaagccccggctaactacgtgccagcagccgcggtaatacgtagggggcgagcgttatccggaattattgggcgtaaagagtgcgtaggtggttacctaagcgcagggtctaaggcaatggctcaaccattgttcgccctgcgaactgggctacttgagtgcaggagaggaaagcggaattcctagtgtagcggtgaaatgcgtagatattaggaggaacaccagtggcgaaggcggctttctggactgttactgacactgaggcacgaaagcgtggggagcaaacaggattagataccctggtagtccacgccgtaaacgatgagcactaggtgtcggggccgcaaggcttcggtgccgcagttaacgcattaagtgctccgcctggggagtacgcacgcaagtgtgaaactcaaaggaattgacggggacccgcacaagcagcggagcatgtggtttaattcgaagcaacgcgaagaaccttaccaggacttgacatcccactgacagatccctaaccggatccttcttcggacagtggagacaggtggtgcatggttgtcgtcagctcgtgtcgtgagatgttgggttaagtcccgcaacgagcgcaacccttgccattagttgccatcattcagttgggcactctaatgggactgccggggacaactcggaggaaggtggggatgacgtcaaatcatcatgccccttatgttctgggctacacacgtgctacaatggccggtacagcaagaagcaaaaccgcgaggtggagcaaatctcaaaaaccggtcccagttcggactgcaggctgaaacccgcctgcacgaagccggagttgctagtaatcgtggatcagaatgccacggtgaatgcgttcccgggtcttgtacacaccgcccgtcacaccatggaagttgggggtgcccgaagccggcagggaaatatgctgtctaaggcaaaaccaatgactggggtgaagtcgtaacaaggtagccgtatcggaaggtgcggctggatcacctccttt

SEQ ID NO: 1311 - DNA, 1515 bp, artificial sequence; identical to SEQ ID NO: 1310
  STR00317.2_Emergencia_timonensis

SEQ ID NO: 1312 - DNA, 1515 bp, artificial sequence
  STR01046_Emergencia_timonensis
aattaagagtttgatcctggctcaggatgaacgctggcggcgtgcctaacacatgcaagtcgagcgagaagccattgactgaaacttcggtagaaggatatggtggaaagcggcggacgggtgagtaacgcgtaggcaacctgccccttacagagggatagccattggaaacgatgattaaaacctcataacgcatcccccccacatggaggggatgccaaagattcatcggtaagggatgggcctgcgtctgattagcttgttggcggggtaacggcccaccaaggcgacgatcagtagccgacctgagagggtgatcggccacattggaactgagacacggtccaaactcctacgggaggcagcagtggggaatattgcacaatgggcgaaagcctgatgcagcaacgccgcgtgagggatgaaggccttcgggtcgtaaacctctgtccttggggaagaaacaaatgacggtacccatggaggaagccccggctaactacgtgccagcagccgcggtaatacgtagggggcgagcgttatccggaattattgggcgtaaagagtgcgtaggtggttacctaagcgcagggtctaaggcaatggctcaaccattgttcgccctgcgaactgggctacttgagtgcaggagaggaaagcggaattcctagtgtagcggtgaaatgcgtagatattaggaggaacaccagtggcgaaggcggctttctggactgttactgacactgaggcacgaaagcgtggggagcaaacaggattagataccctggtagtccacgccgtaaacgatgagcactaggtgtcggggccgcaaggcttcggtgccgcagttaacgcattaagtgctccgcctggggagtacgcacgcaagtgtgaaactcaaaggaattgacggggacccgcacaagcagcggagcatgtggtttaattcgaagcaacgcgaagaaccttaccaggacttgacatcccactgacagatccctaaccggatccttcttcggacagtggagacaggtggtgcatggttgtcgtcagctcgtgtcgtgagatgttgggttaagtcccgcaacgagcgcaacccttgccattagttgccatcattcagttgggcactctaatgggactgccggggacaactcggaggaaggtggggatgacgtcaaatcatcatgccccttatgttctgggctacacacgtgctacaatggccggtacagcaagaagcaaaaccgcgaggtggagcaaatctcaaaaaccggtcccagttcggactgcaggctgaaacccgcctgcacgaagccggagttgctagtaatcgtggatcagaatgccacggtgaatgcgttcccgggtcttgtacacaccgcccgtcacaccatggaagttgggggtgcccgaagccggcagggaaatatgctgtctaaggcaaaaccaatgactggggtgaagtcgtaacaaggtagccgtatcggaaggtgcggctggatcacctccttt

SEQ ID NO: 1313 - DNA, 855 bp, artificial sequence
  STR01093_Emergencia_timonensis
ggaattcctagtgtagcggtgaaatgcgtagatattaggaggaacaccagtggcgaaggcggctttctggactgttactgacactgaggcacgaaagcgtggggagcaaacaggattagataccctggtagtccacgccgtaaacgatgagcactaggtgtcggggccgcaaggcttcggtgccgcagttaacgcattaagtgctccgcctggggagtacgcacgcaagtgtgaaactcaaaggaattgacggggacccgcacaagcagcggagcatgtggtttaattcgaagcaacgcgaagaaccttaccaggacttgacatcccactgacagatccctaaccggatccttcttcggacagtggagacaggtggtgcatggttgtcgtcagctcgtgtcgtgagatgttgggttaagtcccgcaacgagcgcaacccttgccattagttgccatcattcagttgggcactctaatgggactgccggggacaactcggaggaaggtggggatgacgtcaaatcatcatgccccttatgttctgggctacacacgtgctacaatggccggtacagcaagaagcaaaaccgcgaggtggagcaaatctcaaaaaccggtcccagttcggactgcaggctgaaacccgcctgcacgaagccggagttgctagtaatcgtggatcagaatgccacggtgaatgcgttcccgggtcttgtacacaccgcccgtcacaccatggaagttgggggtgcccgaagccggcagggaaatatgctgtctaaggcaaaaccaatgactggggtgaagtcgtaacaaggtagccgtatcggaaggtgcggctggatcacctccttt

SEQ ID NO: 1314 - DNA, 1515 bp, artificial sequence; identical to SEQ ID NO: 1312
  STR01699_Emergencia_timonensis

SEQ ID NO: 1315 - DNA, 1515 bp, artificial sequence; identical to SEQ ID NO: 1310
  STR01955_Emergencia_timonensis

SEQ ID NO: 1316 - DNA, 1515 bp, artificial sequence; identical to SEQ ID NO: 1310
  STR02430_Emergencia_timonensis

SEQ ID NO: 1317 - DNA, 1467 bp, artificial sequence
  ERR1022419_04113_Emergencia_timonensis
attccggttgatcccgccggaggccactgctattgggattcgactaagccatgcgagtctatggtttcggccatggcggacggctcattaacacgtggttaacataccctcaggtgggggataaccttgggaaactgaggataataccccatagaaaaagcagtctggaatgattctttttcgaaagcacatgcgcctgaggattggactgcgctcgattaggtagttggtggggtaatggcccaccaagcctacgatcggtacgggccttgagagagggagcccggagatggggactgagacacggccccaggccctacggggcgcagcaggcgcgaaacctccgcaatgcacgaaagtgcgacggggggatcccaagtgctcatgcacagcatgggcttttatcaagtgtaaacagcttgaggaataagggctgggcaagttcggtgccagcagccgcggtaacaccgacggcccaagtggtggccactcttattgggcctaaagcgtccgtagccggtccagtaagtccctgtttaaatcctgcggcttaaccgcaggactggcagggatactgctggacttgggaccgggagaggacaagggtacttcaggggtagcggtgaaatgtgttgatccttgaaggaccacctatggcgaaggcacttgtctggaacgggtccgacggtgagggacgaaagccaggggcgcgaaccggattagatacccgggtagtcctggccgtaaactctgcgaactaggtgttaggtaggccccgtgcctatctagtgccgaagggaagccgttaagttcgccgcctggggagtacggtcgcaagactgaaacttaaaggaattggcgggggagcaccacaacgggtggagcctgcggtttaattggattcaacgccgggcatctcaccaggagcgacagcatgatgacggccaggttgacgaccttgcctgaagcgctgagaggtggtgcatggccatcgtcagctcgtaccgcgaggcgtcctgttaagtcaggtaacgagcgagacccgtgccctatgttgctactttttcctccgggagaaaggcactcataggggaccgctggcgctaagtcagaggaaggagcgggcaacgataggtccgcatgccccgaatctcctgggctacacgcgggctacaatggctaggacaatgggccgcaaccctgaaaagggacgcaaatctcctaaacctagtcgtagttcggatcgtgggctgtaactcgcccacgtgaagctggaatccgtagtaatcgcagttcataatactgcggtgaatgtgtccctgctccttgcacacaccgcccgtcacaccacccgagttgggttgaagtgaggccttggccttcggctagggtcgaacttgggctcagcgaggggggtgaagtcgtaacaaggtagccgtaggggaacctgcggctggatcacctcct

SEQ ID NO: 1318 - DNA, 1472 bp, artificial sequence
  GCA_900066695_00064_Emergencia_timonensis
attccggttgatcctgccggaggtcattgctatcggggtccgatttagccatgctagttgtacgagtttgtactcgtagcgaatagctccgtaacacgtggccaaactaccctacggatcggcataacctcgggaaactgaggctaattccgaatacggttctcacgctggaacgccgagaactggaaacgttccgacgccgtaggatgtggctgcggccgattaggtagacggtggggtaacggcccaccgtgccgataatcggtacgggttgtgagagcaagagcccggagacggaatctgagacaagattccgggccctacggggcgcagcaggcgcgaaacctttacactgcacgccagtgcgataaggggaccccgagtgcgagggcatacagtcctcgcttttctgaacggtaaggccgttcaggaacaagagctgggcaagaccggtgccagccgccgcggtaataccggcagctcgagtgatgaccgatcttattgggcctaaagcgtccgtagccggccgggcaagtccgtcgggaaatccaccagctcaactggtgggcgcccggcggaaactgctcggcttgggacaggaagacccgaggggtacgtccggggtaggagtgaaatcctgtaatcctggacggaccgccgatggcgaaagcacctcgggaggactgatccgacggtgagggacgaaagctggggtctcgaaccggattagatacccgggtagtcccagccgtaaacgatgtctgctaggtgtggcactggctacgagccagtgctgtgccgtagggaagccgtgaagcagaccgcctgggaagtacgtccgcaaggatgaaacttaaaggaattggcgggggagcactacaaccggaggagcctgcggtttaattggactcaacgccggacatctcaccagctccgacagtaggaatgaaggtcagtgtgatgagcttactagacctactgagaggaggtgcatggccgccgtcagctcgtaccgtgaggcgtcctgttaagtcaggcaacgagcgagacccgcgtccctaattgccagcagtacccttgtggtagctgggtacattagggagactgccgccgctaaggcggaggaaggaacgggcaacggtaggtcagtatgccccgaatgagctgggctacacgcgggctacaatggtcgagacaatgggttcctaccccgagaggggacggtaatctcacaaactcggtcgtagttcggattgtgggctgaaacccgcccacatgaagctggattcggtagtaatcgcgtgtcagaagcgcgcggtgaatacgtccctgctccttgcacacaccgcccgtcaaagcacccgagtgaggtccggatgaggctcccgttggggagtcgaatctgggcttcgcaagggggcttaagtcgtaacaaggtagccgtaggggaatctgcggctggatcacctcct

SEQ ID NO: 1319 - DNA, 1656 bp, artificial sequence
  GCF_003472745.1_03202_Emergencia_timonensis
tatggagagtttgatcctggctcaggacgaacgctggcggcgtgcctaacacatgcaagtcgaacggtctggtattcaacactgaatatttagcagtgtagccaagcgtcaagcgcgaaagaagagagcgcttcacgcataaacaagtgccaacacaaaagctgaggattgagtgttgaatatcagatagtggcgaacgggtgagtaacgcgtagacaacctaccttctagctggggacaacactgcgaaagtggtgctaataccgaatgttgtattttgagtgcatacttaagatactaaaggtggcctctatttataagctatcactagaagatgggtctgcgtctgattagctagttggtgaggtaatggctcaccaaggcgacgatcagtagccggtctgagaggatgaacggccacactgggactgagacacggcccagactcctacgggaggcagcagtggggaatcttccgcaatggacgaaagtctgacggagcaacgccgcgtgagtgaagaaggttttcggatcgtaaaactctgttttcagggacgaatgtgtggattgtaaataatgatccataatgacggtacctgacaagaaagccacggctaactacgtgccagcagccgcggtaatacgtaggtggcaagcgttgtccggaattattgggcgtaaagcgcgcgcaggtgggataatcagtctgatgttaaagttcggggcttaaccccgtgaagcattggatactgttattcttgagtgcaggagaggaaagtggaattcctagtgtagcggtgaaatgcgtagatattaggaggaacaccagtggcgaaggcgactttctggactgtgtctgacactgaggcgcgaaagccagggtagtgaacgggattagataccccggtaatcctggccgtaaacgatgggtactaggtgttgggggtatcgacccctccagtgccggagttaacgcaataagtaccccgcctggggagtacggccgcaaggttgaaactcaaaggaattgacgggggcccgcacaagcggtggagtatgtggtttaattcgacgcaacgcgaagaaccttaccaaggcttgacatcgtctgatgactctagagatagagagttcttcttcggaagacagatagacaggtggtgcatggctgtcgtcagctcgtgtcgtgagatgttgggttaagtcccgcaacgagcgcaacccttatcctatgttgccagcacgtaaaggtgggaactcatgggagactgccgtggataacacggaggaaggtggggatgacgtcaagtcatcatgccccttatgtcttgggctacacacgtactacaatgggcttaaatagagggtagcgaagccgcgaggtgaagccaaacccaaaaacaagctctcagttcggattgcaggctgcaactcgcctgcatgaagtcggaatcgctagtaatcgcagatcagcatgctgcggtgaatacgttcccgggccttgtacacaccgcccgtcacaccacgaaagttgagagcacccgaagccggtgaggtaaccagcaatggaaccagccgtcgaaggtgagatcagtgattggggtgaagtcgtaacaaggtagccgtatcggaaggtgcggctggatcacctccttt

SEQ ID NO: 1320 - DNA, 1550 bp, artificial sequence
  GCF_900086585.1_03475_Emergencia_timonensis
attggagagtttgatcctggctcaggatgaacgctggcggcgtgcctaatacatgcaagtcgagcgaatggattgagagcttgctctcaagaagttagcggcggacgggtgagtaacacgtgggtaacctgcccataagactgggataactccgggaaaccggggctaataccggataacattttgaactgcatggttcgaaattgaaaggcggcttcggctgtcacttatggatggacccgcgtcgcattagctagttggtgaggtaacggctcaccaaggcaacgatgcgtagccgacctgagagggtgatcggccacactgggactgagacacggcccagactcctacgggaggcagcagtagggaatcttccgcaatggacgaaagtctgacggagcaacgccgcgtgagtgatgaaggctttcgggtcgtaaaactctgttgttagggaagaacaagtgctagttgaataagctggcaccttgacggtacctaaccagaaagccacggctaactacgtgccagcagccgcggtaatacgtaggtggcaagcgttatccggaattattgggcgtaaagcgcgcgcaggtggtttcttaagtctgatgtgaaagcccacggctcaaccgtggagggtcattggaaactgggagacttgagtgcagaagaggaaagtggaattccatgtgtagcggtgaaatgcgtagagatatggaggaacaccagtggcgaaggcgactttctggtctgtaactgacactgaggcgcgaaagcgtggggagcaaacaggattagataccctggtagtccacgccgtaaacgatgagtgctaagtgttagagggtttccgccctttagtgctgaagttaacgcattaagcactccgcctggggagtacggccgcaaggctgaaactcaaaggaattgacgggggcccgcacaagcggtggagcatgtggtttaattcgaagcaacgcgaagaaccttaccaggtcttgacatcctctgaaaaccctagagatagggcttctccttcgggagcagagtgacaggtggtgcatggttgtcgtcagctcgtgtcgtgagatgttgggttaagtcccgcaacgagcgcaacccttgatcttagttgccatcattaagttgggcactctaaggtgactgccggtgacaaaccggaggaaggtggggatgacgtcaaatcatcatgccccttatgacctgggctacacacgtgctacaatggacggtacaaagagctgcaagaccgcgaggtggagctaatctcataaaaccgttctcagttcggattgtaggctgcaactcgcctacatgaagctggaatcgctagtaatcgcggatcagcatgccgcggtgaatacgttcccgggccttgtacacaccgcccgtcacaccacgagagtttgtaacacccgaagtcggtggggtaacctttttggagccagccgcctaaggtgggacagatgattggggtgaagtcgtaacaaggtagccgtatcggaaggtgcggctggatcacctccttt

SEQ ID NO: 1321 - DNA, 1509 bp, artificial sequence
  STR00387_Faecalibacterium_prausnitzii
tataaagagtttgatcctggctcaggacgaacgctggcggcgcgcctaacacatgcaagtcgaacgagcgagaggaggtttactttctcaagcgagtggcgaacgggtgagtaacgcgtgaggaacctgcctcaaagagggggacaacagttggaaacgactgctaataccgcataagcccacgacccggcatcgggtagagggaaaaggagcaatccgctttgagatggcctcgcgtccgattagctagttggtgaggtaatggcccaccaaggcgacgatcggtagccggactgagaggttgaacggccacattgggactgagacacggcccagactcctacgggaggcagcagtggggaatattgcacaatgggggaaaccctgatgcagcgacgccgcgtggaggaagaaggtcttcggattgtaaactcctgttgttgaggaagataatgacggtactcaacaaggaagtgacggctaactacgtgccagcagccgcggtaaaacgtaggtcacaagcgttgtccggaattactgggtgtaaagggagcgcaggcgggaagacaagttggaagtgaaatccatgggctcaacccatgaactgctttcaaaactgtttttcttgagtagtgcagaggtaggcggaattcccggtgtagcggtggaatgcgtagatatcgggaggaacaccagtggcgaaggcggcctactgggcaccaactgacgctgaggctcgaaagtgtgggtagcaaacaggattagataccctggtagtccacactgtaaacgatgattactaggtgttggaggattgaccccttcagtgccgcagttaacacaataagtaatccacctggggagtacgaccgcaaggttgaaactcaaaggaattgacgggggcccgcacaagcagtggagtatgtggtttaattcgacgcaacgcgaagaaccttaccaagtcttgacatcctgcgacggtgctggaaacagtactttccttcgggacgcagagacaggtggtgcatggttgtcgtcagctcgtgtcgtgagatgttgggttaagtcccgcaacgagcgcaacccttatggtcagttactacgcaagaggactctggccagactgccgttgacaaaacggaggaaggtggggatgacgtcaaatcatcatgccctttatgacttgggctacacacgtactacaatggcgttaaacaaagagaagcaagaccgcgaggtggagcaaaactcagaaacaacgtcccagttcggactgcaggctgcaactcgcctgcacgaagtcggaattgctagtaatcgcagatcagcatgctgcggtgaatacgttcccgggccttgtacacaccgcccgtcacaccatgagagccggggggacccgaagtcggtagtctaaccgcaaggaggacgccgccgaaggtaaaactggtgattggggtgaagtcgtaacaaggtagccgtaggagaacctgcggctggatcacctccttt

SEQ ID NO: 1322 - DNA, 1509 bp, artificial sequence
  STR01820_Faecalibacterium_prausnitzii
tataaagagtttgatcctggctcaggacgaacgctggcggcgcgcctaacacatgcaagtcgaacgagcgagagaaagcttactttctcaagcgagtggcgaacgggtgagtaacgcgtgaggaacctgcctcaaagagggggacaacagttggaaacgactgctaataccgcataagcccacgacccggcatcgggtagagggaaaaggagcaatccgctttgagatggcctcgcgtccgattagctagttggtgaggtaatggcccaccaaggcgacgatcggtagccggactgagaggttgaacggccacattgggactgagacacggcccagactcctacgggaggcagcagtggggaatattgcacaatgggggaaaccctgatgcagcgacgccgcgtggaggaagaaggtcttcggattgtaaactcctgttgttgaggaagataatgacggtactcaacaaggaagtgacggctaactacgtgccagcagccgcggtaaaacgtaggtcacaagcgttgtccggaattactgggtgtaaagggagcgcaggcgggaagacaagttggaagtgaaatccatgggctcaacccatgaactgctttcaaaactgtttttcttgagtagtgcagaggtaggcggaattcccggtgtagcggtggaatgcgtagatatcgggaggaacaccagtggcgaaggcggcctactgggcaccaactgacgctgaggctcgaaagtgtgggtagcaaacaggattagataccctggtagtccacactgtaaacgatgattactaggtgttggaggattgaccccttcagtgccgcagttaacacaataagtaatccacctggggagtacgaccgcaaggttgaaactcaaaggaattgacgggggcccgcacaagcagtggagtatgtggtttaattcgacgcaacgcgaagaaccttaccaagtcttgacatcctgcgacggtgctggaaacagtactttccttcgggacgcagagacaggtggtgcatggttgtcgtcagctcgtgtcgtgagatgttgggttaagtcccgcaacgagcgcaacccttatggtcagttactacgcaagaggactctggccagactgccgttgacaaaacggaggaaggtggggatgacgtcaaatcatcatgccctttatgacttgggctacacacgtactacaatggcgttaaacaaagagaagcaagaccgcgaggtggagcaaaactcagaaacaacgtcccagttcggactgcaggctgcaactcgcctgcacgaagtcggaattgctagtaatcgcagatcagcatgctgcggtgaatacgttcccgggccttgtacacaccgcccgtcacaccatgagagccggggggacccgaagtcggtagtctaaccgcaaggaggacgccgccgaaggtaaaactggtgattggggtgaagtcgtaacaaggtagccgtaggagaacctgcggctggatcacctccttt

SEQ ID NO: 1323 - DNA, 1278 bp, artificial sequence
  STR02185_Faecalibacterium_prausnitzii
ctcgcgtccgattagctagttggtgaggtaacggcccaccaaggcgacgatcggtagccggactgagaggttgaacggccacattgggactgagacacggcccagactcctacgggaggcagcagtggggaatattgcacaatgggggaaaccctgatgcagcgacgccgcgtggaggaagaaggtcttcggattgtaaactcctgttgttgaggaagataatgacggtactcaacaaggaagtgacggctaactacgtgccagcagccgcggtaaaacgtaggtcacaagcgttgtccggaattactgggtgtaaagggagcgcaggcgggaagacaagttggaagtgaaatccatgggctcaacccatgaactgctttcaaaactgtttttcttgagtagtgcagaggtaggcggaattcccggtgtagcggtggaatgcgtagatatcgggaggaacaccagtggcgaaggcggcctactgggcaccaactgacgctgaggctcgaaagtgtgggtagcaaacaggattagataccctggtagtccacactgtaaacgatgattactaggtgttggaggattgaccccttcagtgccgcagttaacacaataagtaatccacctggggagtacgaccgcaaggttgaaactcaaaggaattgacgggggcccgcacaagcagtggagtatgtggtttaattcgacgcaacgcgaagaaccttaccaagtcttgacatcctgcgacggtgctggaaacagtactttccttcgggacgcagagacaggtggtgcatggttgtcgtcagctcgtgtcgtgagatgttgggttaagtcccgcaacgagcgcaacccttatggtcagttactacgcaagaggactctggccagactgccgttgacaaaacggaggaaggtggggatgacgtcaaatcatcatgccctttatgacttgggctacacacgtactacaatggcgttaaacaaagagaagcaagaccgcgaggtggagcaaaactcagaaacaacgtcccagttcggactgcaggctgcaactcgcctgcacgaagtcggaattgctagtaatcgcagatcagcatgctgcggtgaatacgttcccgggccttgtacacaccgcccgtcacaccatgagagccggggggacccgaagtcggtagtctaaccgcaaggaggacgccgccgaaggtaaaactggtgattggggtgaagtcgtaacaaggtagccgtaggagaacctgcggctggatcacctccttt

SEQ ID NO: 1324 - DNA, 1509 bp, artificial sequence
  STR02189_Faecalibacterium_prausnitzii
tataaagagtttgatcctggctcaggacgaacgctggcggcgcgcctaacacatgcaagtcgaacgagcgagagggagtttactttctcgagcgagtggcgaacgggtgagtaacgcgtgaggaacctgcctcaaagagggggacaacagttggaaacgactgctaataccgcataagcccacgacccggcatcgggtagagggaaaaggagcaatccgctttgagatggcctcgcgtccgattagctagttggtgaggtaacggcccaccaaggcgacgatcggtagccggactgagaggttgaacggccacattgggactgagacacggcccagactcctacgggaggcagcagtggggaatattgcacaatgggggaaaccctgatgcagcgacgccgcgtggaggaagaaggtcttcggattgtaaactcctgttgttgaggaagataatgacggtactcaacaaggaagtgacggctaactacgtgccagcagccgcggtaaaacgtaggtcacaagcgttgtccggaattactgggtgtaaagggagcgcaggcgggaagacaagttggaagtgaaatccatgggctcaacccatgaactgctttcaaaactgtttttcttgagtagtgcagaggtaggcggaattcccggtgtagcggtggaatgcgtagatatcgggaggaacaccagtggcgaaggcggcctactgggcaccaactgacgctgaggctcgaaagtgtgggtagcaaacaggattagataccctggtagtccacactgtaaacgatgattactaggtgttggaggattgaccccttcagtgccgcagttaacacaataagtaatccacctggggagtacgaccgcaaggttgaaactcaaaggaattgacgggggcccgcacaagcagtggagtatgtggtttaattcgacgcaacgcgaagaaccttaccaagtcttgacatcctgcgacggtgctggaaacagtactttccttcgggacgcagagacaggtggtgcatggttgtcgtcagctcgtgtcgtgagatgttgggttaagtcccgcaacgagcgcaacccttatggtcagttactacgcaagaggactctggccagactgccgttgacaaaacggaggaaggtggggatgacgtcaaatcatcatgccctttatgacttgggctacacacgtactacaatggcgttaaacaaagagaagcaagaccgcgaggtggagcaaaactcagaaacaacgtcccagttcggactgcaggctgcaactcgcctgcacgaagtcggaattgctagtaatcgcagatcagcatgctgcggtgaatacgttcccgggccttgtacacaccgcccgtcacaccatgagagccggggggacccgaagtcggtagtctaaccgcaaggaggacgccgccgaaggtaaaactggtgattggggtgaagtcgtaacaaggtagccgtaggagaacctgcggctggatcacctccttt

SEQ ID NO: 1325 - DNA, 1509 bp, artificial sequence
  STR02383_Faecalibacterium_prausnitzii
tataaagagtttgatcctggctcaggacgaacgctggcggcgcgcctaacacatgcaagtcgaacgagcgagagagagcttgctttctcgagcgagtggcgaacgggtgagtaacgcgtgaggaacctgcctcaaagagggggacaacagttggaaacgactgctaataccgcataagcccacggctcggcatcgagcagagggaaaaggagcaatccgctttgagatggcctcgcgtccgattagctagttggtgaggtaacggcccaccaaggcgacgatcggtagccggactgagaggttgaacggccacattgggactgagacacggcccagactcctacgggaggcagcagtggggaatattgcacaatgggggaaaccctgatgcagcgacgccgcgtggaggaagaaggtcttcggattgtaaactcctgttgttgaggaagataatgacggtactcaacaaggaagtgacggctaactacgtgccagcagccgcggtaaaacgtaggtcacaagcgttgtccggaattactgggtgtaaagggagcgcaggcgggaagacaagttggaagtgaaatccatgggctcaacccatgaactgctttcaaaactgtttttcttgagtagtgcagaggtaggcggaattcccggtgtagcggtggaatgcgtagatatcgggaggaacaccagtggcgaaggcggcctactgggcaccaactgacgctgaggctcgaaagtgtgggtagcaaacaggattagataccctggtagtccacactgtaaacgatgattactaggtgttggaggattgaccccttcagtgccgcagttaacacaataagtaatccacctggggagtacgaccgcaaggttgaaactcaaaggaattgacgggggcccgcacaagcagtggagtatgtggtttaattcgacgcaacgcgaagaaccttaccaagtcttgacatcccttgacgatgctggaaacagtatttctcttcggagcaaggagacaggtggtgcatggttgtcgtcagctcgtgtcgtgagatgttgggttaagtcccgcaacgagcgcaacccttatggtcagttactacgcaagaggactctggccagactgccgttgacaaaacggaggaaggtggggatgacgtcaaatcatcatgccctttatgacttgggctacacacgtactacaatggcgttaaacaaagagaagcaagaccgcgaggtggagcaaaactcagaaacaacgtcccagttcggactgcaggctgcaactcgcctgcacgaagtcggaattgctagtaatcgcagatcagcatgctgcggtgaatacgttcccgggccttgtacacaccgcccgtcacaccatgagagccggggggacccgaagtcggtagtctaaccgcaaggaggacgccgccgaaggtaaaactggtgattggggtgaagtcgtaacaaggtagccgtaggagaacctgcggctggatcacctccttt

SEQ ID NO: 1326 - DNA, 1509 bp, artificial sequence; identical to SEQ ID NO: 1324
  STR02394_Faecalibacterium_prausnitzii

SEQ ID NO: 1327 - DNA, 1509 bp, artificial sequence
  STR02395_Faecalibacterium_prausnitzii
tataaagagtttgatcctggctcaggacgaacgctggcggcgcgcctaacacatgcaagtcgaacgagcgagagagagcttgctttctcgagcgagtggcgaacgggtgagtaacgcgtgaggaacctgcctcaaagagggggacaacagttggaaacgactgctaataccgcataagcccacgacccggcatcgggtagagggaaaaggagcaatccgctttgagatggcctcgcgtccgattagctagttggtgaggtaacggcccaccaaggcgacgatcggtagccggactgagaggttgaacggccacattgggactgagacacggcccagactcctacgggaggcagcagtggggaatattgcacaatgggggaaaccctgatgcagcgacgccgcgtggaggaagaaggtcttcggattgtaaactcctgttgttgaggaagataatgacggtactcaacaaggaagtgacggctaactacgtgccagcagccgcggtaaaacgtaggtcacaagcgttgtccggaattactgggtgtaaagggagcgcaggcgggaagacaagttggaagtgaaatccatgggctcaacccatgaactgctttcaaaactgtttttcttgagtagtgcagaggtaggcggaattcccggtgtagcggtggaatgcgtagatatcgggaggaacaccagtggcgaaggcggcctactgggcaccaactgacgctgaggctcgaaagtgtgggtagcaaacaggattagataccctggtagtccacactgtaaacgatgattactaggtgttggaggattgaccccttcagtgccgcagttaacacaataagtaatccacctggggagtacgaccgcaaggttgaaactcaaaggaattgacgggggcccgcacaagcagtggagtatgtggtttaattcgacgcaacgcgaagaaccttaccaagtcttgacatcctgcgacggtgctggaaacagtactttccttcgggacgcagagacaggtggtgcatggttgtcgtcagctcgtgtcgtgagatgttgggttaagtcccgcaacgagcgcaacccttatggtcagttactacgcaagaggactctggccagactgccgttgacaaaacggaggaaggtggggatgacgtcaaatcatcatgccctttatgacttgggctacacacgtactacaatggcgttaaacaaagagaagcaagaccgcgaggtggagcaaaactcagaaacaacgtcccagttcggactgcaggctgcaactcgcctgcacgaagtcggaattgctagtaatcgcagatcagcatgctgcggtgaatacgttcccgggccttgtacacaccgcccgtcacaccatgagagccggggggacccgaagtcggtagtctaaccgcaaggaggacgccgccgaaggtaaaactggtgattggggtgaagtcgtaacaaggtagccgtaggagaacctgcggctggatcacctccttt

SEQ ID NO: 1328 - DNA, 1538 bp, artificial sequence
  GCF_000154385.1_00083_Faecalibacterium_prausnitzii
ttgaagagtttgatcatggctcagattgaacgctggcggcaggcctaacacatgcaagtcgaacggtaacaggaatcagcttgctgattcgctgacgagtggcggacgggtgagtaatgtctgggaaactgcctgatggagggggataactactggaaacggtagctaataccgcataacgtcgcaagaccaaagagggggaccttcgggcctcttgccatcggatgtgcccagatgggattagctagtaggtggggtaacggctcacctaggcgacgatccctagctggtctgagaggatgaccagccacactggaactgagacacggtccagactcctacgggaggcagcagtggggaatattgcacaatgggcgcaagcctgatgcagccatgccgcgtgtatgaagaaggccttcgggttgtaaagtactttcagcggggaggaagggagtaaagttaatacctttgctcattgacgttacccgcagaagaagcaccggctaactccgtgccagcagccgcggtaatacggagggtgcaagcgttaatcggaattactgggcgtaaagcgcacgcaggcggtttgttaagtcagatgtgaaatccccgggctcaacctgggaactgcatctgatactggcaagcttgagtctcgtagaggggggtagaattccaggtgtagcggtgaaatgcgtagagatctggaggaataccggtggcgaaggcggccccctggacgaagactgacgctcaggtgcgaaagcgtggggagcaaacaggattagataccctggtagtccacgccgtaaacgatgtcgacttggaggttgtgcccttgaggcgtggcttccggagctaacgcgttaagtcgaccgcctggggagtacggccgcaaggttaaaactcaaatgaattgacgggggcccgcacaagcggtggagcatgtggtttaattcgatgcaacgcgaagaaccttacctggtcttgacatccacggaagttttcagagatgagaatgtgccttcgggaaccgtgagacaggtgctgcatggctgtcgtcagctcgtgttgtgaaatgttgggttaagtcccgcaacgagcgcaacccttatcctttgttgccagcggtccggccgggaactcaaaggagactgccagtgataaactggaggaaggtggggatgacgtcaagtcatcatggcccttacgaccagggctacacacgtgctacaatggcgcatacaaagagaagcgacctcgcgagagcaagcggacctcataaagtgcgtcgtagtccggattggagtctgcaactcgactccatgaagtcggaatcgctagtaatcgtggatcagaatgccacggtgaatacgttcccgggccttgtacacaccgcccgtcacaccatgggagtgggttgcaaaagaagtaggtagcttaaccttcgggagggcgcttaccactttgtgattcatgactggggtgaagtcgtaacaaggtaaccgtaggggaacctgcggttggatcacctcctt

SEQ ID NO: 1329 - DNA, 1453 bp, artificial sequence
  GCF_000154385.1_01556_Faecalibacterium_prausnitzii
gctttgctgacgagtggcggacgggtgagtaatgtctgggaaactgcctgatggagggggataactactggaaacggtagctaataccgcataacgtcgcaagaccaaagagggggaccttcgggcctcttgccatcggatgtgcccagatgggattagctagtaggtggggtaacggctcacctaggcgacgatccctagctggtctgagaggatgaccagccacactggaactgagacacggtccagactcctacgggaggcagcagtggggaatattgcacaatgggcgcaagcctgatgcagccatgccgcgtgtatgaagaaggccttcgggttgtaaagtactttcagcggggaggaagggagtaaagttaatacctttgctcattgacgttacccgcagaagaagcaccggctaactccgtgccagcagccgcggtaatacggagggtgcaagcgttaatcggaattactgggcgtaaagcgcacgcaggcggtttgttaagtcagatgtgaaatccccgggctcaacctgggaactgcatctgatactggcaagcttgagtctcgtagaggggggtagaattccaggtgtagcggtgaaatgcgtagagatctggaggaataccggtggcgaaggcggccccctggacgaagactgacgctcaggtgcgaaagcgtggggagcaaacaggattagataccctggtagtccacgccgtaaacgatgtcgacttggaggttgtgcccttgaggcgtggcttccggagctaacgcgttaagtcgaccgcctggggagtacggccgcaaggttaaaactcaaatgaattgacgggggcccgcacaagcggtggagcatgtggtttaattcgatgcaacgcgaagaaccttacctggtcttgacatccacagaactttccagagatggattggtgccttcgggaactgtgagacaggtgctgcatggctgtcgtcagctcgtgttgtgaaatgttgggttaagtcccgcaacgagcgcaacccttatcctttgttgccagcggtccggccgggaactcaaaggagactgccagtgataaactggaggaaggtggggatgacgtcaagtcatcatggcccttacgaccagggctacacacgtgctacaatggcgcatacaaagagaagcgacctcgcgagagcaagcggacctcataaagtgcgtcgtagtccggattggagtctgcaactcgactccatgaagtcggaatcgctagtaatcgtggatcagaatgccacggtgaatacgttcccgggccttgtacacaccgcccgtcacaccatgggagtgggttgcaaaagaagtaggtagcttaaccttcgggagggcgcttaccactttgtgattcatgactggggtgaagtcgtaacaaggtaaccgtaggggaacctgcggttggatcacctcctt

SEQ ID NO: 1330 - DNA, 1538 bp, artificial sequence
  GCF_000154385.1_01788_Faecalibacterium_prausnitzii
ttgaagagtttgatcatggctcagattgaacgctggcggcaggcctaacacatgcaagtcgaacggtaacaggaatcagcttgctgattcgctgacgagtggcggacgggtgagtaatgtctgggaaactgcctgatggagggggataactactggaaacggtagctaataccgcataacgtcgcaagaccaaagagggggaccttcgggcctcttgccatcggatgtgcccagatgggattagctagtaggtggggtaacggctcacctaggcgacgatccctagctggtctgagaggatgaccagccacactggaactgagacacggtccagactcctacgggaggcagcagtggggaatattgcacaatgggcgcaagcctgatgcagccatgccgcgtgtatgaagaaggccttcgggttgtaaagtactttcagcggggaggaagggagtaaagttaatacctttgctcattgacgttacccgcagaagaagcaccggctaactccgtgccagcagccgcggtaatacggagggtgcaagcgttaatcggaattactgggcgtaaagcgcacgcaggcggtttgttaagtcagatgtgaaatccccgggctcaacctgggaactgcatctgatactggcaagcttgagtctcgtagaggggggtagaattccaggtgtagcggtgaaatgcgtagagatctggaggaataccggtggcgaaggcggccccctggacgaagactgacgctcaggtgcgaaagcgtggggagcaaacaggattagataccctggtagtccacgccgtaaacgatgtcgacttggaggttgtgcccttgaggcgtggcttccggagctaacgcgttaagtcgaccgcctggggagtacggccgcaaggttaaaactcaaatgaattgacgggggcccgcacaagcggtggagcatgtggtttaattcgatgcaacgcgaagaaccttacctggtcttgacatccacagaactttccagagatggattggtgccttcgggaactgtgagacaggtgctgcatggctgtcgtcagctcgtgttgtgaaatgttgggttaagtcccgcaacgagcgcaacccttatcctttgttgccagcggtccggccgggaactcaaaggagactgccagtgataaactggaggaaggtggggatgacgtcaagtcatcatggcccttacgaccagggctacacacgtgctacaatggcgcatacaaagagaagcgacctcgcgagagcaagcggacctcataaagtgcgtcgtagtccggattggagtctgcaactcgactccatgaagtcggaatcgctagtaatcgtggatcagaatgccacggtgaatacgttcccgggccttgtacacaccgcccgtcacaccatgggagtgggttgcaaaagaagtaggtagcttaaccttcgggagggcgcttaccactttgtgattcatgactggggtgaagtcgtaacaaggtaaccgtaggggaacctgcggttggatcacctcctt

SEQ ID NO: 1331 - DNA, 1536 bp, artificial sequence
  GCF_000154385.1_02359_Faecalibacterium_prausnitzii
tgaagagtttgatcatggctcagattgaacgctggtggcaggcttaacacatgcaagtcgaacggtaacgggttgaaagcttgctttcgacgctgacgagtggcggacgggtgagtaatgcttgggaatctggcttatggagggggataaccattggaaacgatggctaataccgcatagaatcggaagattaaagggtgggactttttgccacctgccataagatgagcccaagtgggattaggtagttggtggggtaaaggcctaccaagcctgcgatctctagctggtctgagaggatggctagccacactgggactgagacacggcccagactcctacgggaggcagcagtggggaatattgcgcaatggggggaaccctgacgcagccatgccgcgtgaatgaagaaggccttcgggttgtaaagttctttcagtggtgaggaaggttggtgtgttaatagcacactgatttgacgttagccacagaagaagcaccggctaactccgtgccagcagccgcggtaatacggagggtgcgagcgttaatcggaataactgggcgtaaagggcacgcaggcggtaaattaagtgagatgtgaaatccccgagcttaacttgggaattgcatttcagactggtttactagagtactttagggaggggtagaattccacgtgtagcggtgaaatgcgtagagatgtggaggaataccgaaggcgaaggcagccccttgggaagctactgacgctcatgtgcgaaagcgtggggagcaaacaggattagataccctggtagtccacgctgtaaacgctgtcgatttggggattgggctttaggcttggtgcccgtagctaacgtgataaatcgaccgcctggggagtacggccgcaaggttaaaactcaaatgaattgacgggggcccgcacaagcggtggagcatgtggtttaattcgatgcaacgcgaagaaccttacctactcttgacatcctaagaagaactcagagatgagtttgtgccttcgggagcttagagacaggtgctgcatggctgtcgtcagctcgtgttgtgaaatgttgggttaagtcccgcaacgagcgcaacccttatcctttgttgccagcacttcgggtgggaactcaaaggagactgccagtgataaactggaggaaggtggggatgacgtcaagtcatcatggcccttacgagtagggctacacacgtgctacaatggtgcatacagagggaagcgagcctgcgagggggagcgaatctcagaaagtgcatctaagtccggattggagtctgcaactcgactccatgaagtcggaatcgctagtaatcgcaaatcagaatgttgcggtgaatacgttctcgggccttgtacacaccgcccgtcacaccatgggagtgggttgtaccagaagtagatagcttaaccttcgggagggcgtttaccacggtataattcatgactggggtgaagtcgtaacaaggtaaccgtaggggaacctgcggttggatcacctcctt

SEQ ID NO: 1332 - DNA, 1536 bp, artificial sequence
  GCF_000154385.1_02612_Faecalibacterium_prausnitzii
tgaagagtttgatcatggctcagattgaacgctggcggcaggcttaacacatgcaagtcgaacggtaacgggttgaaagcttgctttcgacgctgacgagtggcggacgggtgagtaatgcttgggaatctggcttatggagggggataaccattggaaacgatggctaataccgcatagaatcggaagattaaagggtgggactttttgccacctgccataagatgagcccaagtgggattaggtagttggtggggtaaaggcctaccaagcctgcgatctctagctggtctgagaggatggccagccacactgggactgagacacggcccagactcctacgggaggcagcagtggggaatattgcgcaatggggggaaccctgacgcagccatgccgcgtgaatgaagaaggccttcgggttgtaaagttctttcagtggtgaggaaggttggtgtgttaatagcacactgatttgacgttagccacagaagaagcaccggctaactccgtgccagcagccgcggtaatacggagggtgcgagcgttaatcggaataactgggcgtaaagggcacgcaggcggtaaattaagtgagatgtgaaatccccgagcttaacttgggaattgcatttcagactggtttactagagtactttagggaggggtagaattccacgtgtagcggtgaaatgcgtagagatgtggaggaataccgaaggcgaaggcagccccttgggaagctactgacgctcatgtgcgaaagcgtggggagcaaacaggattagataccctggtagtccacgctgtaaacgctgtcgatttggggattgggctttaggcttggtgcccgtagctaacgtgataaatcgaccgcctggggagtacggccgcaaggttaaaactcaaatgaattgacgggggcccgcacaagcggtggagcatgtggtttaattcgatgcaacgcgaagaaccttacctactcttgacatcctaagaagaactcagagatgagtttgtgccttcgggagcttagagacaggtgctgcatggctgtcgtcagctcgtgttgtgaaatgttgggttaagtcccgcaacgagcgcaacccttatcctttgttgccagcacttcgggtgggaactcaaaggagactgccagtgataaactggaggaaggtggggatgacgtcaagtcatcatggcccttacgagtagggctacacacgtgctacaatggtgcatacagagggaagcgagcctgcgagggggagcgaatctcagaaagtgcatctaagtccggattggagtctgcaactcgactccatgaagtcggaatcgctagtaatcgcaaatcagaatgttgcggtgaatacgttctcgggccttgtacacaccgcccgtcacaccatgggagtgggttgtaccagaagtagatagcttaaccttcgggagggcgtttaccacggtatgattcatgactggggtgaagtcgtaacaaggtaaccgtaggggaacctgcggttggatcacctcctt

SEQ ID NO: 1333 - DNA, 1536 bp, artificial sequence
  GCF_000154385.1_02916_Faecalibacterium_prausnitzii
tgaagagtttgatcatggctcagattgaacgctggcggcaggcttaacacatgcaagtcgaacggtaacgggttgaaagcttgctttcgatgctgacgagtggcggacgggtgagtaatgcttgggaatctggcttatggagggggataaccattggaaacgatggctaataccgcatagaatcggaagattaaagggtgggactttttgccacctgccataagatgagcccaagtgggattaggtagttggtgaggtaaaggcctaccaagcctgcgatctctagctggtctgagaggatggccagccacactgggactgagacacggcccagactcctacgggaggcagcagtggggaatattgcgcaatggggggaaccctgacgcagccatgccgcgtgaatgaagaaggccttcgggttgtaaagttctttcggtggtgaggaaggttggtgtgttaatagcacactgatttgacgttagccacagaagaagcaccggctaactccgtgccagcagccgcggtaatacggagggtgcgagcgttaatcggaataactgggcgtaaagggcacgcaggcggtaaattaagtgagatgtgaaatccccgagcttaacttgggaattgcatttcagactggtttactagagtactttagggaggggtagaattccacgtgtagcggtgaaatgcgtagagatgtggaggaataccgaaggcgaaggcagccccttgggaagctactgacgctcatgtgcgaaagcgtggggagcaaacaggattagataccctggtagtccacgctgtaaacgctgtcgatttggggattgggctttaggcttggtgcccgtagctaacgtgataaatcgaccgcctggggagtacggccgcaaggttaaaactcaaatgaattgacgggggcccgcacaagcggtggagcatgtggtttaattcgatgcaacgcgaagaaccttacctactcttgacatcctaagaagaactcagagatgagtttgtgccttcgggaacttagagacaggtgctgcatggctgtcgtcagctcgtgttgtgaaatgttgggttaagtcccgcaacgagcgcaacccttatcctttgttgccagcacttcgggtgggaactcaaaggagactgccagtgataaactggaggaaggtggggatgacgtcaagtcatcatggcccttacgagtagggctacacacgtgctacaatggtgcatacagagggaagcgagcctgcgagggggagcgaatctcagaaagtgcatctaagtccggattggagtctgcaactcgactccatgaagtcggaatcgctagtaatcgcaaatcagaatgttgcggtgaatacgttcccgggccttgtacacaccgcccgtcacaccatgggagtgggttgtaccagaagtagatagcttaaccttcgggagggcgtttaccacggtatgattcatgactggggtgaagtcgtaacaaggtaaccgtaggggaacctgcggttggatcacctcctt

SEQ ID NO: 1334 - DNA, 1532 bp, artificial sequence; identical to SEQ ID NO: 857
  GCF_001406255.1_02822_Faecalibacterium_prausnitzii

SEQ ID NO: 1335 - DNA, 1538 bp, artificial sequence
  GCF_002549945.1_01724_Faecalibacterium_prausnitzii
ttgaagagtttgatcatggctcagattgaacgctggcggcaggcctaacacatgcaagtcgaacggtaacaggaagaagcttgcttctttgctgacgagtggcggacgggtgagtaatgtctgggaaactgcctgatggagggggataactactggaaacggtagctaataccgcataacgtcgcaagaccaaagagggggaccttcgggcctcttgccatcggatgtgcccagatgggattagctagtaggtggggtaacggctcacctaggcgacgatccctagctggtctgagaggatgaccagccacactggaactgagacacggtccagactcctacgggaggcagcagtggggaatattgcacaatgggcgcaagcctgatgcagccatgccgcgtgtatgaagaaggccttcgggttgtaaagtactttcagcggggaggaagggagtaaagttaatacctttgctcattgacgttacccgcagaagaagcaccggctaactccgtgccagcagccgcggtaatacggagggtgcaagcgttaatcggaattactgggcgtaaagcgcacgcaggcggtttgttaagtcagatgtgaaatccccgggctcaacctgggaactgcatctgatactggcaagcttgagtctcgtagaggggggtagaattccaggtgtagcggtgaaatgcgtagagatctggaggaataccggtggcgaaggcggccccctggacgaagactgacgctcaggtgcgaaagcgtggggagcaaacaggattagataccctggtagtccacgccgtaaacgatgtcgacttggaggttgtgcccttgaggcgtggcttccggagctaacgcgttaagtcgaccgcctggggagtacggccgcaaggttaaaactcaaatgaattgacgggggcccgcacaagcggtggagcatgtggtttaattcgatgcaacgcgaagaaccttacctggtcttgacatccacagaactttccagagatggattggtgccttcgggaactgtgagacaggtgctgcatggctgtcgtcagctcgtgttgtgaaatgttgggttaagtcccgcaacgagcgcaacccttatcctttgttgccagcggtccggccgggaactcaaaggagactgccagtgataaactggaggaaggtggggatgacgtcaagtcatcatggcccttacgaccagggctacacacgtgctacaatggcgcatacaaagagaagcgacctcgcgagagcaagcggacctcataaagtgcgtcgtagtccggattggagtctgcaactcgactccatgaagtcggaatcgctagtaatcgtggatcagaatgccacggtgaatacgttcccgggccttgtacacaccgcccgtcacaccatgggagtgggttgcaaaagaagtaggtagcttaaccttcgggagggcgcttaccactttgtgattcatgactggggtgaagtcgtaacaaggtaaccgtaggggaacctgcggttggatcacctcctt

SEQ ID NO: 1336 - DNA, 1560 bp, artificial sequence
  GCF_002550015.1_00853_Faecalibacterium_prausnitzii
ttggagagtttgatcctggctcaggacgaacgctggcggcgtgcttaacacatgcaagtcgaacggtgaagcgccttcctttgtggtgggtgtggatgagtggcgaacgggtgagtaacacgtgagtaacctgcccccttcttctggataaccgcatgaaagtgtggctaatacgggatattctgggtctgtcgcatggtgggcctgggaaagattgcgccttttgggtgtttttggtgggggatgggctcgcggcctatcagcttgttggtggggtgatggcctaccaaggcggtgacgggtagccggcctgagagggtggacggtcacactgggactgagacacggcccagactcctacgggaggcagcagtggggaatattgcacaatgggcgcaagcctgatgcagcgacgccgcgtgagggatggaggccttcgggttgtgaacctctttcgccagtgaagcaggcctgctcctgtgtgggtgggttgacggtagctggataagaagcgccggctaactacgtgccagcagccgcggtaatacgtagggcgcgagcgttgtccggaattattgggcgtaaagagctcgtaggcggctggtcgcgtctgtcgtgaaatcctctggcttaactgggggcttgcggtgggtacgggccggcttgagtgcggtaggggaggctggaactcctggtgtagcggtggaatgcgcagatatcaggaagaacaccggtggcgaaggcgggtctctgggccgttactgacgctgaggagcgaaagcgtggggagcgaacaggattagataccctggtagtccacgccgtaaacgttgggcactaggtgtggggggccttttccgggttttccgcgccgtagctaacgcattaagtgccccgcctggggagtacggccgcaaggctaaaactcaaaggaattgacgggggcccgcacaagcggcggagcatgcggattaattcgatgcaacgcgaagaaccttaccaaggcttgacatgtgccggatggctccggagacggggtttcctctcctttgtggggggctggttcacaggtggtgcatggttgtcgtcagctcgtgtcgtgagatgttgggttaagtcccgcaacgagcgcaacccttgtctcgtgttgccagcacgttgtggtggggactcgcgggagactgccggggtcaactcggaggaaggtggggatgacgtcaaatcatcatgccccttatgtcttgggcttcacgcatgctacaatggccggtacagagggctgcgatgccgtgaggtggagcgaatcccttaaagccggtctcagttcggatcggtgtctgcaactcgacaccgtgaagttggagtcgctagtaatcgcagatcagcaacgctgcggtgaatacgttctcgggccttgtacacaccgcccgtcacgtcatgaaagtcggcaacacccgaagcccgtggccctacggggagcggtcgaaggtggggctggtgattgggacgaagtcgtaacaaggtagccgtaccggaaggtgcggctggatcacctccttt

SEQ ID NO: 1337 - DNA, 1536 bp, artificial sequence
  GCF_003287405.1_02265_Faecalibacterium_prausnitzii
ttgaagagtttgatcatggctcagattgaacgctggcggcaggcttaacacatgcaagtcgaacggtagcaggagaaagcttgctttcttgctgacgagtggcggacgggtgagtaatgcttgggaatctggcttatggagggggataacgacgggaaactgtcgctaataccgcgtagtgtcgagagacgaaagtgcgggactgagaggccgcatgccataggatgagcccaagtgggattaggtagttggtggggtaaaggcctaccaagcctgcgatctctagctggtctgagaggatgaccagccacactggaactgagacacggtccagactcctacgggaggcagcagtggggaatattgcgcaatggggggaaccctgacgcagccatgccgcgtgaatgaagaaggccttcgggttgtaaagttctttcggtattgaggaaggttgatgtgttaatagcacatcaaattgacgttaaatacagaagaagcaccggctaactccgtgccagcagccgcggtaatacggagggtgcgagcgttaatcggaataactgggcgtaaagggcacgcaggcggttatttaagtgaggtgtgaaagccccgggcttaacctgggaattgcatttcagactgggtaactagagtactttagggaggggtagaattccacgtgtagcggtgaaatgcgtagagatgtggaggaataccgaaggcgaaggcagccccttgggaatgtactgacgctcatgtgcgaaagcgtggggagcaaacaggattagataccctggtagtccacgctgtaaacgctgtcgatttgggggttggggtttaactctggcgcccgtagctaacgtgataaatcgaccgcctggggagtacggccgcaaggttaaaactcaaatgaattgacgggggcccgcacaagcggtggagcatgtggtttaattcgatgcaacgcgaagaaccttacctactcttgacatcctaagaagagctcagagatgagcttgtgccttcgggaacttagagacaggtgctgcatggctgtcgtcagctcgtgttgtgaaatgttgggttaagtcccgcaacgagcgcaacccttatcctttgttgccagcgacttggtcgggaactcaaaggagactgccagtgataaactggaggaaggtggggatgacgtcaagtcatcatggcccttacgagtagggctacacacgtgctacaatggcgtatacagagggaggcgaagctgcgaggtggagcgaatctcataaagtacgtctaagtccggattggagtctgcaactcgactccatgaagtcggaatcgctagtaatcgcgaatcagaatgtcgcggtgaatacgttcccgggccttgtacacaccgcccgtcacaccatgggagtgggttgtaccagaagtagatagcttaacctttaggagggcgtttaccacggtatgattcatgactggggtgaagtcgtaacaaggtaaccgtaggggaacctgcggttggatcacctcctt

SEQ ID NO: 1338 - DNA, 1536 bp, artificial sequence
  GCF_003287475.1_02286_Faecalibacterium_prausnitzii
ttgaagagtttgatcatggctcagattgaacgctggcggcaggcttaacacatgcaagtcgaacggtagcaggagaaagcttgctttcttgctgacgagtggcggacgggtgagtaatgcttgggaatctggcttatggagggggataacgacgggaaactgtcgctaataccgcgtagtgtcgagagacgaaagtgcgggactgagaggccgcatgccataggatgagcccaagtgggattaggtagttggtggggtaaaggcctaccaagcctgcgatctctagctggtctgagaggatgaccagccacactggaactgagacacggtccagactcctacgggaggcagcagtggggaatattgcgcaatggggggaaccctgacgcagccatgccgcgtgaatgaagaaggccttcgggttgtaaagttctttcggtattgaggaaggttgatgtgttaatagcacatcaaattgacgttaaatacagaagaagcaccggctaactccgtgccagcagccgcggtaatacggagggtgcgagcgttaatcggaataactgggcgtaaagggcacgcaggcggttatttaagtgaggtgtgaaagccccgggcttaacctgggaattgcatttcagactgggtaactagagtactttagggaggggtagaattccacgtgtagcggtgaaatgcgtagagatgtggaggaataccgaaggcgaaggcagccccttgggaatgtactgacgctcatgtgcgaaagcgtggggagcaaacaggattagataccctggtagtccacgctgtaaacgctgtcgatttggggattgggcttagagcttggtgcccgtagctaacgtgataaatcgaccgcctggggagtacggccgcaaggttaaaactcaaatgaattgacgggggcccgcacaagcggtggagcatgtggtttaattcgatgcaacgcgaagaaccttacctactcttgacatcctaagaagagctcagagatgagcttgtgccttcgggaacttagagacaggtgctgcatggctgtcgtcagctcgtgttgtgaaatgttgggttaagtcccgcaacgagcgcaacccttatcctttgttgccagcgattaggtcgggaactcaaaggagactgccagtgataaactggaggaaggtggggatgacgtcaagtcatcatggcccttacgagtagggctacacacgtgctacaatggcgtatacagagggaagcgaagctgcgaggtggagcgaatctcataaagtacgtctaagtccggattggagtctgcaactcgactccatgaagtcggaatcgctagtaatcgcgaatcagaatgtcgcggtgaatacgttcccgggccttgtacacaccgcccgtcacaccatgggagtgggttgtaccagaagtagatagcttaaccttttggagggcgtttaccacggtatgattcatgactggggtgaagtcgtaacaaggtaaccgtaggggaacctgcggttggatcacctcctt

SEQ ID NO: 1339 - DNA, 1536 bp, artificial sequence
  GCF_003312465.1_00770_Faecalibacterium_prausnitzii
ttgaagagtttgatcatggctcagattgaacgctggcggcaggcctaacacatgcaagtcgagcggtagcacagagagcttgctctcgggtgacgagcggcggacgggtgagtaatgtctgggaaactgcctgatggagggggataactactggaaacggtagctaataccgcataacgtcgcaagaccaaagtgggggaccttcgggcctcatgccatcagatgtgcccagatgggattagctggtaggtggggtaacggctcacctaggcgacgatccctagctggtctgagaggatgaccagccacactggaactgagacacggtccagactcctacgggaggcagcagtggggaatattgcacaatgggcgcaagcctgatgcagccatgccgcgtgtgtgaagaaggccttcgggttgtaaagcactttcagcggggaggaaggcggtgaggttaataacctcaccgattgacgttacccgcagaagaagcaccggctaactccgtgccagcagccgcggtaatacggagggtgcaagcgttaatcggaattactgggcgtaaagcgcacgcaggcggtctgtcaagtcggatgtgaaatccccgggctcaacctgggaactgcattcgaaactggcaggctagagtcttgtagaggggggtagaattccaggtgtagcggtgaaatgcgtagagatctggaggaataccggtggcgaaggcggccccctggacaaagactgacgctcaggtgcgaaagcgtggggagcaaacaggattagataccctggtagtccacgctgtaaacgatgtcgatttggaggttgtgcccttgaggcgtggcttccggagctaacgcgttaaatcgaccgcctggggagtacggccgcaaggttaaaactcaaatgaattgacgggggcccgcacaagcggtggagcatgtggtttaattcgatgcaacgcgaagaaccttacctggtcttgacatccacagaactttccagagatggattggtgccttcgggaactgtgagacaggtgctgcatggctgtcgtcagctcgtgttgtgaaatgttgggttaagtcccgcaacgagcgcaacccttatcctttgttgccagcggtccggccgggaactcaaaggagactgccagtgataaactggaggaaggtggggatgacgtcaagtcatcatggcccttacgaccagggctacacacgtgctacaatggcatatacaaagagaagcgacctcgcgagagcaagcggacctcataaagtatgtcgtagtccggattggagtctgcaactcgactccatgaagtcggaatcgctagtaatcgtagatcagaatgctacggtgaatacgttcccgggccttgtacacaccgcccgtcacaccatgggagtgggttgcaaaagaagtaggtagcttaaccttcgggagggcgcttaccactttgtgattcatgactggggtgaagtcgtaacaaggtaaccgtaggggaacctgcggttggatcacctcctt

SEQ ID NO: 1340 - DNA, 1536 bp, artificial sequence
  GCF_003312465.1_01491_Faecalibacterium_prausnitzii
ttgaagagtttgatcatggctcagattgaacgctggcggcaggcctaacacatgcaagtcgagcggtagcacagagagcttgctctcgggtgacgagcggcggacgggtgagtaatgtctgggaaactgcctgatggagggggataactactggaaacggtagctaataccgcataacgtcgcaagaccaaagtgggggaccttcgggcctcatgccatcagatgtgcccagatgggattagctagtaggtggggtaacggctcacctaggcgacgatccctagctggtctgagaggatgaccagccacactggaactgagacacggtccagactcctacgggaggcagcagtggggaatattgcacaatgggcgcaagcctgatgcagccatgccgcgtgtgtgaagaaggccttcgggttgtaaagcactttcagcggggaggaaggcgataaggttaataaccttgtcgattgacgttacccgcagaagaagcaccggctaactccgtgccagcagccgcggtaatacggagggtgcaagcgttaatcggaattactgggcgtaaagcgcacgcaggcggtctgtcaagtcggatgtgaaatccccgggctcaacctgggaactgcattcgaaactggcaggctagagtcttgtagaggggggtagaattccaggtgtagcggtgaaatgcgtagagatctggaggaataccggtggcgaaggcggccccctggacaaagactgacgctcaggtgcgaaagcgtggggagcaaacaggattagataccctggtagtccacgctgtaaacgatgtcgatttggaggttgtgcccttgaggcgtggcttccggagctaacgcgttaaatcgaccgcctggggagtacggccgcaaggttaaaactcaaatgaattgacgggggcccgcacaagcggtggagcatgtggtttaattcgatgcaacgcgaagaaccttacctggtcttgacatccacagaactttccagagatggattggtgccttcgggaactgtgagacaggtgctgcatggctgtcgtcagctcgtgttgtgaaatgttgggttaagtcccgcaacgagcgcaacccttatcctttgttgccagcggttaggccgggaactcaaaggagactgccagtgataaactggaggaaggtggggatgacgtcaagtcatcatggcccttacgaccagggctacacacgtgctacaatggcatatacaaagagaagcgacctcgcgagagcaagcggacctcataaagtatgtcgtagtccggattggagtctgcaactcgactccatgaagtcggaatcgctagtaatcgtagatcagaatgctacggtgaatacgttcccgggccttgtacacaccgcccgtcacaccatgggagtgggttgcaaaagaagtaggtagcttaaccttcgggagggcgcttaccactttgtgattcatgactggggtgaagtcgtaacaaggtaaccgtaggggaacctgcggttggatcacctcctt

SEQ ID NO: 1341 - DNA, 1536 bp, artificial sequence
  GCF_003312465.1_02018_Faecalibacterium_prausnitzii
ttgaagagtttgatcatggctcagattgaacgctggcggcaggcctaacacatgcaagtcgagcggtagcacagagagcttgctctcgggtgacgagcggcggacgggtgagtaatgtctgggaaactgcctgatggagggggataactactggaaacggtagctaataccgcataacgtcgcaagaccaaagtgggggaccttcgggcctcatgccatcagatgtgcccagatgggattagctagtaggtggggtaacggctcacctaggcgacgatccctagctggtctgagaggatgaccagccacactggaactgagacacggtccagactcctacgggaggcagcagtggggaatattgcacaatgggcgcaagcctgatgcagccatgccgcgtgtgtgaagaaggccttcgggttgtaaagcactttcagcggggaggaaggcggtgaggttaataacctcaccgattgacgttacccgcagaagaagcaccggctaactccgtgccagcagccgcggtaatacggagggtgcaagcgttaatcggaattactgggcgtaaagcgcacgcaggcggtctgtcaagtcggatgtgaaatccccgggctcaacctgggaactgcattcgaaactggcaggctagagtcttgtagaggggggtagaattccaggtgtagcggtgaaatgcgtagagatctggaggaataccggtggcgaaggcggccccctggacaaagactgacgctcaggtgcgaaagcgtggggagcaaacaggattagataccctggtagtccacgctgtaaacgatgtcgatttggaggttgtgcccttgaggcgtggcttccggagctaacgcgttaaatcgaccgcctggggagtacggccgcaaggttaaaactcaaatgaattgacgggggcccgcacaagcggtggagcatgtggtttaattcgatgcaacgcgaagaaccttacctggtcttgacatccacagaactttccagagatggattggtgccttcgggaactgtgagacaggtgctgcatggctgtcgtcagctcgtgttgtgaaatgttgggttaagtcccgcaacgagcgcaacccttatcctttgttgccagcggtccggccgggaactcaaaggagactgccagtgataaactggaggaaggtggggatgacgtcaagtcatcatggcccttacgaccagggctacacacgtgctacaatggcatatacaaagagaagcgacctcgcgagagcaagcggacctcataaagtatgtcgtagtccggattggagtctgcaactcgactccatgaagtcggaatcgctagtaatcgtagatcagaatgctacggtgaatacgttcccgggccttgtacacaccgcccgtcacaccatgggagtgggttgcaaaagaagtaggtagcttaaccttcgggagggcgcttaccactttgtgattcatgactggggtgaagtcgtaacaaggtaaccgtaggggaacctgcggttggatcacctcctt

SEQ ID NO: 1342 - DNA, 1536 bp, artificial sequence
  GCF_003312465.1_02528_Faecalibacterium_prausnitzii
ttgaagagtttgatcatggctcagattgaacgctggcggcaggcctaacacatgcaagtcgagcggtagcacagagagcttgctctcgggtgacgagcggcggacgggtgagtaatgtctgggaaactgcctgatggagggggataactactggaaacggtagctaataccgcataacgtcgcaagaccaaagtgggggaccttcgggcctcatgccatcagatgtgcccagatgggattagctggtaggtggggtaacggctcacctaggcgacgatccctagctggtctgagaggatgaccagccacactggaactgagacacggtccagactcctacgggaggcagcagtggggaatattgcacaatgggcgcaagcctgatgcagccatgccgcgtgtgtgaagaaggctttcgggttgtaaagcactttcagcggggaggaaggcgataaggttaataaccttgtcgattgacgttacccgcagaagaagcaccggctaactccgtgccagcagccgcggtaatacggagggtgcaagcgttaatcggaattactgggcgtaaagcgcacgcaggcggtctgtcaagtcggatgtgaaatccccgggctcaacctgggaactgcattcgaaactggcaggctagagtcttgtagaggggggtagaattccaggtgtagcggtgaaatgcgtagagatctggaggaataccggtggcgaaggcggccccctggacaaagactgacgctcaggtgcgaaagcgtggggagcaaacaggattagataccctggtagtccacgctgtaaacgatgtcgatttggaggttgtgcccttgaggcgtggcttccggagctaacgcgttaaatcgaccgcctggggagtacggccgcaaggttaaaactcaaatgaattgacgggggcccgcacaagcggtggagcatgtggtttaattcgatgcaacgcgaagaaccttacctggtcttgacatccacagaactttccagagatggattggtgccttcgggaactgtgagacaggtgctgcatggctgtcgtcagctcgtgttgtgaaatgttgggttaagtcccgcaacgagcgcaacccttatcctttgttgccagcggttaggccgggaactcaaaggagactgccagtgataaactggaggaaggtggggatgacgtcaagtcatcatggcccttacgaccagggctacacacgtgctacaatggcatatacaaagagaagcgacctcgcgagagcaagcggacctcataaagtatgtcgtagtccggattggagtctgcaactcgactccatgaagtcggaatcgctagtaatcgtagatcagaatgctacggtgaatacgttcccgggccttgtacacaccgcccgtcacaccatgggagtgggttgcaaaagaagtaggtagcttaaccttcgggagggcgcttaccactttgtgattcatgactggggtgaagtcgtaacaaggtaaccgtaggggaacctgcggttggatcacctcctt

SEQ ID NO: 1343 - DNA, 1536 bp, artificial sequence
  GCF_003312465.1_02691_Faecalibacterium_prausnitzii
ttgaagagtttgatcatggctcagattgaacgctggcggcaggcctaacacatgcaagtcgagcggtagcacagagagcttgctctcgggtgacgagcggcggacgggtgagtaatgtctgggaaactgcctgatggagggggataactactggaaacggtagctaataccgcataatgtcgcaagaccaaagtgggggaccttcgggcctcatgccatcagatgtgcccagatgggattagctggtaggtggggtaacggctcacctaggcgacgatccctagctggtctgagaggatgaccagccacactggaactgagacacggtccagactcctacgggaggcagcagtggggaatattgcacaatgggcgcaagcctgatgcagccatgccgcgtgtgtgaagaaggccttcgggttgtaaagcactttcagcggggaggaaggcggtgaggttaataacctcaccgattgacgttacccgcagaagaagcaccggctaactccgtgccagcagccgcggtaatacggagggtgcaagcgttaatcggaattactgggcgtaaagcgcacgcaggcggtctgtcaagtcggatgtgaaatccccgggctcaacctgggaactgcattcgaaactggcaggctagagtcttgtagaggggggtagaattccaggtgtagcggtgaaatgcgtagagatctggaggaataccggtggcgaaggcggccccctggacaaagactgacgctcaggtgcgaaagcgtggggagcaaacaggattagataccctggtagtccacgctgtaaacgatgtcgatttggaggttgtgcccttgaggcgtggcttccggagctaacgcgttaaatcgaccgcctggggagtacggccgcaaggttaaaactcaaatgaattgacgggggcccgcacaagcggtggagcatgtggtttaattcgatgcaacgcgaagaaccttacctggtcttgacatccacagaactttccagagatggattggtgccttcgggaactgtgagacaggtgctgcatggctgtcgtcagctcgtgttgtgaaatgttgggttaagtcccgcaacgagcgcaacccttatcctttgttgccagcggtccggccgggaactcaaaggagactgccagtgataaactggaggaaggtggggatgacgtcaagtcatcatggcccttacgaccagggctacacacgtgctacaatggcatatacaaagagaagcgacctcgcgagagcaagcggacctcataaagtatgtcgtagtccggattggagtctgcaactcgactccatgaagtcggaatcgctagtaatcgtagatcagaatgctacggtgaatacgttcccgggccttgtacacaccgcccgtcacaccatgggagtgggttgcaaaagaagtaggtagcttaaccttcgggagggcgcttaccactttgtgattcatgactggggtgaagtcgtaacaaggtaaccgtaggggaacctgcggttggatcacctcctt

SEQ ID NO: 1344 - DNA, 1536 bp, artificial sequence
  GCF_003312465.1_02704_Faecalibacterium_prausnitzii
ttgaagagtttgatcatggctcagattgaacgctggcggcaggcctaacacatgcaagtcgagcggtagcacagagagcttgctctcgggtgacgagcggcggacgggtgagtaatgtctgggaaactgcctgatggagggggataactactggaaacggtagctaataccgcataacgtcgcaagaccaaagtgggggaccttcgggcctcatgccatcagatgtgcccagatgggattagctggtaggtggggtaacggctcacctaggcgacgatccctagctggtctgagaggatgaccagccacactggaactgagacacggtccagactcctacgggaggcagcagtggggaatattgcacaatgggcgcaagcctgatgcagccatgccgcgtgtgtgaagaaggccttcgggttgtaaagcactttcagcggggaggaaggcggtgaggttaataacctcatcgattgacgttacccgcagaagaagcaccggctaactccgtgccagcagccgcggtaatacggagggtgcaagcgttaatcggaattactgggcgtaaagcgcacgcaggcggtctgtcaagtcggatgtgaaatccccgggctcaacctgggaactgcattcgaaactggcaggctagagtcttgtagaggggggtagaattccaggtgtagcggtgaaatgcgtagagatctggaggaataccggtggcgaaggcggccccctggacaaagactgacgctcaggtgcgaaagcgtggggagcaaacaggattagataccctggtagtccacgctgtaaacgatgtcgatttggaggttgtgcccttgaggcgtggcttccggagctaacgcgttaaatcgaccgcctggggagtacggccgcaaggttaaaactcaaatgaattgacgggggcccgcacaagcggtggagcatgtggtttaattcgatgcaacgcgaagaaccttacctggtcttgacatccacagaactttccagagatggattggtgccttcgggaactgtgagacaggtgctgcatggctgtcgtcagctcgtgttgtgaaatgttgggttaagtcccgcaacgagcgcaacccttatcctttgttgccagcggttaggccgggaactcaaaggagactgccagtgataaactggaggaaggtggggatgacgtcaagtcatcatggcccttacgaccagggctacacacgtgctacaatggcatatacaaagagaagcgacctcgcgagagcaagcggacctcataaagtatgtcgtagtccggattggagtctgcaactcgactccatgaagtcggaatcgctagtaatcgtagatcagaatgctacggtgaatacgttcccgggccttgtacacaccgcccgtcacaccatgggagtgggttgcaaaagaagtaggtagcttaaccttcgggagggcgcttaccactttgtgattcatgactggggtgaagtcgtaacaaggtaaccgtaggggaacctgcggttggatcacctcctt

SEQ ID NO: 1345 - DNA, 1532 bp, artificial sequence
  GCF_003324115.1_02165_Faecalibacterium_prausnitzii
ttgaagagtttgatcatggctcagattgaacgctggcggcaggcctaacacatgcaagtcgagcggtaacagagagtagcttgctactttgctgacgagcggcggacgggtgagtaatgcttgggaacatgccttgaggtgggggacaacagttggaaacgactgctaataccgcataatgtctacggaccaaagggggcttcggctctcgcctttagattggcccaagtgggattagctagttggtgaggtaatggctcaccaaggcgacgatccctagctggtttgagaggatgatcagccacactgggactgagacacggcccagactcctacgggaggcagcagtggggaatattgcacaatgggcgcaagcctgatgcagccatgccgcgtgtgtgaagaaggccttcgggttgtaaagcactttcagtcaggaggaaaggttagtagttaatacctgctagctgtgacgttactgacagaagaagcaccggctaactccgtgccagcagccgcggtaatacggagggtgcgagcgttaatcggaattactgggcgtaaagcgtacgcaggcggtttgttaagcgagatgtgaaagccctgggctcaacctgggaactgcatttcgaactggcaaactagagtgtgatagagggtggtagaatttcaggtgtagcggtgaaatgcgtagagatctgaaggaataccgatggcgaaggcagccacctgggtcaacactgacgctcatgtacgaaagcgtggggagcaaacgggattagataccccggtagtccacgccgtaaacgatgtctactagaagctcgggtcctcggacttgtttttcaaagctaacgcattaagtagaccgcctggggagtacggccgcaaggttaaaactcaaatgaattgacgggggcccgcacaagcggtggagcatgtggtttaattcgatgcaacgcgaagaaccttacctacacttgacatacagagaacttaccagagatggtttggtgccttcgggaactctgatacaggtgctgcatggctgtcgtcagctcgtgttgtgagatgttgggttaagtcccgcaacgagcgcaacccctatccttagttgctagcaggtaatgctgagaactctaaggagactgccggtgataaaccggaggaaggtggggacgacgtcaagtcatcatggcccttacgtgtagggctacacacgtgctacaatggcgcatacagagtgctgcgaacctgcgaaggtaagcgaatcacttaaagtgcgtcgtagtccggattggagtctgcaactcgactccatgaagtcggaatcgctagtaatcgcgtatcagaatgacgcggtgaatacgttcccgggccttgtacacaccgcccgtcacaccatgggagtgggttgctccagaagtagatagtctaaccctcgggaggacgtttaccacggagtgattcatgactggggtgaagtcgtaacaaggtagccctaggggaacctggggctggatcacctcctt

SEQ ID NO: 1346 - DNA, 1514 bp, artificial sequence
  GCF_003324185.1_02290_Faecalibacterium_prausnitzii
acggagagtttgatcctggctcaggacgaacgctggcggcgtgcttaacacatgcaagtcgagcggtaaggcccttcggggtacacgagcggcgaacgggtgagtaacacgtgggtgatctgccttgcactctgggataagcctgggaaactgggtctaataccggatatgaccttcggcttcctggtcgatggtggaaagatttatcggtgcaagatgagcccgcggcctatcagcttgttggtggggtaatggcctaccaaggcgacgacgggtagccggcctgagagggcgaccggccacactgggactgagacacggcccagactcctacgggaggcagcagtggggaatattgcacaatgggcggaagcctgatgcagcgacgccgcgtgagggatgacggccttcgggttgtaaacctctttcgactccgacgaagcgaaagtgacggtaggagtataagaagcaccggccaactacgtgccagcagccgcggtaatacgtagggtgcgagcgttgtccggaattactgggcgtaaagagcttgtaggcggcttgtcgcgtcgatcgtgaaaactcggggctcaaccccgagcttgcggtcgatacgggcaggcttgagtacttcaggggagactggaattcctggtgtagcggtgaaatgcgcagatatcaggaggaacaccggtggcgaaggcgggtctctgggaagtaactgacgctgagaagcgaaagcgtgggtagcgaacaggattagataccctggtagtccacgccgtaaacggtgggtactaggtgtgggtttccttccacgggatccgtgccgtagctaacgcattaagtaccccgcctggggagtacggccgcaaggctaaaactcaaaggaattgacgggggcccgcacaagcggcggagcatgtggattaattcgatgcaacgcgaagaaccttacctgggtttgacatacaccggaaacctgcagagatgtaggcccccttgtggtcggtgtacaggtggtgcatggctgtcgtcagctcgtgtcgtgagatgttgggttaagtcccgcaacgagcgcaacccttatcttatgttgccagcgcgtaatggcggggactcgtgagagactgccggggtcaactcggaggaaggtggggacgacgtcaagtcatcatgccccttatgtccagggcttcacacatgctacaatggccggtacagagggctgcgataccgcgaggtggagcgaatcccttaaagccggtctcagttcggatcggggtctgcaactcgaccccgtgaagttggagtcgctagtaatcgcagatcagcaacgctgcggtgaatacgttcccgggccttgtacacaccgcccgtcacgtcatgaaagtcggtaacacccgaagccggtggcctaacccttgtggagggagccgtcgaaggtgggatcggcgattgggacgaagtcgtaacaaggtagccgtaccggaaggtgcggctggatcacctccttt

SEQ ID NO: 1347 - DNA, 1532 bp, artificial sequence
  GCF_003434135.1_01628_Faecalibacterium_prausnitzii
tgaagagtttgatcatggctcagattgaacgctggcggcaggcctaacacatgcaagtcgagcggtagagagaagcttgcttctcttgagagcggcggacgggtgagtaatgcctaggaatctgcctggtagtgggggataacgttcggaaacgaacgctaataccgcatacgtcctacgggagaaagcaggggaccttcgggccttgcgctatcagatgagcctaggtcggattagctagttggtgaggtaatggctcaccaaggcgacgatccgtaactggtctgagaggatgatcagtcacactggaactgagacacggtccagactcctacgggaggcagcagtggggaatattggacaatgggcgaaagcctgatccagccatgccgcgtgtgtgaagaaggtcttcggattgtaaagcactttaagttgggaggaagggcagttacctaatacgtgattgttttgacgttaccgacagaataagcaccggctaactctgtgccagcagccgcggtaatacagagggtgcaagcgttaatcggaattactgggcgtaaagcgcgcgtaggtggtttgttaagttggatgtgaaatccccgggctcaacctgggaactgcattcaaaactgactgactagagtatggtagagggtggtggaatttcctgtgtagcggtgaaatgcgtagatataggaaggaacaccagtggcgaaggcgaccacctggactaatactgacactgaggtgcgaaagcgtggggagcaaacaggattagataccctggtagtccacgccgtaaacgatgtcaactagccgttggaagccttgagcttttagtggcgcagctaacgcattaagttgaccgcctggggagtacggccgcaaggttaaaactcaaatgaattgacgggggcccgcacaagcggtggagcatgtggtttaattcgaagcaacgcgaagaaccttaccaggccttgacatccaatgaactttctagagatagattggtgccttcgggaacattgagacaggtgctgcatggctgtcgtcagctcgtgtcgtgagatgttgggttaagtcccgtaacgagcgcaacccttgtccttagttaccagcacgtaatggtgggcactctaaggagactgccggtgacaaaccggaggaaggtggggatgacgtcaagtcatcatggcccttacggcctgggctacacacgtgctacaatggtcggtacagagggttgccaagccgcgaggtggagctaatcccataaaaccgatcgtagtccggatcgcagtctgcaactcgactgcgtgaagtcggaatcgctagtaatcgcgaatcagaatgtcgcggtgaatacgttcccgggccttgtacacaccgcccgtcacaccatgggagtgggttgcaccagaagtagctagtctaaccttcggggggacggttaccacggtgtgattcatgactggggtgaagtcgtaacaaggtagccgtaggggaacctgcggctggatcacctcctt

SEQ ID NO: 1348 - DNA, 1540 bp, artificial sequence
  GCF_003467805.1_01067_Faecalibacterium_prausnitzii
ttgaagagtttgatcatggctcagattgaacgctggcggcaggcctaacacatgcaagtcgagcggtaacagaaagtagcttgctactttgctgacgagcggcggacgggtgagtaatgcctagggaactgcccagtcgaggggggataacagttggaaacgactgctaataccgcatacgccctacgggggaaaagaggggatcttcggaccttctgcgattggatgtacctaggtgggattagctagtaggtgaggtaatggctcacctaggcgacgatccctagctgttctgagaggatgatcagccacactgggactgagacacggcccagactcctacgggaggcagcagtggggaatattgcacaatgggcgcaagcctgatgcagccatgccgcgtgtgtgaagaaggccttcgggttgtaaagcactttcagcgaggaggaaaggttaacggttaatacccgttagctgtgacgttactcgcagaagaagcaccggctaacttcgtgccagcagccgcggtaatacgaggggtgcaagcgttaatcggaattactgggcgtaaagcgtacgcaggcggttgattaagcgagatgtgaaagccccgggcttaacctgggaactgcatttcgaactggtcaactagagtcttgtagaggggggtagaatttcaggtgtagcggtgaaatgcgtagagatctgaaggaataccggtggcgaaggcggccccctggacaaagactgacgctcaggtacgaaagcgtggggagcaaacaggattagataccctggtagtccacgccgtaaacgatgtctactcggaatttggtgtcttgaacactgggttctcaagctaacgcattaagtagaccgcctggggagtacggccgcaaggttaaaactcaaatgaattgacgggggcccgcacaagcggtggagcatgtggtttaattcgatgcaacgcgaagaaccttacctactcttgacatccagagaacttttcagagatgaattggtgccttcgggaactctgagacaggtgctgcatggctgtcgtcagctcgtgttgtgaaatgttgggttaagtcccgcaacgagcgcaacccttatccttacttgccagcgggtaatgccgggaactttagggagactgccggtgataaaccggaggaaggtggggacgacgtcaagtcatcatggcccttacgagtagggctacacacgtgctacaatggtcggtacagagggttgcgaagccgcgaggtggagctaatctcacaaagccggtcgtagtccggattggagtctgcaactcgactccatgaagtcggaatcgctagtaatcgtggatcagaatgccacggtgaatacgttcccgggccttgtacacaccgcccgtcacaccatgggagtgggctgcaccagaagtagatagcttaaccttcgggagggcgtttaccacggtgtggttcatgactggggtgaagtcgtaacaaggtagccctaggggaacctggggctggatcacctcctt

SEQ ID NO: 1349 - DNA, 1534 bp, artificial sequence
  GCF_003482185.1_01038_Faecalibacterium_prausnitzii
tgaagagtttgatcatggctcagattgaacgctggcggcaggcctaacacatgcaagtcgagcggcagcacgggtacttgtacctggtggcgagcggcggacgggtgagtaatgcctaggaatctgcctagtagtgggggataacgtccggaaacgggcgctaataccgcatacgtcctacgggagaaagtgggggatcttcggacctcacgctattagatgagcctaggtcggattagctagttggtgaggtaatggctcaccaaggcgacgatccgtaactggtctgagaggatgatcagtcacactggaactgagacacggtccagactcctacgggaggcagcagtggggaatattggacaatgggcgaaagcctgatccagccatgccgcgtgtgtgaagaaggtcttcggattgtaaagcactttaagttgggaggaagggcagttacctaatacgtgattgttttgacgttaccgacagaataagcaccggctaactctgtgccagcagccgcggtaatacagagggtgcaagcgttaatcggaattactgggcgtaaagcgcgcgtaggtggtttgttaagttggatgtgaaagccccgggctcaacctgggaactgcatccaaaactggcaagctagagtatggtagagggtggtggaatttcctgtgtagcggtgaaatgcgtagatataggaaggaacaccagtggcgaaggcgaccacctggactgatactgacactgaggtgcgaaagcgtggggagcaaacaggattagataccctggtagtccacgccgtaaacgatgtcaactagccgttgggagccttgagctcttagtggcgcagctaacgcattaagttgaccgcctggggagtacggccgcaaggttaaaactcaaatgaattgacgggggcccgcacaagcggtggagcatgtggtttaattcgaagcaacgcgaagaaccttaccaggccttgacatccaatgaactttctagagatagattggtgccttcgggaacattgagacaggtgctgcatggctgtcgtcagctcgtgtcgtgagatgttgggttaagtcccgtaacgagcgcaacccttgtccttagttaccagcacgttatggtgggcactctaaggagactgccggtgacaaaccggaggaaggtggggatgacgtcaagtcatcatggcccttacggcctgggctacacacgtgctacaatggtcggtacaaagggttgccaagccgcgaggtggagctaatcccataaaaccgatcgtagtccggatcgcagtctgcaactcgactgcgtgaagtcggaatcgctagtaatcgcgaatcagaatgtcgcggtgaatacgttcccgggccttgtacacaccgcccgtcacaccatgggagtgggttgcaccagaagtagctagtctaaccttcgggaggacggttaccacggtgtgattcatgactggggtgaagtcgtaacaaggtagccgtaggggaacctgcggctggatcacctcctt

SEQ ID NO: 1350 - DNA, 1300 bp, artificial sequence
  STR01015_Fusicatenibacter_sp1
tggtatgagatggacccgcgttagattagccagttggcagggtaacggcctaccaaagcgacgatctatagccggcctgagagggcgaccggccacattgggactgagacacggcccaaactcctacgggaggcagcagtggggaatattgcacaatgggggaaaccctgatgcagcgacgccgcgtgagcgaagaagtatttcggtatgtaaagctctatcagcagggaagaaaatgacggtacctgactaagaagccccggctaactacgtgccagcagccgcggtaatacgtagggggcaagcgttatccggatttactgggtgtaaagggagcgtagacggctctgcaagtctggagtgaaaacccggggctcaaccctgggactgctttggaaactgtggagcttgagtaccggaggggtaagcggaattcctagtgtagcggtgaaatgcgtagatattaggaggaacaccagtggcgaaggcggcttactggacggtaactgacgttgaggctcgaaagcgtggggagcaaacaggattagataccctggtagtccacgccgtaaacgatgaatactaggtgtcgggaggcaaagcctttcggtgccgccgcaaacgcattaagtattccacctggggagtacgttcgcaagaatgaaactcaaaggaattgacggggacccgcacaagcggtggagcatgtggtttaattcgaagcaacgcgaagaaccttaccaagtcttgacatccctctgaccggcccgtaacggggccttccctacggggcagaggagacaggtggtgcatggttgtcgtcagctcgtgtcgtgagatgttgggttaagtcccgcaacgagcgcaacccttatccttagtagccagcaggtagagctgggcactctagggagactgccagggacaacctggaggaaggtggggatgacgtcaaatcatcatgccccttatgatttgggctacacacgtgctacaatggcgtaaacaaagggaagcgagagggcgacctttagcgaatctcaaaaataacgtcccagttcggactgtagtctgcaacccgactacacgaagctggaatcgctagtaatcgcgaatcagaatgtcgcggtgaatacgttcccgggtcttgtacacaccgcccgtcacaccatgggagttagtaatgcccgaagcctgtgacccaaccgaaaggagggagcagtcgaaggcaggactgataactggggtgaagtcgtaacaaggtagccgtatcggaaggtgcggctggatcacctccttt

SEQ ID NO: 1351 - DNA, 1423 bp, artificial sequence
  STR02312_Fusicatenibacter_sp1
tgagcggcggacgggtgagtaacgcgtgggtaacctgcctcatacagggggataacagttagaaatgactgctaataccgcataagcgcacgaaggcgcatgcctttgtgtgaaaaactccggtggtatgagatggacccgcgttagattagccagttggcagggtaacggcctaccaaagcgacgatctatagccggcctgagagggcgaccggccacattgggactgagacacggcccaaactcctacgggaggcagcagtggggaatattgcacaatgggggaaaccctgatgcagcgacgccgcgtgagcgaagaagtatttcggtatgtaaagctctatcagcagggaagaaaatgacggtacctgactaagaagccccggctaactacgtgccagcagccgcggtaatacgtagggggcaagcgttatccggatttactgggtgtaaagggagcgtagacggctctgcaagtctggagtgaaaacccggggctcaaccctgggactgctttggaaactgtggagcttgagtaccggaggggtaagcggaattcctagtgtagcggtgaaatgcgtagatattaggaggaacaccagtggcgaaggcggcttactggacggtaactgacgttgaggctcgaaagcgtggggagcaaacaggattagataccctggtagtccacgccgtaaacgatgaatactaggtgtcgggaggcaaagcctttcggtgccgccgcaaacgcattaagtattccacctggggagtacgttcgcaagaatgaaactcaaaggaattgacggggacccgcacaagcggtggagcatgtggtttaattcgaagcaacgcgaagaaccttaccaagtcttgacatccctctgaccggcccgtaacggggccttccctacggggcagaggagacaggtggtgcatggttgtcgtcagctcgtgtcgtgagatgttgggttaagtcccgcaacgagcgcaacccttatccttagtagccagcaggtagagctgggcactctagggagactgccagggacaacctggaggaaggtggggatgacgtcaaatcatcatgccccttatgatttgggctacacacgtgctacaatggcgtaaacaaagggaagcgagagggcgacctttagcgaatctcaaaaataacgtcccagttcggactgtagtctgcaacccgactacacgaagctggaatcgctagtaatcgcgaatcagaatgtcgcggtgaatacgttcccgggtcttgtacacaccgcccgtcacaccatgggagttagtaatgcccgaagcctgtgacccaaccgaaaggagggagcagtcgaaggcaggactgataactggggtgaagtcgtaacaaggtagccgtatcggaaggtgcggctggatcacctccttt

SEQ ID NO: 1352 - DNA, 1530 bp, artificial sequence
  STR02489_Fusicatenibacter_sp1
tttagagagtttgatcctggctcaggatgaacgctggcggcgtgcttaacacatgcaagtcgagcgaagcacccggacggatttcttcggattgaaggccgggcgactgagcggcggacgggtgagtaacgcgtgggtaacctgcctcatacagggggataacagttagaaatgactgctaataccgcataagcgcacgaaggcgcatgcctttgtgtgaaaaactccggtggtatgagatggacccgcgttagattagccagttggcagggtaacggcctaccaaagcgacgatctatagccggcctgagagggcgaccggccacattgggactgagacacggcccaaactcctacgggaggcagcagtggggaatattgcacaatgggggaaaccctgatgcagcgacgccgcgtgagcgaagaagtatttcggtatgtaaagctctatcagcagggaagaaaatgacggtacctgactaagaagccccggctaactacgtgccagcagccgcggtaatacgtagggggcaagcgttatccggatttactgggtgtaaagggagcgtagacggctctgcaagtctggagtgaaaacccggggctcaaccctgggactgctttggaaactgtggagcttgagtaccggaggggtaagcggaattcctagtgtagcggtgaaatgcgtagatattaggaggaacaccagtggcgaaggcggcttactggacggtaactgacgttgaggctcgaaagcgtggggagcaaacaggattagataccctggtagtccacgccgtaaacgatgaatactaggtgtcgggaggcaaagcctttcggtgccgccgcaaacgcattaagtattccacctggggagtacgttcgcaagaatgaaactcaaaggaattgacggggacccgcacaagcggtggagcatgtggtttaattcgaagcaacgcgaagaaccttaccaagtcttgacatccctctgaccggcccgtaacggggccttccctacggggcagaggagacaggtggtgcatggttgtcgtcagctcgtgtcgtgagatgttgggttaagtcccgcaacgagcgcaacccttatccttagtagccagcaggtagagctgggcactctagggagactgccagggacaacctggaggaaggtggggatgacgtcaaatcatcatgccccttatgatttgggctacacacgtgctacaatggcgtaaacaaagggaagcgagagggcgacctttagcgaatctcaaaaataacgtcccagttcggactgtagtctgcaacccgactacacgaagctggaatcgctagtaatcgcgaatcagaatgtcgcggtgaatacgttcccgggtcttgtacacaccgcccgtcacaccatgggagttagtaatgcccgaagcctgtgacccaaccgaaaggagggagcagtcgaaggcaggactgataactggggtgaagtcgtaacaaggtagccgtatcggaaggtgcggctggatcacctccttt

SEQ ID NO: 1353 - DNA, 1530 bp, artificial sequence; identical to SEQ ID NO: 1352
  STR02614_Fusicatenibacter_sp1

SEQ ID NO: 1354 - DNA, 1530 bp, artificial sequence
  STR02631_Fusicatenibacter_sp1
tttagagagtttgatcctggctcaggatgaacgctggcggcgtgcttaacacatgcaagtcgagcgaagcacccggacggatttcttcggattgaagtctgggcgactgagcggcggacgggtgagtaacgcgtgggtaacctgcctcatacagggggataacagttagaaatgactgctaataccgcataagcgcacgaaggcgcatgcctttgtgtgaaaaactccggtggtatgagatggacccgcgttagattagccagttggcagggtaacggcctaccaaagcgacgatctatagccggcctgagagggcgaccggccacattgggactgagacacggcccaaactcctacgggaggcagcagtggggaatattgcacaatgggggaaaccctgatgcagcgacgccgcgtgagcgaagaagtatttcggtatgtaaagctctatcagcagggaagaacatgacggtacctgactaagaagccccggctaactacgtgccagcagccgcggtaatacgtagggggcaagcgttatccggatttactgggtgtaaagggagcgtagacggctctgcaagtctggagtgaaaacccggggctcaaccctgggactgctttggaaactgtggagcttgagtaccggaggggtaagcggaattcctagtgtagcggtgaaatgcgtagatattaggaggaacaccagtggcgaaggcggcttactggacggtaactgacgttgaggctcgaaagcgtggggagcaaacaggattagataccctggtagtccacgccgtaaacgatgaatactaggtgtcgggaggcaaagcctttcggtgccgccgcaaacgcattaagtattccacctggggagtacgttcgcaagaatgaaactcaaaggaattgacggggacccgcacaagcggtggagcatgtggtttaattcgaagcaacgcgaagaaccttaccaagtcttgacatccctctgaccggcccgtaacggggccttccctacggggcagaggagacaggtggtgcatggttgtcgtcagctcgtgtcgtgagatgttgggttaagtcccgcaacgagcgcaacccttatccttagtagccagcaggtagagctgggcactctagggagactgccagggacaacctggaggaaggtggggatgacgtcaaatcatcatgccccttatgatttgggctacacacgtgctacaatggcgtaaacaaagggaagcgagagggcgacctttagcgaatctcaaaaataacgtcccagttcggactgtagtctgcaacccgactacacgaagctggaatcgctagtaatcgcgaatcagaatgtcgcggtgaatacgttcccgggtcttgtacacaccgcccgtcacaccatgggagttagtaatgcccgaagcctgtgacccaaccgaaaggagggagcagtcgaaggcaggactgataactggggtgaagtcgtaacaaggtagccgtatcggaaggtgcggctggatcacctccttt

SEQ ID NO: 1355 - DNA, 804 bp, artificial sequence
  GCF_003481995.1_04240_Fusicatenibacter_sp1
ttgaagagtttgatcatggctcagattgaacgctggcggcaggcctaacacatgcaagtcgagcggcagcgggggaaagcttgctttcccgccggcgagcggcggacgggtgagtaatgtctgggaaactgcctgatggagggggataactactggaaacggtagctaataccgcataacgtcttcggaccaaagtgggggaccttcgggcctcatgccatcagatgtgcccagatgggattagctagtaggtggggtaacggctcacctaggcgacgatccctagctggtctgagaggatgaccagccacactggaactgagacacggtccagactcctacgggaggcagcagtggggaatattgcacaatgggcgcaagcctgatgcagccatgccgcgtgtatgaagaaggccttcgggttgtaaagtactttcagcggggaggaaggtgttgtggttaataaccgcagcaattgacgttacccgcagaagaagcaccggctaactccgtgccagcagccgcggtaatacggagggtgcaagcgttaatcggaattactgggcgtaaagcgcacgcaggcggtctgtcaagtcggatgtgaaatccccgggctcaacccgggaactgcatccgaaactggcaggcttgagtcttgtagaggggggtagaattccaggtgtagcggtgaaatgcgtagagatctggaggaataccggtggcgaaggcggccccctggacaaagactgacgctcaggtgcgaaagcgtggggagcaaacaggattagataccctggtagtcca

SEQ ID NO: 1356 - DNA, 1511 bp, artificial sequence
  STR00663_Gemmiger_sp2
tataaagagtttgatcctggctcaggacgaacgctggcggcgcgcctaacacatgcaagtcgaacggagcttagagagcttgctttttaagcttagtggcgaacgggtgagtaacgcgtgagtaacctgccctagagtgggggacaacagttggaaacgactgctaataccgcataagcccacggtaccgcatggtactgagggaaaaggatttattcgctttaggatggactcgcgtccaattagctagttggtgaggtaacggcccaccaaggcgacgattggtagccggactgagaggttgaacggccacattgggactgagacacggcccagactcctacgggaggcagcagtgggggatattgcacaatgggggaaaccctgatgcagcgacgccgcgtggaggaagaaggttttcggattgtaaactcctgtcgttagggacgataatgacggtacctaacaagaaagcaccggctaactacgtgccagcagccgcggtaaaacgtagggtgcaagcgttgtccggaattactgggtgtaaagggagcgcaggcgggaagacaagttggaagtgaaaaccatgggctcaacccatgaattgctttcaaaactgtttttcttgagtagtgcagaggtagatggaattcccggtgtagcggtggaatgcgtagatatcgggaggaacaccagtggcgaaggcggtctactgggcaccaactgacgctgaggctcgaaagcatgggtagcaaacaggattagataccctggtagtccatgccgtaaacgatgattactaggtgttgggggattgaccccctcagtgccgcagttaacacaataagtaatccacctggggagtacgaccgcaaggttgaaactcaaaggaattgacgggggcccgcacaagcagtggagtatgtggtttaattcgaagcaacgcgaagaaccttaccaggtcttgacatccgatgcatagcacagagatgtgtgaaatccttcgggacatcgagacaggtggtgcatggttgtcgtcagctcgtgtcgtgagatgttgggttaagtcccgcaacgagcgcaacccttattgccagttactacgttaagaggactctggcgagactgccgttgacaaaacggaggaaggtggggatgacgtcaaatcatcatgccctttatgacctgggctacacacgtactacaatggcgttaaacaaagagaagcaagaccgcgaggtggagcaaaactcaaaaacaacgtctcagttcagattgcaggctgcaactcgcctgcatgaagtcggaattgctagtaatcgcggatcagcatgccgcggtgaatacgttcccgggccttgtacacaccgcccgtcacaccatgagagccggggggacccgaagtcgatagtctaaccgcaaggaggacgtcgccgaaggtaaaactggtgattggggtgaagtcgtaacaaggtagccgtatcggaaggtgcggctggatcacctccttt

SEQ ID NO: 1357 - DNA, 1307 bp, artificial sequence
  STR00677_Gemmiger_sp2
aaaaggatttattcgctttaggatggactcgcgtccaattagctagttggtgaggtaacggcccaccaaggcgacgattggtagccggactgagaggttgaacggccacattgggactgagacacggcccagactcctacgggaggcagcagtgggggatattgcacaatgggggaaaccctgatgcagcgacgccgcgtggaggaagaaggttttcggattgtaaactcctgtcgttagggacgataatgacggtacctaacaagaaagcaccggctaactacgtgccagcagccgcggtaaaacgtagggtgcaagcgttgtccggaattactgggtgtaaagggagcgcaggcgggaagacaagttggaagtgaaaaccatgggctcaacccatgaattgctttcaaaactgtttttcttgagtagtgcagaggtagatggaattcccggtgtagcggtggaatgcgtagatatcgggaggaacaccagtggcgaaggcggtctactgggcaccaactgacgctgaggctcgaaagcatgggtagcaaacaggattagataccctggtagtccatgccgtaaacgatgattactaggtgttgggggattgaccccctcagtgccgcagttaacacaataagtaatccacctggggagtacgaccgcaaggttgaaactcaaaggaattgacgggggcccgcacaagcagtggagtatgtggtttaattcgaagcaacgcgaagaaccttaccaggtcttgacatccgatgcatagcacagagatgtgtgaaatccttcgggacatcgagacaggtggtgcatggttgtcgtcagctcgtgtcgtgagatgttgggttaagtcccgcaacgagcgcaacccttattgccagttactacgttaagaggactctggcgagactgccgttgacaaaacggaggaaggtggggatgacgtcaaatcatcatgccctttatgacctgggctacacacgtactacaatggcgttaaacaaagagaagcaagaccgcgaggtggagcaaaactcaaaaacaacgtctcagttcagattgcaggctgcaactcgcctgcatgaagtcggaattgctagtaatcgcggatcagcatgccgcggtgaatacgttcccgggccttgtacacaccgcccgtcacaccatgagagccggggggacccgaagtcgatagtctaaccgcaaggaggacgtcgccgaaggtaaaactggtgattggggtgaagtcgtaacaaggtagccgtatcggaaggtgcggctggatcacctccttt

SEQ ID NO: 1358 - DNA, 1511 bp, artificial sequence; identical to SEQ ID NO: 1356
  STR00678_Gemmiger_sp2

SEQ ID NO: 1359 - DNA, 1511 bp, artificial sequence; identical to SEQ ID NO: 1356
  STR00689_Gemmiger_sp2

SEQ ID NO: 1360 - DNA, 1511 bp, artificial sequence; identical to SEQ ID NO: 1356
  STR00690_Gemmiger_sp2

SEQ ID NO: 1361 - DNA, 1511 bp, artificial sequence; identical to SEQ ID NO: 1356
  STR00702_Gemmiger_sp2

SEQ ID NO: 1362 - DNA, 1532 bp, artificial sequence; identical to SEQ ID NO: 1345
  GCF_003324125.1_00475_Gemmiger_sp2

SEQ ID NO: 1363 - DNA, 1460 bp, artificial sequence
  GCF_000160675.1_00011_Granulicatella_adiacens
cttgagagtttgatcctggctcagaacgaacgctggcggcaggcttaacacatgcaagtcgagcgaggacttcggttctagcggcggacgggtgagtaacgcgtgggaacgtgcccttttctgcggaatagccttgggaaactgagagtaataccgcatacgcccttttggggaaagatttatcggagaaggatcggcccgcgttggattaggtagttggtggggtaatggcctaccaagccgacgatccatagctggtttgagaggatgatcagccacactgggactgagacacggcccagactcctacgggaggcagcagtggggaatcttagacaatgggggcaaccctgatctagccatgccgcgtgagtgatgaaggccttagggttgtaaagctctttcagctgggaagataatgacggtaccagcagaagaagccccggctaactccgtgccagcagccgcggtaatacggagggggctagcgttgttcggaattactgggcgtaaagcgcacgtaggcggatcggaaagttgggggtgaaatcccggggctcaacctcggaactgccttcaaaactatcggtcttgagttcgagagaggtgagtggaattccgagtgtagaggtgaaattcgtagatattcggaggaacaccagtggcgaaggcggctcactggctcgatactgacgctgaggtgcgaaagcgtggggagcaaacaggattagataccctggtagtccacgccgtaaacgatgaatgccagtcgtcgggttgcatgcaattcggtgacacacctaacggattaagcattccgcctggggagtacggtcgcaagattaaaactcaaaggaattgacgggggcccgcacaagcggtggagcatgtggtttaattcgaagcaacgcgcagaaccttaccaacccttgacatccccggaccgctggagagattcagcttcctcgtaagaggccgggtgacaggtgctgcatggctgtcgtcagctcgtgtcgtgagatgttcggttaagtccggcaacgagcgcaacccacgtccccagttgccagcattcagttgggcactctgtggaaactgccggtgataagccggaggaaggtgtggatgacgtcaagtcctcatggcccttacgggttgggctacacacgtgctacaatggtggtgacagtgggttaatccccaaaagccatctcagttcggattgtcctctgcaactcgagggcatgaagttggaatcgctagtaatcgcggaacagcatgccgcggtgaatacgttcccgggccttgtacacaccgcccgtcacaccatgggagttgggtctacccgacggccgtgcgctaacccttacgggaggcagcggaccacggtaggctcagcgactggggtgaagtcgtaacaaggtagccgtaggggaacctgcggctggatcacctccttt

SEQ ID NO: 1364 - DNA, 1553 bp, artificial sequence
  GCF_001071365.1_00001_Granulicatella_adiacens
tttggagagtttgatcctggctcaggacgaacgctggcggcgtgcctaatacatgcaagtcgagcggaccgaatagaagcttgcttctgtttggttagcggcggacgggtgagtaacacgtgggcaacctgcccgtaagacggggataacttcgggaaaccggagctaatacccgataaccctgaagaccgcatggtctttagttgaaaggcggcttcggctgtcacttacggatgggcccgcggcgcattagctagttggtgaggtaacggctcaccaaggcgacgatgcgtagccgacctgagagggtgatcggccacactgggactgagacacggcccagactcctacgggaggcagcagtagggaatcttccgcaatggacgaaagtctgacggagcaacgccgcgtgagcgaagaaggtcttcggattgtaaagctctgttgttagggaagaacaagtgcggttcgaatagggccgtaccttgacggtacctaacgagaaagccacggctaactacgtgccagcagccgcggtaatacgtaggtggcaagcgttgtccggaattattgggcgtaaagcgcgcgcaggcggttccttaagtctgatgtgaaagcccacggctcaaccgtggagggtcattggaaactgggggacttgagtgcagaagaggggagcggaattccacgtgtagcggtgaaatgcgtagagatgtggaggaacaccagtggcgaaggcggctctctggtctgtaactgacgctgaggcgcgaaagcgtggggagcaaacaggattagataccctggtagtccacgccgtaaacgatgagtgctaagtgttagagggtatccaccctttagtgctgtagctaacgcattaagcactccgcctggggagtacgctcgcaagagtgaaactcaaaggaattgacgggggcccgcacaagcggtggagcatgtggtttaattcgaagcaacgcgaagaaccttaccaggtcttgacatcccctgacaccccgagagatcgggcgttccccttcgggggacagggtgacaggtggtgcatggttgtcgtcagctcgtgtcgtgagatgttgggttaagtcccgcaacgagcgcaacccttgaccttagttgccagcattgagttgggcactctaaggtgactgccgatgacaaatcggaggaaggtggggatgacgtcaaatcatcatgccccttatgacctgggctacacacgtgctacaatgggcggtacaaagggttgcgaacccgcgagggggagccaatcccaaaaagccgctctcagttcggattgcaggctgcaactcgcctgcatgaagccggaatcgctagtaatcgcggatcagcatgccgcggtgaatacgttcccgggccttgtacacaccgcccgtcacaccacgagagtttgcaacacccgaagtcggtggggtaacccttacgggagccagccgccgaaggtggggcagatgattggggtgaagtcgtaacaaggtagccgtatcggaaggtgcggctggatcacctccttt

SEQ ID NO: 1365 - DNA, 1478 bp, artificial sequence
  GCF_001071995.1_01363_Granulicatella_adiacens
tgagagtttgatcctggctcagagcgaacgctggcggcaggcttaacacatgcaagtcgagcgggcccttcggggtcagcggcggacgggtgagtaacgcgtgggaacgtgccttctggttcggaataaccctgggaaactagggctaataccggatacgcccttttggggaaaggtttactgccggaagatcggcccgcgtctgattagctagttggtggggtaacggcctaccaaggcgacgatcagtagctggtctgagaggatgatcagccacactgggactgagacacggcccagactcctacgggaggcagcagtggggaatattggacaatgggcgcaagcctgatccagccatgccgcgtgagtgatgaaggccttagggttgtaaagctcttttatccgggacgataatgacggtaccggaggaataagccccggctaacttcgtgccagcagccgcggtaatacgaagggggctagcgttgctcggaatcactgggcgtaaagggcgcgtaggcggcgttttaagtcgggggtgaaagcctgtggctcaaccacagaatggccttcgatactgggacgcttgagtatggtagaggttggtggaactgcgagtgtagaggtgaaattcgtagatattcgcaagaacaccggtggcgaaggcggccaactggaccattactgacgctgaggcgcgaaagcgtggggagcaaacaggattagataccctggtagtccacgccgtaaacgatgaatgccagctgttggggtgcttgcaccgcagtagcgcagctaacgctttgagcattccgcctggggagtacggtcgcaagattaaaactcaaaggaattgacgggggcccgcacaagcggtggagcatgtggtttaattcgaagcaacgcgcagaaccttaccatcctttgacatggcgtgttacccagagagatctggggtccccttcgggggcgcgcacacaggtgctgcatggctgtcgtcagctcgtgtcgtgagatgttgggttaagtcccgcaacgagcgcaacccacgtccttagttgccatcattcagttgggcactctagggagactgccggtgataagccgcgaggaaggtgtggatgacgtcaagtcctcatggcccttacgggatgggctacacacgtgctacaatggcggtgacagtgggaggcgaaggagcgatctggagcaaatccccaaaagccgtctcagttcggattgcactctgcaactcgagtgcatgaaggcggaatcgctagtaatcgtggatcagcatgccacggtgaatacgttcccgggccttgtacacaccgcccgtcacaccatgggagttggtcttacccgacggcgctgcgccaaccgcaaggaggcaggcgaccacggtagggtcagcgactggggtgaagtcgtaacaaggtagccgtaggggaacctgcggctggatcacctccttt

SEQ ID NO: 1366 - DNA, 1516 bp, artificial sequence
  GCF_001073445.1_00002_Granulicatella_adiacens
atgaagagtttgatcctggctcaggatgaacgctagcggcaggcctaacacatgcaagtcgaggggtaacagaggagcttgcttctgctgacgaccggcgcacgggtgcgtaacgcgtatagaatctaccttgtactgaggaatagcctttggaaacgaagattaatgcctcatggtatatcggttcggcatcgagttgatattaaagattacggtataagatgactatgcgttctattagctagatggtgtggtaacggcacaccatggcgacgatagataggggccctgagagggggatcccccacactggtactgagacacggaccagactcctacgggaggcagcagtgaggaatattggacaatggaggcaactctgatccagccatgccgcgtgcaggaagactgccctatgggttgtaaactgcttttatacaggaagaaacacctctacgtgtagagacttgacggtactgtaagaataaggatcggctaactccgtgccagcagccgcggtaatacggaggatccaagcgttatccggaatcattgggtttaaagggtccgtaggtggataattaagtcagaggtgaaatcctgcagctcaactgtagaattgcctttgatactggttatcttgagttattatgaagtagttagaatatgtagtgtagcggtgaaatgcatagatattacatagaataccaattgcgaaggcagattactaataatcaactgacactgatggacgaaagcgtggggagcgaacaggattagataccctggtagtccacgccgtaaacgatggtcactagctgttcgaacttcggtttgagtggctaagcgaaagtgataagtgacccacctggggagtacgttcgcaagaatgaaactcaaaggaattgacgggggcccgcacaagcggtggagcatgtggtttaattcgatgatacgcgaggaaccttaccagggcttaaatgtaaattgacaggtttagagatagacttttcttcggacaatttacaaggtgctgcatggttgtcgtcagctcgtgccgtgaggtgtcaggttaagtcctataacgagcgcaacccctgttgttagttgccagcgagtcatgtcgggaactctaacaagactgccggtgcaaaccgtgaggaaggtggggatgacgtcaaatcatcacggcccttacgtcctgggctacacacgtgctacaatggtagggacagagagcagccactgcgcgagcaggagcgaatctataaaccctatcacagttcggatcggagtctgcaactcgactccgtgaagctggaatcgctagtaatcgcatatcagccatgatgcggtgaatacgttcccgggccttgtacacaccgcccgtcaagccatggaagctgggagtgcctgaagtccgtcaccgtaaggagcggcctagggtaaaatcggtaactagggctaagtcgtaacaaggtagccgtaccggaaggtgcggctggaacacctcctt

SEQ ID NO: 1367 - DNA, 1480 bp, artificial sequence
  GCF_001806915.1_00827_Granulicatella_adiacens
tctgagagtttgatcctggctcagaacgaacgctggcggcaggcctaacacatgcaagtcgaacgccccgcaaggggagtggcagacgggtgagtaacgcgtgggaaccttcccagtggtacggaatagcccagggaaacttggagtaataccgtataatacccgaaaggggaaagatttatcgccattggatgggcccgcgtaggattagctagttggtgaggtaatggctcaccaaggcgacgatccttagctggtctgagaggatgatcagccacactgggactgagacacggcccagactcctacgggaggcagcagtggggaatattgggcaatgggcgcaagcctgacccagccatgccgcgtgagtgacgaaggccttagggttgtaaagctcttttggcggggacgataatgacggtacccgcagaataagccccggctaacttcgtgccagcagccgcggtaatacgaagggggctagcgttgttcggaatcactgggcgtaaagcgcacgtaggcggactttcaagtcaggggtgaaatcccggggctcaacctcggaactgcctttgatactgttggtctcgagtccgatagaggtgggtggaattcctagtgtagaggtgaaattcgtagatattaggaagaacaccggtggcgaaggcggcccactggatcggtactgacgctgaggtgcgaaagcgtggggagcaaacaggattagataccctggtagtccacgccgtaaacgatggatgctagccgtcggcaagcttgcttgtcggtggcgcagctaacgcattaagcatcccgcctggggagtacggccgcaaggttaaaactcaaaggaattgacgggggcccgcacaagcggtggagcatgtggtttaattcgacgcaacgcgaagaaccttaccaagccttgacatgtccggatcggcctttgaaagagggtcttcccagcaatgggccggaacacaggtgctgcatggctgtcgtcagctcgtgtcgtgagatgttgggttaagtcccgcaacgagcgcaaccctcgccattagttgccatcattcagttgggcactctagtgggaccgccggtgataagccggaggaaggtggggatgacgtcaagtcatcatggcccttacggtttgggctacacacgtgctacaatggcggtgacagtgggcagccactcagcaatgaggagctaatcccaaaaagccgtctcagttcggattgggctctgcaactcgagcccatgaagtcggaatcgctagtaatcgcggatcagcacgccgcggtgaatacgttcccgggccttgtacacaccgcccgtcacaccatgggagttggtcttacccgaagacggtacgctaaccgcaaggaggcagccggccacggtaaggtcagcgactggggtgaagtcgtaacaaggtagccgtaggggaacctgcggctggatcacctccttt

SEQ ID NO: 1368 - DNA, 1539 bp, artificial sequence
  GCF_001807725.1_01205_Granulicatella_adiacens
ttgaagagtttgatcatggctcagattgaacgctggcggcaggcctaacacatgcaagtcgagcggtaacaggaaatagcttgctatttcgctgacgagcggcggacgggtgagtaatgcataggaagttgcccagtagagggggataaccattggaaacgatggctaataccgcataacctcttcggagcaaagcaggggaccttcgggccttgcgctattggatacgcctatgtgggattagctagttggtgaggtaatggctcaccaaggcaacgatccctagctggtctgagaggatgatcagccacactgggactgagacacggcccagactcctacgggaggcagcagtggggaatattgcacaatgggcgaaagcctgatgcagccatgccgcgtgtatgaagaaggccttcgggttgtaaagtactttcagttgtgaggaaggtttcgtagttaataactgcgttgcttgacgttagcaacagaagaagcaccggctaactccgtgccagcagccgcggtaatacggagggtgcgagcgttaatcggaattactgggcgtaaagcgcatgcaggtggtttgttaagtcagatgtgaaagcccggggctcaacctcggaaggtcatttgaaactggcaaactagagtactgtagaggggggtagaatttcaggtgtagcggtgaaatgcgtagagatctgaaggaataccagtggcgaaggcggccccctggacagatactgacactcagatgcgaaagcgtggggagcaaacaggattagataccctggtagtccacgccgtaaacgatgtctacttggaggttgtggccttgagccgtggctttcggagctaacgcgttaagtagaccgcctggggagtacggtcgcaagattaaaactcaaatgaattgacgggggcccgcacaagcggtggagcatgtggtttaattcgatgcaacgcgaagaaccttacctactcttgacatccagagaagccagtagagatacaggtgtgccttcgggagctctgagacaggtgctgcatggctgtcgtcagctcgtgttgtgaaatgttgggttaagtcccgcaacgagcgcaacccttatccttgtttgccagcgagtaatgtcgggaactccagggagactgccggtgataaaccggaggaaggtggggacgacgtcaagtcatcatggcccttacgagtagggctacacacgtgctacaatggcgcatacagagggcagcgaacttgcgaaagtaagcgaatcccaaaaagtgcgtcgtagtccggattggagtctgcaactcgactccatgaagtcggaatcgctagtaatcgtggatcagaatgccacggtgaatacgttcccgggccttgtacacaccgcccgtcacaccatgggagtgggctgcaaaagaagtaggtagtttaaccttcgggaggacgcttaccactttgtggttcatgactggggtgaagtcgtaacaaggtagccctaggggaacctggggctggatcacctcctt

SEQ ID NO: 1369 - DNA, 1530 bp, artificial sequence
  STR00522_Intestinimonas_butyriciproducens
tattgagagtttgatcctggctcaggatgaacgctggcggcgtgcttaacacatgcaagtcgaacggagcacccctgacggagttttcggacaacgaaagggaatgcttagtggcggacgggtgagtaacgcgtgagtaacctgccttggagtggggaataacagccggaaacggctgctaataccgcatgatgtatctggatcgcatggttctggataccaaagatttatcgctctgagatggactcgcgtctgattagctagttggtgaggtaatggctcaccaaggcgacgatcagtagccggactgagaggttggccggccacattgggactgagacacggcccagactcctacgggaggcagcagtggggaatattgggcaatgggcgaaagcctgacccagcaacgccgcgtgaaggaagaaggccctcgggttgtaaacttcttttgtcagggacgaagcaagtgacggtacctgacgaataagccacggctaactacgtgccagcagccgcggtaatacgtaggtggcaagcgttatccggatttactgggtgtaaagggcgtgtaggcgggagtgcaagtcagatgtgaaaactatgggctcaacccatagcctgcatttgaaactgtacttcttgagtgatggagaggcaggcggaattccctgtgtagcggtgaaatgcgtagatatagggaggaacaccagtggcgaaggcggcctgctggacattaactgacgctgaggcgcgaaagcgtggggagcaaacaggattagataccctggtagtccacgccgtaaacgatggatactaggtgtggggggtctgaccccctccgtgccgcagttaacacaataagtatcccacctggggagtacgatcgcaaggttgaaactcaaaggaattgacgggggcccgcacaagcggtggagtatgtggtttaattcgaagcaacgcgaagaaccttaccaggacttgacatcctactaacgaagcagagatgcataaggtgcccttcggggaaagtagagacaggtggtgcatggttgtcgtcagctcgtgtcgtgagatgttgggttaagtcccgcaacgagcgcaacccttattgttagttgctacgcaagagcactctagcgagactgccgttgacaaaacggaggaaggtggggacgacgtcaaatcatcatgccccttatgtcctgggccacacacgtactacaatggcggtcaacagagggaagcaaagccgcgaggtggagcaaatccctaaaagccgtcccagttcggattgcaggctgaaactcgcctgtatgaagtcggaatcgctagtaatcgcggatcagcatgccgcggtgaatacgttcccgggccttgtacacaccgcccgtcacaccatgagagtcgggaacacccgaagtccgtagcctaacagcaatgggggcgcggccgaaggtgggttcgataattggggtgaagtcgtaacaaggtagccgtatcggaaggtgcggctggatcacctccttt

SEQ ID NO: 1370 - DNA, 1530 bp, artificial sequence; identical to SEQ ID NO: 1369
  STR00532_Intestinimonas_butyriciproducens

SEQ ID NO: 1371 - DNA, 1530 bp, artificial sequence; identical to SEQ ID NO: 1369
  STR00551_Intestinimonas_butyriciproducens

SEQ ID NO: 1372 - DNA, 1253 bp, artificial sequence
  STR00711_Intestinimonas_butyriciproducens
ggctcaccaaggcgacgatcagtagccggactgagaggttggccggccacattgggactgagacacggcccagactcctacgggaggcagcagtggggaatattgggcaatgggcgaaagcctgacccagcaacgccgcgtgaaggaagaaggccctcgggttgtaaacttcttttgtcagggacgaagcaagtgacggtacctgacgaataagccacggctaactacgtgccagcagccgcggtaatacgtaggtggcaagcgttatccggatttactgggtgtaaagggcgtgtaggcgggagtgcaagtcagatgtgaaaactatgggctcaacccatagcctgcatttgaaactgtacttcttgagtgatggagaggcaggcggaattccctgtgtagcggtgaaatgcgtagatatagggaggaacaccagtggcgaaggcggcctgctggacattaactgacgctgaggcgcgaaagcgtggggagcaaacaggattagataccctggtagtccacgccgtaaacgatggatactaggtgtggggggtctgaccccctccgtgccgcagttaacacaataagtatcccacctggggagtacgatcgcaaggttgaaactcaaaggaattgacgggggcccgcacaagcggtggagtatgtggtttaattcgaagcaacgcgaagaaccttaccaggacttgacatcctactaacgaagcagagatgcataaggtgcccttcggggaaagtagagacaggtggtgcatggttgtcgtcagctcgtgtcgtgagatgttgggttaagtcccgcaacgagcgcaacccttattgttagttgctacgcaagagcactctagcgagactgccgttgacaaaacggaggaaggtggggacgacgtcaaatcatcatgccccttatgtcctgggccacacacgtactacaatggcggtcaacagagggaagcaaagccgcgaggtggagcaaatccctaaaagccgtcccagttcggattgcaggctgaaactcgcctgtatgaagtcggaatcgctagtaatcgcggatcagcatgccgcggtgaatacgttcccgggccttgtacacaccgcccgtcacaccatgagagtcgggaacacccgaagtccgtagcctaacagcaatgggggcgcggccgaaggtgggttcgataattggggtgaagtcgtaacaaggtagccgtatcggaaggtgcggctggatcacctccttt

SEQ ID NO: 1373 - DNA, 1253 bp, artificial sequence; identical to SEQ ID NO: 1372
  STR00712_Intestinimonas_butyriciproducens

SEQ ID NO: 1374 - DNA, 1530 bp, artificial sequence
  STR00864_Intestinimonas_butyriciproducens
tattgagagtttgatcctggctcaggatgaacgctggcggcgtgcttaacacatgcaagtcgaacggagcacccctaacggagttttcggacaacgaaagggaatgcttagtggcggacgggtgagtaacgcgtgagtaacctgccttggagtggggaataacagccggaaacggctgctaataccgcatgatgtatctggatcgcatggttctggataccaaagatttatcgctctgagatggactcgcgtctgattagctagttggtgaggtaatggctcaccaaggcgacgatcagtagccggactgagaggttggccggccacattgggactgagacacggcccagactcctacgggaggcagcagtggggaatattgggcaatgggcgaaagcctgacccagcaacgccgcgtgaaggaagaaggccctcgggttgtaaacttcttttgtcagggacgaagcaagtgacggtacctgacgaataagccacggctaactacgtgccagcagccgcggtaatacgtaggtggcaagcgttatccggatttactgggtgtaaagggcgtgtaggcgggagtgcaagtcagatgtgaaaactatgggctcaacccatagcctgcatttgaaactgtacttcttgagtgatggagaggcaggcggaattccctgtgtagcggtgaaatgcgtagatatagggaggaacaccagtggcgaaggcggcctgctggacattaactgacgctgaggcgcgaaagcgtggggagcaaacaggattagataccctggtagtccacgccgtaaacgatggatactaggtgtggggggtctgaccccctccgtgccgcagttaacacaataagtatcccacctggggagtacgatcgcaaggttgaaactcaaaggaattgacgggggcccgcacaagcggtggagtatgtggtttaattcgaagcaacgcgaagaaccttaccaggacttgacatcctactaacgaagcagagatgcataaggtgcccttcggggaaagtagagacaggtggtgcatggttgtcgtcagctcgtgtcgtgagatgttgggttaagtcccgcaacgagcgcaacccttattgttagttgctacgcaagagcactctagcgagactgccgttgacaaaacggaggaaggtggggacgacgtcaaatcatcatgccccttatgtcctgggccacacacgtactacaatggcggtcaacagagggaagcaaagccgcgaggtggagcaaatccctaaaagccgtcccagttcggattgcaggctgaaactcgcctgtatgaagtcggaatcgctagtaatcgcggatcagcatgccgcggtgaatacgttcccgggccttgtacacaccgcccgtcacaccatgagagtcgggaacacccgaagtccgtagcctaacagcaatgggggcgcggccgaaggtgggttcgataattggggtgaagtcgtaacaaggtagccgtatcggaaggtgcggctggatcacctccttt

SEQ ID NO: 1375 - DNA, 1530 bp, artificial sequence; identical to SEQ ID NO: 1374
  STR00938_Intestinimonas_butyriciproducens

SEQ ID NO: 1376 - DNA, 1530 bp, artificial sequence; identical to SEQ ID NO: 1369
  STR01013_Intestinimonas_butyriciproducens

SEQ ID NO: 1377 - DNA, 1530 bp, artificial sequence; identical to SEQ ID NO: 1369
  STR01088_Intestinimonas_butyriciproducens

SEQ ID NO: 1378 - DNA, 1530 bp, artificial sequence; identical to SEQ ID NO: 1369
  STR01283_Intestinimonas_butyriciproducens

SEQ ID NO: 1379 - DNA, 1253 bp, artificial sequence; identical to SEQ ID NO: 1372
  STR01313_Intestinimonas_butyriciproducens

SEQ ID NO: 1380 - DNA, 1530 bp, artificial sequence; identical to SEQ ID NO: 1369
  STR01758_Intestinimonas_butyriciproducens

SEQ ID NO: 1381 - DNA, 1530 bp, artificial sequence; identical to SEQ ID NO: 1369
  STR01926_Intestinimonas_butyriciproducens

SEQ ID NO: 1382 - DNA, 1530 bp, artificial sequence; identical to SEQ ID NO: 1369
  STR01954_Intestinimonas_butyriciproducens

SEQ ID NO: 1383 - DNA, 1530 bp, artificial sequence; identical to SEQ ID NO: 1374
  STR02691_Intestinimonas_butyriciproducens

SEQ ID NO: 1384 - DNA, 1530 bp, artificial sequence; identical to SEQ ID NO: 1374
  STR02710_Intestinimonas_butyriciproducens

SEQ ID NO: 1385 - DNA, 1489 bp, artificial sequence
  ERR1022450_03592_Intestinimonas_butyriciproducens
attccggttgatcctgccggaggccactgctatgggggtccgactaagccatgcgagtcatggggcgcgctctgcgcgcaccggcggacggctcagtaacacgtcggtaacctaccctcgggagggggataaccccgggaaactggggctaatcccccataggcctgaggtactggaaggtcctcaggccgaaaggggcatctgcccgcccgaggatgggccggcggccgattaggtagttggtggggtaacggcccaccaagccgaagatcggtacgggccatgagagtgggagcccggagatggacactgagacacgggtccaggccctacggggcgcagcaggcgcgaaacctccgcaatgcgggcaaccgcgacggggggacccccagtgccgtggcacagccacggcttttccggagtgtaaaaagctccgggaataagggctgggcaaggccggtggcagccgccgcggtaataccggcggcccaagtggtggccgctattattgggcctaaagcgtccgtagccgggcccgtaagtccctggcgaaatcccacggctcaaccgtggggcttgctggggatactgcgggccttgggaccgggagaggccgggggtacccctggggtaggggtgaaatcctgtaatcccagggggaccgccagtggcgaaggcgcccggctggaacgggtccgacggtgagggacgaaggccaggggagcgaaccggattagatacccgggtagtcctggctgtaaaggatgcgggctaggtgtcgggcgagcttcgagctcgcccggtgccgaagggaagccgttaagcccgccgcctggggagtacggccgcaaggctgaaacttaaaggaattggcgggggagcactacaaggggtggagcgtgcggtttaattggattcaacgccgggaacctcaccgggggcgacggcaggatgaaggccaggctgaaggtcttgccggacgcgccgagaggaggtgcatggccgccgtcagctcgtaccgtgaggcgtccacttaagtgtggtaacgagcgagacccgcgcccccagttgccagtcctccccgctggggaggaggcactctggggggaccgccggcgataagccggaggaaggagcgggcgacggtaggtcagtatgccccgaaacccccgggctacacgcgcgctacaatgggcgggacaatgggatccgaccccgaaaggggaagggaatcccctaaacccgccctcagttcggatcgcgggctgcaactcgcccgcgtgaagctggaatccctagtacccgcgtgtcatcatcgcgcggcgaatacgtccctgctccttgcacacaccgcccgtcactccacccgagcggggtccgggtgaggcctggtctcccttcggggaggccgggtcgagcctgggctccgtgaggggggagaagtcgtaacaaggtagccgtaggggaacctacggctcgatcacctcct

SEQ ID NO: 1386 - DNA, 1477 bp, artificial sequence
  GCA_900066865_00899_Intestinimonas_butyriciproducens
ttctgtttgatcctggcagatgctactgctattgggattcgattaagccatgcaagtcgaacgagtttagactcgtggcgtacggctcagtaacacgtggataacctacccttaggactgggataaccctgggaaactggggataatactggataggcaattagtcctgtaatggtttttgtttaaatgttttttcgcctaaggatgggtctgcggccgattaggtagttggttaggtaatggcttaccaagccgttgatcggtacgggttgtgagagcaagagcccggagatggaacctgagacaaggttccaggccctacggggcgcagcaggcgcgaaacctccgcaatgtgagaaatcgcgacggggggatcccaagtgccattcttaacgggatggcttttcattagtgtaaagagcttttggaataagagctgggcaagaccggtgccagccgccgcggtaacaccggcagttctagtggtagcagttattattgggcctaaagcgtccgtagccggtttaataagtctctggtgaaatcctgtagcttaactatgggaattgctggagatactattagacttgagatcgggagaggttagaggtactcccagggtagaggtgaaattctgtaatcctgggaggaccgcctgttgcgaaggcgtctaactggaacgattctgacggtgagggacgaaagttaggggcgcgaaccggattagatacccgggtagtcctaactgtaaacgatgcggacttggtgttgggatggctttgagctgtctcagtgccgaagggaagctgttaagtccgccgcctgggaagtacggtcgcaagactgaaacttaaaggaattggcgggggagcaccacaacgcgtggagcctgcggtttaattggattcaacgccggacatctcaccagaggcgacagctgtatgatagccaggttgatgactttgcttgactagctgagaggaggtgcatggccgccgtcagctcgtaccgtgaggcgtcctgttaagtcaggcaacgagcgagacccacgcccttagttaccagcggattctttttttgaatgccgggcacactagggggaccgcctatgataaataggaggaaggagtggacgacggtaggtccgtatgccccgaatcctctgggtaacacgcgggctacaatggctgagacaatgggttccgacaccgaaaggtggaggtaatcctctaaacttagtcgtagtccggattgaggactgtaactcgttctcatgaagctggaatgcgtagtaatcgcgtgtcacaatcgcgcggtgaatacgtccctgctccttgcacacaccgcccgtcacgccacccaaaaagggattggatgaggatgtaatgttttttgttatattcgaatctagtttttttaaggagggcgaagtcgtaacaaggtagccgtaggggaacctgcggctggatcacctcct

SEQ ID NO: 1387 - DNA, 1484 bp, artificial sequence
  GCF_000765135.1_02497_Intestinimonas_butyriciproducens
cttgagagtttgatcctggctcagagtgaacgctggcggcatgcttaacacatgcaagtcgtgcgccccgcaaggggagcggcggacgggtgagtaacacgtaggaatgtgtccggaggtgggggataaccctgggaaactagggctaataccgcatatgggctgaggcccaaagccgtgaggcgccatcggagtagcctgcgcctgattagctagttggtggggtaaaggcctaccaaggcgacgatcagtagctggtctgagaggacgatcagccacactgggactgagacacggcccagactcctacgggaggcagcagtggggaatattggacaatgggcgcaagcctgatccagcaatgccgcgtgtgtgaagaaggtcttcggatcgtaaagcactttcggcggggacgatgatgacggtacccgcagaagaagccccggctaacttcgtgccagcagccgcggtaatacgaagggggctagcgttactcggaattactgggcgtaaagggcgcgtaggcggcgttccaagttaggcgtgaaagtcctgggctcaacctgggaactgcgcttaagactggagtgcttgaggatggaagagggttgtggaattcccagtgtagaggtgaaattcgtagatattgggaagaacaccggtggcgaaggcggcaacctggtccattactgacgctgaggcgcgatagcgtggggagcaaacaggattagataccctggtagtccacgccgtaaacgatgtgcgctggatgttgggggtcctagaccttcagtgtcgtagctaacgcgataagcgcaccgcctggggagtacggccgcaaggttgaaactcaaaggaattgacgggggcccgcacaagcggtggagcatgtggtttaattcgaagcaacgcgcagaaccttaccagctcttgacatgggtaggaccggtgcagagatgcacttttcccgcaagggacctaccgcacaggtgctgcatggctgtcgtcagctcgtgtcgtgagatgttgggttaagtcccgcaacgagcgcaaccctcgcctttagttgccagcatgtttgggtgggcactctaaaggaactgccggtgacaagccggaggaaggtggggatgacgtcaagtcctcatggcccttatgggctgggctacacacgtgctacaatggcggtgacaacgggatgccaggcagcgatgccgagccgatcccaaaaagccgtctcagttcagattgcagcctgcaactcggctgcatgaaggtggaatcgctagtaatcgcggatcagcacgccgcggtgaatacgttcccgggccttgtacacaccgcccgtcacaccatgggagttggttttaccttaagtcggtgcggtaaccgcaaggagctagccgaccacggtaggatcagtgactggggtgaagtcgtaacaaggtagccgtaggggaacctgcggctggatcacctccttt

SEQ ID NO: 1388 - DNA, 1534 bp, artificial sequence
  GCF_001454945.1_00608_Intestinimonas_butyriciproducens
tgaagagtttgatcatggctcagattgaacgctggcggcaggcctaacacatgcaagtcgagcggcagcacgggtacttgtacctggtggcgagcggcggacgggtgagtaatgcctaggaatctgcctggtagtgggggataacgctcggaaacggacgctaataccgcatacgtcctacgggagaaagcaggggaccttcgggccttgcgctatcagatgagcctaggtcggattagctagttggtgaggtaatggctcaccaaggcgacgatccgtaactggtctgagaggatgatcagtcacactggaactgagacacggtccagactcctacgggaggcagcagtggggaatattggacaatgggcgaaagcctgatccagccatgccgcgtgtgtgaagaaggtcttcggattgtaaagcactttaagttgggaggaagggcagttacctaatacgtgattgttttgacgttaccgacagaataagcaccggctaactctgtgccagcagccgcggtaatacagagggtgcaagcgttaatcggaattactgggcgtaaagcgcgcgtaggtggtttgttaagttgaatgtgaaatccccgggctcaacctgggaactgcatccaaaactggcaagctagagtatggtagagggtggtggaatttcctgtgtagcggtgaaatgcgtagatataggaaggaacaccagtggcgaaggcgaccacctggactgatactgacactgaggtgcgaaagcgtggggagcaaacaggattagataccctggtagtccacgccgtaaacgatgtcaactagccgttgggagccttgagctcttagtggcgcagctaacgcattaagttgaccgcctggggagtacggccgcaaggttaaaactcaaatgaattgacgggggcccgcacaagcggtggagcatgtggtttaattcgaagcaacgcgaagaaccttaccaggccttgacatccaatgaactttccagagatggattggtgccttcgggaacattgagacaggtgctgcatggctgtcgtcagctcgtgtcgtgagatgttgggttaagtcccgtaacgagcgcaacccttgtccttagttaccagcacgtaatggtgggcactctaaggagactgccggtgacaaaccggaggaaggtggggatgacgtcaagtcatcatggcccttacggcctgggctacacacgtgctacaatggtcggtacagagggttgccaagccgcgaggtggagctaatctcacaaaaccgatcgtagtccggatcgcagtctgcaactcgactgcgtgaagtcggaatcgctagtaatcgcgaatcagaatgtcgcggtgaatacgttcccgggccttgtacacaccgcccgtcacaccatgggagtgggttgcaccagaagtagctagtctaaccttcggggggacggttaccacggtgtgattcatgactggggtgaagtcgtaacaaggtagccgtaggggaacctgcggctggatcacctcctt

SEQ ID NO: 1389 - DNA, 1532 bp, artificial sequence
  GCF_001454945.1_03158_Intestinimonas_butyriciproducens
tgaagagtttgatcatggctcagattgaacgctggcggcaggcctaacacatgcaagtcgagcggatgaagagagcttgctctctgattcagcggcggacgggtgagtaatgcctaggaatctgcctggtagtgggggacaacgtctcgaaagggacgctaataccgcatacgtcctacgggagaaagcaggggaccttcgggccttgcgctatcagatgagcctaggtcggattagctagttggtgaggtaatggctcaccaaggcgacgatccgtaactggtctgagaggatgatcagtcacactggaactgagacacggtccagactcctacgggaggcagcagtggggaatattggacaatgggcgaaagcctgatccagccatgccgcgtgtgtgaagaaggtcttcggattgtaaagcactttaagttgggaggaagggcagtaagcgaataccttgctgttttgacgttaccgacagaataagcaccggctaactctgtgccagcagccgcggtaatacagagggtgcaagcgttaatcggaattactgggcgtaaagcgcgcgtaggtggtttgttaagttgaatgtgaaatccccgggctcaacctgggaactgcatccaaaactggcaagctagagtagggcagagggtggtggaatttcctgtgtagcggtgaaatgcgtagatataggaaggaacaccagtggcgaaggcgaccacctgggctcatactgacactgaggtgcgaaagcgtggggagcaaacaggattagataccctggtagtccacgccgtaaacgatgtcaactagccgttggaagccttgagcttttagtggcgcagctaacgcattaagttgaccgcctggggagtacggccgcaaggttaaaactcaaatgaattgacgggggcccgcacaagcggtggagcatgtggtttaattcgaagcaacgcgaagaaccttaccaggccttgacatccaatgaactttccagagatggattggtgccttcgggaacattgagacaggtgctgcatggctgtcgtcagctcgtgtcgtgagatgttgggttaagtcccgtaacgagcgcaacccttgtccttagttaccagcacattatggtgggcactctaaggagactgccggtgacaaaccggaggaaggtggggatgacgtcaagtcatcatggcccttacggcctgggctacacacgtgctacaatggtcggtacagagggttgccaagccgcgaggtggagctaatcccagaaaaccgatcgtagtccggatcgcagtctgcaactcgactgcgtgaagtcggaatcgctagtaatcgcgaatcagaatgtcgcggtgaatacgttcccgggccttgtacacaccgcccgtcacaccatgggagtgggttgcaccagaagtagctagtctaaccttcgggaggacggttaccacggtgtgattcatgactggggtgaagtcgtaacaaggtagccgtaggggaacctgcggctggatcacctcctt

SEQ ID NO: 1390 - DNA, 1538 bp, artificial sequence
  GCF_001940005.1_02229_Intestinimonas_butyriciproducens
ttgaagagtttgatcatggctcagattgaacgctggcggcaggcttaacacatgcaagtcgaacggtaacagggagaaagcttgctttctttgctgacgagtggcggacgggtgagtaatgcttgggaatctggcttatggagggggataactacgggaaactgtagctaataccgcgtaatatcttcggattaaagggtgggaccgtaaggccacctgccataagatgagcccaagtgggattaggtagttggtggggtaaaggcctaccaagccgacgatctctagctggtctgagaggatgaccagccacactggaactgagacacggtccagactcctacgggaggcagcagtggggaatattgcacaatggggggaaccctgatgcagccatgccgcgtgaatgaagaaggccttcgggttgtaaagttctttcggtgatgaggaaggcaggtaagttaatagcttacttgattgacgttagtcacagaagaagcaccggctaactccgtgccagcagccgcggtaatacggagggtgcgagcgttaatcggaatgactgggcgtaaagggcacgcaggcggtgacttaagtgagatgtgaaagccccgggcttaacctgggaattgcatttcatactgggtcgctagagtattttagggaggggtagaattccacgtgtagcggtgaaatgcgtagagatgtggaggaataccgaaggcgaaggcagccccttgggaatatactgacgctcatgtgcgaaagcgtggggagcaaacaggattagataccctggtagtccacgctgtaaacgctgtcgatttggggattgggctttgagcttggtgcccgtagctaacgtgataaatcgaccgcctggggagtacggccgcaaggttaaaactcaaatgaattgacgggggcccgcacaagcggtggagcatgtggtttaattcgatgcaacgcgaagaaccttacctactcttgacatccaaagaagaactcagagatgagtttgtgccttcgggaactttgagacaggtgctgcatggctgtcgtcagctcgtgttgtgaaatgttgggttaagtcccgcaacgagcgcaacccttatcctttgttgccagcggttaggccgggaactcaaaggagactgccagtgataaactggaggaaggtggggatgacgtcaagtcatcatggcccttacgagtagggctacacacgtgctacaatggcgtatacagagggaagcaatatggcgacatggagcaaatctcacaaagtacgtctaagtccggattggagtctgcaactcgactccatgaagtcggaatcgctagtaatcgcaaatcagaatgttgcggtgaatacgttcccgggccttgtacacaccgcccgtcacaccatgggagtgggttgtaccagaagtagatagcttaacggaaacgggggcgtttaccacggtatgattcatgactggggtgaagtcgtaacaaggtaaccgtaggggaacctgcggttggatcacctcctt

SEQ ID NO: 1391 - DNA, 1663 bp, artificial sequence
  GCF_001940005.1_02985_Intestinimonas_butyriciproducens
tatggagagtttgatcctggctcaggacgaacgctggcggcgtgcctaacacatgcaagtcgaacggtccagtgtctaacaccgagtgtttaaggggcagatgagtggatgacagcgagagcgcgaagaatgagcgctccacgcatttaataagtgtcaacacagcttctggaatgctgggtgttagatgctggatagtggcggacgggtgagtaacgcgtggataacctacctagtagaccgggacaacccttggaaacgagggctaataccggatgagcttaattggtggcatcgctgattaaggaaagatggcctctgaaaatgctatcgttagtagatggatccgcgtctgattagctagttggtggggtaaaggcctaccaaggcgacgatcagtagccggcctgagagggtgaacggccacactgggactgagacacggcccagactcctacgggaggcagcagtggggaatcttccgcaatggacgaaagtctgacggagcaacgccgcgtgtacgacgaaggccttcgggttgtaaagtactgtcttcagggacgaacggtaagtatgtaaataatgtacttacatgacggtacctgaggaggaagccccggctaactacgtgccagcagccgcggtaatacgtagggggcaagcgttgtccggaatcattgggcgtaaagggcgcgtaggcggatacttaagtctggtgtgaaaacctagggctcaaccctgggactgcatcggaaactgggtatcttgaggacaggagaggaaagtggaattccacgtgtagcggtgaaatgcgtagatatgtggaggaacaccagtggcgaaggcgactttctggactgtaactgacgctgaggcgcgaaagcgtggggagcaaacaggattagataccctggtagtccacgccgtaaacgatgagtgctaggtgtagagggtatcgaccccttctgtgccgcagttaacacactaagcactccgcctggggagtacggccgcaaggttgaaactcaaaggaattgacgggggcccgcacaagcggtggagcatgtggtttaattcgacgcaacgcgaagaaccttaccaaggcttgacatccatagaatctcgtggaaacatgagagtgcccctttggggagctatgagacaggtggtgcatggttgtcgtcagctcgtgtcgtgagatgttgggttaagtcccgcaacgagcgcaacccctatgtttagttgctaacaggtcaagctgagcactctagacagactgccggtgacaaaccggaggaaggtggggatgacgtcaaatcatcatgccccttatgtcttgggctacacacgtgctacaatggccagtacagacggaagcgaagccgtgaggtgaagccaatccgagaaagctggtctcagttcggattgttctctgcaactcgagaacatgaagtcggaatcgctagtaatcgcaggtcagcatactgcggtgaatacgttcccgggccttgtacacaccgcccgtcacaccacgaaagtctgcaacacccgaagccggtgaggtaacccgaaagggagctagccgtcgaaggtggggccgatgattggggtgaagtcgtaacaaggtagccgtatcggaaggtgcggctggatcacctccttt

SEQ ID NO: 1392 - DNA, 1513 bp, artificial sequence
  GCF_003096335.1_03104_Intestinimonas_butyriciproducens
atggagagtttgatcctggctcaggatgaacgctagcgggaggcctaacacatgcaagccgagcggtagagattcttcgggatcttgagagcggcgtacgggtgcggaacacgtgtgcaacctgcctttatcaaggggatagcctttcgaaaggaagattaataccctataatatatgattcggcatcggattatattgaaaactacggtggataaagatgggcacgcgcaagattagctagttggtgaggtaacggctcaccaaggcgacgatctttagggggcctgagagggtgatcccccacactggtactgagacacggaccagactcctacgggaggcagcagtgaggaatattggacaatgggtgcaagcctgatccagccatcccgcgtgtaggaagacggccctatgggttgtaaactacttttatctggggataaacctacttacgtgtaagtagctgaaggtaccagatgaataagcaccggctaactccgtgccagcagccgcggtaatacggagggtgcaagcgttatccggatttattgggtttaaagggtccgtaggcggactgataagtcagtggtgaaatccgacagcttaactgtcgaactgccattgatactgttagtcttgagtaaggttgaagtggctggaataagtagtgtagcggtgaaatgcatagatattacttagaacaccaattgcgaaggcaggtcactaagtcttaactgacgctgatggacgaaagcgtggggagcgaacaggattagataccctggtagtccacgccgtaaacgatgattactcgtttttgggttttaggattcagagactaagcgaaagtgataagtaatccacctggggagtacgttcgcaagaatgaaactcaaaggaattgacgggggcccgcacaagcggtggagcatgtggtttaattcgatgatacgcgaggaaccttaccaagacttaaatgggaaatgacagatttagaaatagatccttcttcggacatttttcaaggtgctgcatggttgtcgtcagctcgtgccgtgaggtgttaggttaagtcctgcaacgagcgcaacccctgtcactagttgctaacattaagttgaggactctagtgagactgcctacgcaagtagagaggaaggtggggatgacgtcaaatcatcacggcccttacgtcttgggccacacacgtgctacaatggccggtacagagggcagctacctagtgataggatgcaaatctcgaaagccggtctcagttcggattggagtctgcaactcgactctatgaagctggaatcgctagtaatcgcgcatcagccatggcgcggtgaatacgttcccgggccttgtacacaccgcccgtcaagccatggaagctgggggtacctgaagtcggtgaccgtaaaaggagctgcctagggtaaaactagtaactagggctaagtcgtaacaaggtagccgtaccggaaggtgcggctggaacatctcatt

SEQ ID NO: 1393 - DNA, 1547 bp, artificial sequence
  GCF_004154955.1_00679_Intestinimonas_butyriciproducens
tcggagagtttgatcctggctcaggacgaacgctggcggcgtgcctaatacatgcaagtcgagcggacagatgggagcttgctccctgatgttagcggcggacgggtgagtaacacgtgggtaacctgcctgtaagactgggataactccgggaaaccggggctaataccggatggttgtttgaaccgcatggttcagacataaaaggtggctttggctaccacttatagatggacccgcggcgcattagctagttggtgaggtaacggctcaccaaggcaacgatgcgtagccgacctgagagggtgatcggccacactgggactgagacacggcccagactcctacgggaggcagcagtagggaatcttccgcaatggacgaaagtctgacggagcaacgccgcgtgagtgatgaaggttttcggatcgtaaagctctgttgttagggaagaacaagtgccgttcaaatagggcggcaccttgacggtacctaaccagaaagccacggctaactacgtgccagcagccgcggtaatacgtaggtggcaagcgttgtccggaattattgggcgtaaagggctcgcaggcggtttcttaagtctgatgtgaaagcccccggctcaaccggggagggtcattggaaactggggaacttgagtgcagaagaggagagtggaattccacgtgtagcggtgaaatgcgtagagatgtggaggaacaccagtggcgaaggcgactctctggtctgtaactgacgctgaggagcgaaagcgtggggagcgaacaggattagataccctggtagtccacgccgtaaacgatgagtgctaagtgttagggggtttccgccccttagtgctgcagctaacgcattaagcactccgcctggggagtacggtcgcaagactgaaactcaaaggaattgacgggggcccgcacaagcggtggagcatgtggtttaattcgaagcaacgcgaagaaccttaccaggtcttgacatcctctgacaatcctagagataggacgtccccttcgggggcagagtgacaggtggtgcatggttgtcgtcagctcgtgtcgtgagatgttgggttaagtcccgcaacgagcgcaacccttgatcttagttgccagcattcagttgggcactctaaggtgactgccggtgacaaaccggaggaaggtggggatgacgtcaaatcatcatgccccttatgacctgggctacacacgtgctacaatggacagaacaaagggcagcgaaaccgcgaggttaagccaatcccacaaatctgttctcagttcggatcgcagtctgcaactcgactgcgtgaagctggaatcgctagtaatcgcggatcagcatgccgcggtgaatacgttcccgggccttgtacacaccgcccgtcacaccacgagagtttgtaacacccgaagtcggtgaggtaaccttttaggagccagccgccgaaggtgggacagatgattggggtgaagtcgtaacaaggtagccgtatcggaaggtgcggctggatcacctccttt

SEQ ID NO: 1394 - DNA, 1547 bp, artificial sequence
  GCF_004154955.1_03117_Intestinimonas_butyriciproducens
tcggagagtttgatcctggctcaggacgaacgctggcggcgtgcctaatacatgcaagtcgagcggacagatgggagcttgctccctgatgttagcggcggacgggtgagtaacacgtgggtaacctacctgtaagactgggataactccgggaaaccggggctaataccggatggttgtttgaaccgcatggttcagacataaaaggtggcttcggctaccacttacagatggacccgcggcgcattagctagttggtgaggtaacggctcaccaaggcgacgatgcgtagccgacctgagagggtgatcggccacactgggactgagacacggcccagactcctacgggaggcagcagtagggaatcttccgcaatggacgaaagtctgacggagcaacgccgcgtgagtgatgaaggttttcggatcgtaaagctctgttgttagggaagaacaagtgccgttcaaatagggcggcaccttgacggtacctaaccagaaagccacggctaactacgtgccagcagccgcggtaatacgtaggtggcaagcgttgtccggaattattgggcgtaaagggctcgcaggcggtttcttaagtctgatgtgaaagcccccggctcaaccggggagggtcattggaaactggggaacttgagtgcagaagaggagagtggaattccacgtgtagcggtgaaatgcgtagagatgtggaggaacaccagtggcgaaggcgactctctggtctgtaactgacgctgaggagcgaaagcgtggggagcgaacaggattagataccctggtagtccacgccgtaaacgatgagtgctaagtgttagggggtttccgccccttagtgctgcagctaacgcattaagcactccgcctggggagtacggtcgcaagactgaaactcaaaggaattgacgggggcccgcacaagcggtggagcatgtggtttaattcgaagcaacgcgaagaaccttaccaggtcttgacatcctctgacaatcctagagataggacgtccccttcgggggcagagtgacaggtggtgcatggttgtcgtcagctcgtgtcgtgagatgttgggttaagtcccgcaacgagcgcaacccttgatcttagttgccagcattcagttgggcactctaaggtgactgccggtgacaaaccggaggaaggtggggatgacgtcaaatcatcatgccccttatgacctgggctacacacgtgctacaatggacagaacaaagggcagcgaaaccgcgaggttaagccaatcccacaaatctgttctcagttcggatcgcagtctgcaactcgactgcgtgaagctggaatcgctagtaatcgcggatcagcatgccgcggtgaatacgttcccgggccttgtacacaccgcccgtcacaccacgagagtttgtaacacccgaagtcggtgaggtaaccttttaggagccagccgccgaaggtgggacagatgattggggtgaagtcgtaacaaggtagccgtatcggaaggtgcggctggatcacctccttt

SEQ ID NO: 1395 - DNA, 907 bp, artificial sequence
  STR00523_Intestinimonas_massiliensis
gcatttgaaactgtagttcttgagtgtcggagaggcaatcggaattccgtgtgtagcggtgaaatgcgtagatatacggaggaacaccagtggcgaaggcggattgctggacgataactgacgctgaggcgcgaaagcgtggggagcaaacaggattagataccctggtagtccacgccgtaaacgatggatactaggtgtggggggtctgaccccctccgtgccgcagctaacgcaataagtatcccacctggggagtacgatcgcaaggttgaaactcaaaggaattgacgggggcccgcacaagcggtggagtatgtggtttaattcgaagcaacgcgaagaaccttaccagggcttgacatcctactaacgaaccagagatggattaggtgcccttcggggaaagtagagacaggtggtgcatggttgtcgtcagctcgtgtcgtgagatgttgggttaagtcccgcaacgagcgcaacccttattgttagttgctacgcaagagcactctagcgagactgccgttgacaaaacggaggaaggtggggacgacgtcaaatcatcatgccccttatgtcctgggccacacacgtactacaatggcggttaacagagggaggcaaagccgcgaggcagagcaaacccctaaaagccgtcccagttcggattgcaggctgaaacccgcctgtatgaagtcggaatcgctagtaatcgcggatcagcatgccgcggtgaatacgttcccgggccttgtacacaccgcccgtcacaccatgagagtcgggaacacccgaagtccgtagcctaactgcaaagggggcgcggccgaaggtgggttcgataattggggtgaagtcgtaacaaggtagccgtatcggaaggtgcggctggatcacctccttt

SEQ ID NO: 1396 - DNA, 1529 bp, artificial sequence
  STR02290_Intestinimonas_massiliensis
tattgagagtttgatcctggctcaggatgaacgctggcggcgtgcttaacacatgcaagtcgaacggaacgccaaggaaagagttttcggacaatggaattggctgtttagtggcggacgggtgagtaacgcgtgagtaacctgccttggagtggggaataacacagtgaaaactgtgctaataccgcatgacatattggtgtcgcatggcactgatatcaaagatttatcgctctgagatggactcgcgtctgattagatagttggcggggtaacggcccaccaagtcgacgatcagtagccggactgagaggttggccggccacattgggactgagacacggcccagactcctacgggaggcagcagtggggaatattgggcaatgggcgcaagcctgacccagcaacgccgcgtgaaggaagaaggctttcgggttgtaaacttcttttaacagggacgaagcaagtgacggtacctgttgaataagccacggctaactacgtgccagcagccgcggtaatacgtaggtggcaagcgttatccggatttactgggtgtaaagggcgtgtaggcgggactgcaagtcagatgtgaaaactatgggctcaacccatagcctgcatttgaaactgtagttcttgagtgtcggagaggcaatcggaattccgtgtgtagcggtgaaatgcgtagatatacggaggaacaccagtggcgaaggcggattgctggacgataactgacgctgaggcgcgaaagcgtggggagcaaacaggattagataccctggtagtccacgccgtaaacgatggatactaggtgtggggggtctgaccccctccgtgccgcagctaacgcaataagtatcccacctggggagtacgatcgcaaggttgaaactcaaaggaattgacgggggcccgcacaagcggtggagtatgtggtttaattcgaagcaacgcgaagaaccttaccagggcttgacatcctactaacgaaccagagatggattaggtgcccttcggggaaagtagagacaggtggtgcatggttgtcgtcagctcgtgtcgtgagatgttgggttaagtcccgcaacgagcgcaacccttattgttagttgctacgcaagagcactctagcgagactgccgttgacaaaacggaggaaggtggggacgacgtcaaatcatcatgccccttatgtcctgggccacacacgtactacaatggcggttaacagagggaggcaaagccgcgaggcagagcaaacccctaaaagccgtcccagttcggattgcaggctgaaacccgcctgtatgaagtcggaatcgctagtaatcgcggatcagcatgccgcggtgaatacgttcccgggccttgtacacaccgcccgtcacaccatgagagtcgggaacacccgaagtccgtagcctaactgcaaagggggcgcggccgaaggtgggttcgataattggggtgaagtcgtaacaaggtagccgtatcggaaggtgcggctggatcacctccttt

SEQ ID NO: 1397 - DNA, 1529 bp, artificial sequence; identical to SEQ ID NO: 1396
  STR02317_Intestinimonas_massiliensis

SEQ ID NO: 1398 - DNA, 1529 bp, artificial sequence; identical to SEQ ID NO: 1396
  STR02331_Intestinimonas_massiliensis

SEQ ID NO: 1399 - DNA, 1529 bp, artificial sequence
  STR02599_Intestinimonas_massiliensis
tattgagagtttgatcctggctcaggatgaacgctggcggcgtgcttaacacatgcaagtcgaacggaacgccaaggaaagagttttcggacaatggaattggttgtttagtggcggacgggtgagtaacgcgtgagtaacctgccttggagtggggaataacacagtgaaaattgtgctaataccgcatgatatattggtgtcgcatggcactgatatcaaagatttatcgctctgagatggactcgcgtctgattagatagttggcggggtaacggcccaccaagtcgacgatcagtagccggactgagaggttggccggccacattgggactgagacacggcccagactcctgcgggaggcagcagtggggaatattgggcaatgggcgcaagcctgacccagcaacgccgcgtgaaggaagaaggctttcgggttgtaaacttcttttaacagggacgaagcaagtgacggtacctgttgaataagccacggctaactacgtgccagcagccgcggtaatacgtaggtggcaagcgttatccggatttactgggtgtaaagggcgtgtaggcgggactgcaagtcagatgtgaaaactatgggctcaacccatagcctgcatttgaaactgtagttcttgagtgtcggagaggcaatcggaattccgtgtgtagcggtgaaatgcgtagatatacggaggaacaccagtggcgaaggcggattgctggacgataactgacgctgaggcgcgaaagcgtggggagcaaacaggattagataccctggtagtccacgccgtaaacgatggatactaggtgtggggggtctgaccccctccgtgccgcagctaacgcaataagtatcccacctggggagtacgatcgcaaggttgaaactcaaaggaattgacgggggcccgcacaagcggtggagtatgtggtttaattcgaagcaacgcgaagaaccttaccagggcttgacatcctactaacgaaccagagatggattaggtgcccttcggggaaagtagagacaggtggtgcatggttgtcgtcagctcgtgtcgtgagatgttgggttaagtcccgcaacgagcgcaacccttattgttagttgctacgcaagagcactctagcgagactgccgttgacaaaacggaggaaggtggggacgacgtcaaatcatcatgccccttatgtcctgggccacacacgtactacaatggcggttaacagagggaggcaaagccgcgaggcagagcaaacccctaaaagccgtcccagttcggattgcaggctgaaacccgcctgtatgaagtcggaatcgctagtaatcgcggatcagcatgccgcggtgaatacgttcccgggccttgtacacaccgcccgtcacaccatgagagtcgggaacacccgaagtccgtagcctaactgcaaagggggcgcggccgaaggtgggttcgataattggggtgaagtcgtaacaaggtagccgtatcggaaggtgcggctggatcacctccttt

SEQ ID NO: 1400 - DNA, 1480 bp, artificial sequence
  GCA_900066895_00870_Intestinimonas_massiliensis
atctgtttgatcctggcagaagctactgctattgggattcgattaagccatgcaagttgaacgaactttttggttcgtggcgtacggctcagtaacacgtggataacctacccttaggactgggataactccgggaaactggggataatactggataggcaatttttcctgtaatggttttttgtttaaatgttttttcgcctaaggatgggtctgcggcagattaggttgttggttgggtaatggcttaccaagcctataatctgtacgggttgtgagagcaagagcccggagatggaacctgagacaaggttccaggccctacggggcgcagcaggcgcgaaacctccgcaatgtgagaaatcgcgacggggggatcccaagtgctattcttaacggggtagcttttcttaagtgtaaagagcttttggaataagagctgggcaagaccggtgccagccgccgcggtaacaccggcagctctagtggtagctgtttttattgggcctgaagcgttcgtagccggtttgataagtctctggtgaaatcttgtagcttaactgtgggaattgctggagatactattaggcttgagatcgggagaggtcagaggtactcctggggtaggggtgaaatcctgtaatcctaggaggaccacctgtggcgaaggcgtctgactagaacgattctgacggtgaggaacgaaagctaggggcgcgaaccggattagatacccgggtagtcctagccgtaaactatgcggacttggtgtgagggtggctttgagccgtcctggtgccgaagggaagctgttaagtccgccgcctgggaagtacggtcgcaagactgaaacttaaaggaattggcgggggagcaccacaacgcgtggagcctgcggtttaattggattcaacgccggagatctcaccagcggcgacagcagtatgattatcaggctgatgaccttatttgacaagctgagaggaggtgcatggccgccgtcagctcgtaccgtgaggcgtcctgttaagtcaggcaacgagcgagacccacgctcttagttaccagcatgttacttttgtaatgatggggacactaaggggaccgccagtgataaattggaggaaggagtggacgacggtaggtccgtatgccccgaatccgctgggctacacgcgggctacaatggcagagacaatgggttccgacgctgaaaagcggtggtaatcttttaaactttgtcgtagttcggattgagggctgtaactcgtcctcatgaagctggaatgcgtagtaatcgcgtgtcataatcgcgcggtgaatacgtccctgctccttgcacacaccgcccgtcacgccacccaaaaagggcttggatgaggctttgatttttgtttgttaaattcgaatctaggttttttgaggagggcgaagtcgtaacaaggtagccgtaggggaacctgcggctggatcacctcct

SEQ ID NO: 1401 - DNA, 1457 bp, artificial sequence
  GCF_001244995.1_00024_Intestinimonas_massiliensis
ctgagagtttgatcctggctcagagcgaacgctggcggcaggcctaacacatgcaagtcgaacgaagtcttcggacttagtggcggacgggtgagtaacacgtgggaacgtgcctttaggttcggaataactcagggaaacttgtgctaataccgaatgtgcccttcgggggaaagatttatcgcctttagagcggcccgcgtctgattagctagttggtgaggtaaaggctcaccaaggcgacgatcagtagctggtctgagaggatgatcagccacattgggactgagacacggcccaaactcctacgggaggcagcagtggggaatcttgcgcaatgggcgaaagcctgacgcagccatgccgcgtgaatgatgaaggtcttaggattgtaaaattctttcaccggggacgataatgacggtacccggagaagaagccccggctaacttcgtgccagcagccgcggtaatacgaagggggctagcgttgctcggaattactgggcgtaaagggagcgtaggcggacatttaagtcaggggtgaaatcccggggctcaacctcggaattgcctttgatactgggtgtcttgagtgtgagagaggtatgtggaactccgagtgtagaggtgaaattcgtagatattcggaagaacaccagtggcgaaggcgacatactggctcattactgacgctgaggctcgaaagcgtggggagcaaacaggattagataccctggtagtccacgccgtaaacgatgattgctagttgtcgggatgcatgcatttcggtgacgcagctaacgcattaagcaatccgcctggggagtacggtcgcaagattaaaactcaaaggaattgacgggggcccgcacaagcggtggagcatgtggtttaattcgaagcaacgcgcagaaccttaccaccttttgacatgcccggaccgccacagagatgtggctttctcttcggagactgggacacaggtgctgcatggctgtcgtcagctcgtgtcgtgagatgttgggttaagtcccgcaacgagcgcaaccctcgccattagttgccatcattcagttgggaactctaatgggactgccggtgctaagccggaggaaggtggggatgacgtcaagtcctcatggcccttacagggtgggctacacacgtgctacaatggcgactacagagggttaatccttaaaagtcgtctcagttcggattgtcctctgcaactcgagggcatgaagttggaatcgctagtaatcgcggatcagcatgccgcggtgaatacgttcccgggccttgtacacaccgcccgtcacaccatgggagttggttctacccgaaggcgctgcgctgaccgcaaggaggcaggcgaccacggtagggtcagcgactggggtgaagtcgtaacaaggtagccgtaggggaacctgcggctggatcacctccttt

SEQ ID NO: 1402 - DNA, 1457 bp, artificial sequence
  GCF_001244995.1_00028_Intestinimonas_massiliensis
ctgagagtttgatcctggctcagagcgaacgctggcggcaggcctaacacatgcaagtcgaacgaagtcttcggacttagtggcggacgggtgagtaacacgtgggaacgtgcctttaggttcggaataactcagggaaacttgtgctaataccgaatgtgcccttcgggggaaagatttatcgcctttagagcggcccgcgtctgattagctagttggtgaggtaaaggctcaccaaggcgacgatcggtagctggtctgagaggatgatcagccacattgggactgagacacggcccaaactcctacgggaggcagcagtggggaatcttgcgcaatgggcgaaagcctgacgcagccatgccgcgtgaatgatgaaggtcttaggattgtaaaattctttcaccggggacgataatgacggtacccggagaagaagccccggctaacttcgtgccagcagccgcggtaatacgaagggggctagcgttgctcggaattactgggcgtaaagggagcgtaggcggacatttaagtcaggggtgaaatcccggggctcaacctcggaattgcctttgatactgggtgtcttgagtgtgagagaggtatgtggaactccgagtgtagaggtgaaattcgtagatattcggaagaacaccagtggcgaaggcgacatactggctcattactgacgctgaggctcgaaagcgtggggagcaaacaggattagataccctggtagtccacgccgtaaacgatgattgctagttgtcgggatgcatgcatttcggtgacgcagctaacgcattaagcaatccgcctggggagtacggtcgcaagattaaaactcaaaggaattgacgggggcccgcacaagcggtggagcatgtggtttaattcgaagcaacgcgcagaaccttaccaccttttgacatgcccggaccgccacagagatgtggctttctcttcggagactgggacacaggtgctgcatggctgtcgtcagctcgtgtcgtgagatgttgggttaagtcccgcaacgagcgcaaccctcgccattagttgccatcattcagttgggaactctaatgggactgccggtgctaagccggaggaaggtggggatgacgtcaagtcctcatggcccttacagggtgggctacacacgtgctacaatggcgactacagagggttaatccttaaaagtcgtctcagttcggattgtcctctgcaactcgagggcatgaagttggaatcgctagtaatcgcggatcagcatgccgcggtgaatacgttcccgggccttgtacacaccgcccgtcacaccatgggagttggttctacccgaaggcgctgcgctgaccgcaaggaggcaggcgaccacggtagggtcagcgactggggtgaagtcgtaacaaggtagccgtaggggaacctgcggctggatcacctccttt

SEQ ID NO: 1403 - DNA, 1546 bp, artificial sequence
  GCF_900626145.1_01007_Intestinimonas_timonensis
ttcggagagtttgatcctggctcaggacgaacgctggcggcgtgcctaatacatgcaagtcgagcggacagaagggagcttgctcccggatgttagcggcggacgggtgagtaacacgtgggtaacctgcctgtaagactgggataactccgggaaaccggagctaataccggatagttccttgaaccgcatggttcaaggatgaaagacggtttcggctgtcacttacagatggacccgcggcgcattagctagttggtgaggtaacggctcaccaaggcgacgatgcgtagccgacctgagagggtgatcggccacactgggactgagacacggcccagactcctacgggaggcagcagtagggaatcttccgcaatggacgaaagtctgacggagcaacgccgcgtgagtgatgaaggttttcggatcgtaaagctctgttgttagggaagaacaagtgcaagagtaactgcttgcaccttgacggtacctaaccagaaagccacggctaactacgtgccagcagccgcggtaatacgtaggtggcaagcgttgtccggaattattgggcgtaaagggctcgcaggcggtttcttaagtctgatgtgaaagccccggctcaaccggggagggtcattggaaactgggaaacttgagtgcagaagaggagagtggaattccacgtgtagcggtgaaatgcgtagagatgtggaggaacaccagtggcgaaggcgactctctggtctgtaactgacgctgaggagcgaaagcgtggggagcgaacaggattagataccctggtagtccacgccgtaaacgatgagtgctaagtgttagggggtttccgccccttagtgctgcagctaacgcattaagcactccgcctggggagtacggtcgcaagactgaaactcaaaggaattgacgggggcccgcacaagcggtggagcatgtggtttaattcgaagcaacgcgaagaaccttaccaggtcttgacatcctctgacaaccctagagatagggctttcccttcggggacagagtgacaggtggtgcatggttgtcgtcagctcgtgtcgtgagatgttgggttaagtcccgcaacgagcgcaacccttgatcttagttgccagcattcagttgggcactctaaggtgactgccggtgacaaaccggaggaaggtggggatgacgtcaaatcatcatgccccttatgacctgggctacacacgtgctacaatggacagaacaaagggctgcgagaccgcaaggtttagccaatcccacaaatctgttctcagttcggatcgcagtctgcaactcgactgcgtgaagctggaatcgctagtaatcgcggatcagcatgccgcggtgaatacgttcccgggccttgtacacaccgcccgtcacaccacgagagtttgcaacacccgaagtcggtgaggtaacctttatggagccagccgccgaaggtggggcagatgattggggtgaagtcgtaacaaggtagccgtatcggaaggtgcggctggatcacctccttt

SEQ ID NO: 1404 - DNA, 1547 bp, artificial sequence
  GCF_900626145.1_02971_Intestinimonas_timonensis
ttcggagagtttgatcctggctcaggacgaacgctggcggcgtgcctaatacatgcaagtcgagcggacagaagggagcttgctcccggatgttagcggcggacgggtgagtaacacgtgggtaacctgcctgtaagactgggataactccgggaaaccggagctaataccggatagttccttgaaccgcatggttcaaggatgaaagacggtttcggctgtcacttacagatggacccgcggcgcattagctagttggtgaggtaacggctcaccaaggcgacgatgcgtagccgacctgagagggtgatcggccacactgggactgagacacggcccagactcctacgggaggcagcagtagggaatcttccgcaatggacgaaagtctgacggagcaacgccgcgtgagtgatgaaggttttcggatcgtaaagctctgttgttagggaagaacaagtgcaagagtaactgcttgcaccttgacggtacctaaccagaaagccacggctaactacgtgccagcagccgcggtaatacgtaggtggcaagcgttgtccggaattattgggcgtaaagggctcgcaggcggtttcttaagtctgatgtgaaagcccccggctcaaccggggagggtcattggaaactgggaaacttgagtgcagaagaggagagtggaattccacgtgtagcggtgaaatgcgtagagatgtggaggaacaccagtggcgaaggcgactctctggtctgtaactgacgctgaggagcgaaagcgtggggagcgaacaggattagataccctggtagtccacgccgtaaacgatgagtgctaagtgttagggggtttccgccccttagtgctgcagctaacgcattaagcactccgcctggggagtacggtcgcaagactgaaactcaaaggaattgacgggggcccgcacaagcggtggagcatgtggtttaattcgaagcaacgcgaagaaccttaccaggtcttgacatcctctgacaaccctagagatagggctttcccttcggggacagagtgacaggtggtgcatggttgtcgtcagctcgtgtcgtgagatgttgggttaagtcccgcaacgagcgcaacccttgatcttagttgccagcattcagttgggcactctaaggtgactgccggtgacaaaccggaggaaggtggggatgacgtcaaatcatcatgccccttatgacctgggctacacacgtgctacaatggacagaacaaagggctgcgagaccgcaaggtttagccaatcccacaaatctgttctcagttcggatcgcagtctgcaactcgactgcgtgaagctggaatcgctagtaatcgcggatcagcatgccgcggtgaatacgttcccgggccttgtacacaccgcccgtcacaccacgagagtttgcaacacccgaagtcggtgaggtaacctttatggagccagccgccgaaggtggggcagatgattggggtgaagtcgtaacaaggtagccgtatcggaaggtgcggctggatcacctccttt

SEQ ID NO: 1405 - DNA, 1526 bp, artificial sequence
  STR02482_Lachnoclostridium_edouardi
atgagagtttgatcctggctcaggatgaacgctggcggcgtgcttaacacatgcaagtcgagcgaagcgataaagcggaagttttcggatggaaggtttattgactgagcggcggacgggtgagtaacgcgtgggtaacctgcctcatacagggggataacagttagaaatgactgctaataccgcataagcgcacagtgctgcatggcacagtgtgaaaaactccggtggtatgagatggacccgcgtctgattagctagttggtaaggtaacggcttaccaaggcgacgatcagtagccgacctgagagggtgaccggccacattgggactgagacacggcccaaactcctacgggaggcagcagtggggaatattgcacaatgggggaaaccctgatgcagcgacgccgcgtgagtgaagaagtatttcggtatgtaaagctctatcagcagggaagaaaatgacggtacctgactaagaagccccggctaactacgtgccagcagccgcggtaatacgtagggggcaagcgttatccggatttactgggtgtaaagggagcgtagacggtatagcaagtctgaagtgaaagcccggggctcaaccgcgggactgctttggaaactgttaaactagagtgctggagaggtaagtggaattcctagtgtagcggtgaaatgcgtagatattaggaggaacaccagtggcgaaggcggcttactggacagtaactgacgttgaggctcgaaagcgtggggagcaaacaggattagataccctggtagtccacgccgtaaacgatgaatactaggtgtcggggagcaaagctcttcggtgccgccgcaaacgcaataagtattccacctggggagtacgttcgcaagaatgaaactcaaaggaattgacggggacccgcacaagcggtggagcatgtggtttaattcgaagcaacgcgaagaaccttaccaagtcttgacatccctctgaccggtacgtaacggtacctttccttcgggacagaggagacaggtggtgcatggttgtcgtcagctcgtgtcgtgagatgttgggttaagtcccgcaacgagcgcaacccttatccttagtagccagcagtaagatgggcactctagggagactgccagggataacctggaggaaggtggggatgacgtcaaatcatcatgccccttatgatttgggctacacacgtgctacaatggcgtaaacaaagggaagcgaacccgtgagggggagcaaatctcataaataacgtctcagttcggattgtagtctgcaactcgactacatgaagctggaatcgctagtaatcgcgaatcagaatgtcgcggtgaatacgttcccgggtcttgtacacaccgcccgtcacaccatgggagtcagtaacgcccgaagtcagtgacccaaccgaaaggagggagctgccgaaggcgggaccgataactggggtgaagtcgtaacaaggtagccgtatcggaaggtgcggctggatcacctccttt

SEQ ID NO: 1406 - DNA, 1473 bp, artificial sequence
  ERR2221391_03155_Lachnoclostridium_edouardi
ttctggttgatcctgccagcggtcactgctatcagtgttcgactaagccatgcgagtcaaatgttcttcgtgaacatggcgtactgctcagtaacacgtggacaacctgccctaaggtctggaataaccccgggaaactggggataataccggataaatcatagatgctggaatgctctgtgattaaaagccccggcgccttaggatggatctgcggcctatcaggtagtagtgggtgtaatgtacctactagcctacgacgggtacgggttgtgagagcaagagcccggagatggattctgagacatgaatccaggccctacggggcgcagcaggcgcgaaaactttacaatgcgggaaaccgcgataaggggacactgagtgccagcaccatgtgttggctgtccgcatgtataaataacatgtgttagcaagggccgggcaagaccggtgccagccgccgcggtaacaccggcggcccgagtggtggccattattattgggtctaaagggtccgtagccggtttgatcagtcttccgggaaatctgacagctcaactgttaggcttctgggggatactgtcagacttggaaccgggagaggtaagaggtactacaggggtaggagtgaaatcttgtaatccttgtgggaccaccagtggcgaaggcgtcttaccagaacgggttcgacggtgagggacgaaagctgggggcacgaaccggattagatacccgggtagtcccagccgtaaacgatgctcgctaggtgtctgggacggtgcgaccgtttcaggtgccgcagggaagccgtgaagcgagccacctgggaagtacggccgcaaggctgaaacttaaaggaattggcgggggagcactacaacgggtggagcctgcggtttaattggactcaacgccggaaaactcacctggggcgacagcaatatgtaggtcaggctgaaggtcttacctgaatcgctgagaggaggtgcatggccgtcgtcagttcgtactgtgaagcatcctgttaagtcaggcaacgagcgagacccgtgcccactgttgccagcatatccttcgggatgatgggtactctgtggggaccgccgctgctaaagcggaggaaggtgcgggctacggtaggtcagtatgccccgaatctccagggctacacgcgggctacaatgaccgggacaatgggtccctaccccgaaaggggttggtaatctcataaacccggccttagttcggatcgagggctgcaactcgccctcgtgaagctggaatccgtagtaatcgcgtttcaatatagcgcggtgaatacgtccctgctccttgcacacaccgcccgtcaaaccacccgagtgaggtatgggtgagggcacggattcatgccgtgttcgaacctaaattttgcaaggggggttaagtcgtaacaaggtagccgtaggggaatctgcggctggatcacctcct

SEQ ID NO: 1407 - DNA, 1536 bp, artificial sequence
  GCF_900240245.1_01605_Lachnoclostridium_edouardi
ttgaagagtttgatcatggctcagattgaacgctggcggcaggcctaacacatgcaagtcgagcggtagcacagggagcttgctcctgggtgacgagcggcggacgggtgagtaatgtctgggaaactgcctgatggagggggataactactggaaacggtagctaataccgcataacgtcttcggaccaaagagggggaccttcgggcctcttgccatcagatgtgcccagatgggattagctagtaggtgaggtaatggctcacctaggcgacgatccctagctggtctgagaggatgaccagccacactggaactgagacacggtccagactcctacgggaggcagcagtggggaatattgcacaatgggcgcaagcctgatgcagccatgccgcgtgtatgaagaaggccttcgggttgtaaagtactttcagcgaggaggaaggcattgtggttaataaccgcagtgattgacgttactcgcagaagaagcaccggctaactccgtgccagcagccgcggtaatacggagggtgcaagcgttaatcggaattactgggcgtaaagcgcacgcaggcggtctgtcaagtcggatgtgaaatccccgggctcaacctgggaactgcattcgaaactggcaggctagagtcttgtagaggggggtagaattccaggtgtagcggtgaaatgcgtagagatctggaggaataccggtggcgaaggcggccccctggacaaagactgacgctcaggtgcgaaagcgtggggagcaaacaggattagataccctggtagtccacgccgtaaacgatgtcgacttggaggttgttcccttgaggagtggcttccggagctaacgcgttaagtcgaccgcctggggagtacggccgcaaggttaaaactcaaatgaattgacgggggcccgcacaagcggtggagcatgtggtttaattcgatgcaacgcgaagaaccttacctactcttgacatccagagaactcgccagagatggcttggtgccttcgggaactctgagacaggtgctgcatggctgtcgtcagctcgtgttgtgaaatgttgggttaagtcccgcaacgagcgcaacccttatcctttgttgccagcggttcggccgggaactcaaaggagactgccagtgataaactggaggaaggtggggatgacgtcaagtcatcatggcccttacgagtagggctacacacgtgctacaatggcgcatacaaagagaagcgacctcgcgagagcaagcggacctcataaagtgcgtcgtagtccggatcggagtctgcaactcgactccgtgaagtcggaatcgctagtaatcgtagatcagaatgctacggtgaatacgttcccgggccttgtacacaccgcccgtcacaccatgggagtgggttgcaaaagaagtaggtagcttaaccttcgggagggcgcttaccactttgtgattcatgactggggtgaagtcgtaacaaggtaaccgtaggggaacctgcggttggatcacctcctt

SEQ ID NO: 1408 - DNA, 983 bp, artificial sequence
  GCF_900240245.1_01738_Lachnoclostridium_edouardi
  misc_feature (469)..(469): n is a, c, g, or t
ttgaagagtttgatcatggctcagattgaacgctggcggcaggcctaacacatgcaagtcgagcggcagcgggaagtagcttgctactttgccggcgagcggcggacgggtgagtaatgtctgggaaactgcctgatggagggggataactactggaaacggtagctaataccgcataacgtcttcggaccaaagagggggaccttcgggcctcttgccatcagatgtgcccagatgggattagctagtaggtgaggtaatggctcacctaggcgacgatccctagctggtctgagaggatgaccagccacactggaactgagacacggtccagactcctacgggaggcagcagtggggaatattgcacaatgggcgcaagcctgatgcagccatgccgcgtgtatgaagaaggccttcgggttgtaaagtactttcagcgaggaggaaggcattgtggttaataaccncagtgattgacgttactcgcagaagaagcaccggctaactccgtgccagcagccgcggtaatacggagggtgcaagcgttaatcggaattactgggcgtaaagcgcacgcaggcggtctgtcaagtcggatgtgaaatccccgggctcaacctgggaactgcattcgaaactggcaggctagagtcttgtagaggggggtagaattccaggtgtagcggtgaaatgcgtagagatctggaggaataccggtggcgaaggcggccccctggacaaagactgacgctcaggtgcgaaagcgtggggagcaaacaggattagataccctggtagtccacgccgtaaacgatgtcgacttggaggttgttcccttgaggagtggcttccggagctaacgcgttaagtcgaccgcctggggagtacggcagcaaggttaaacctcacatgaattgacgggggcacgcaccagcggtggagcatgtggtttaattcgctgcatcgcgaagaaccttacct

SEQ ID NO: 1409 - DNA, 1521 bp, artificial sequence
  GCF_900240245.1_02221_Lachnoclostridium_edouardi
acggagagtttgatcctggctcaggacgaacgctggcggcgtgcttaacacatgcaagtcgaacggtgaagcccttcggggtggatcagtggcgaacgggtgagtaacacgtgggcaatctgccctgcactctgggacaagccctggaaacggggtctaataccggatacgaccttcctccgcatgggggttggtggaaagctccggcggtgcaggatgagcccgcggcctatcagcttgttggtggggtaatggcctaccaaggcgacgacgggtagccggcctgagagggcgaccggccacactgggactgagacacggcccagactcctacgggaggcagcagtggggaatattgcacaatgggcgaaagcctgatgcagcgacgccgcgtgagggacgacggccttcgggttgtaaacctctttcagcagggaagaagcgcaagtgacggtacctgcagaagaagcaccggctaactacgtgccagcagccgcggtaatacgtagggtgcgagcgttgtccggaattattgggcgtaaagagctcgtaggcggcctgtcgcgtcggatgtgaaagcccggggcttaaccccgggtctgcattcgatacgggcaggctagagtgtggtaggggagatcggaattcctggtgtagcggtgaaatgcgcagatatcaggaggaacaccggtggcgaaggcggatctctgggccattactgacgctgaggagcgaaagcgtggggagcgaacaggattagataccctggtagtccacgccgtaaacgttgggaactaggtgttggcgacattccacgtcgtcggtgccgcagctaacgcattaagttccccgcctggggagtacggccgcaaggctaaaactcaaaggaattgacgggggcccgcacaagcagcggagcatgtggcttaattcgacgcaacgcgaagaaccttaccaaggcttgacatatgccggaaacacctggagacaggtgcccccttgtggtcggtatacaggtggtgcatggttgtcgtcagctcgtgtcgtgagatgttgggttaagtcccgcaacgagcgcaacccttgttctgtgttgccagcatgcctttcggggtgatggggactcacaggagactgccggggtcaactcggaggaaggtggggacgacgtcaaatcatcatgccccttatgtcttgggctgcacacgtgctacaatggtcggtacaaagggctgcgatgccgcgaggcggagcgaatcccaaaaagccggcctcagttcggattggggtctgcaactcgaccccatgaagttggagttgctagtaatcgcagatcagcatgctgcggtgaatacgttcccgggccttgtacacaccgcccgtcacgtcacgaaagtcggtaacacccgaagccggtggcctaacccgtaaggggaggagccgtcgaaggtgggaccagcgattgggacgaagtcgtaacaaggtagccgtaccggaaggtgcggctggatcacctccttt

SEQ ID NO: 1410 - DNA, 1521 bp, artificial sequence; identical to SEQ ID NO: 1409
  GCF_900240245.1_02365_Lachnoclostridium_edouardi

SEQ ID NO: 1411 - DNA, 1530 bp, artificial sequence
  STR00425_Lachnospira_pectinoschiza
ttatgagagtttgatcctggctcaggatgaacgctggcggcgtgcttaacacatgcaagtcgaacgaagcatttgcgacagatttcttcggattgaagttgcttatgactgagtggcggacgggtgagtaacgcgtgggtaacctgcctcacacagggggatagcagttggaaacgactgataataccgcataagcgcacagtaccgcatggtacagtgtgaaaaactccggtggtgtgagatggacccgcgtctgattagcttgttggcagggtaacggcctaccaaggcaacgatcagtagccgacctgagagggtgaccggccacattgggactgagacacggcccagactcctacgggaggcagcagtggggaatattgcacaatggaggaaactctgatgcagcgacgccgcgtgagtgaagaagtaattcgttatgtaaagctctatcagcagggaagatagtgacggtacctgactaagaagctccggctaaatacgtgccagcagccgcggtaatacgtatggagcaagcgttatccggatttactgggtgtaaagggagtgtaggtggcatcacaagtcagaagtgaaagcccggggctcaaccccgggactgcttttgaaactgtggagctggagtgcaggagaggcaagtggaattcctagtgtagcggtgaaatgcgtagatattaggaggaacaccagtggcgaaggcggcttgctggactgtaactgacactgaggctcgaaagcgtggggagcaaacaggattagataccctggtagtccacgccgtaaacgatgaatactaggtgtcggggctcataagagcttcggtgccgcagcaaacgcaataagtattccacctggggagtacgttcgcaagaatgaaactcaaaggaattgacggggacccgcacaagcggtggagcatgtggtttaattcgaagcaacgcgaagaaccttaccaagtcttgacatcctcttgcccggtcagtaatgtgaccttttcttcggaacaagagtgacaggtggtgcatggttgtcgtcagctcgtgtcgtgagatgttgggttaagtcccgcaacgagcgcaacccctattcttagtagccagcatataaggtgggcactctaggaagactgccagggataacctggaggaaggtggggatgacgtcaaatcatcatgccccttatgacttgggctacacacgtgctacaatggcgtaaacaaagtgaagcgagagtgtgagcttaagcaaatcacaaaaataacgtctcagttcggattgtagtctgcaactcgactacatgaagctggaatcgctagtaatcgcgaatcagaatgtcgcggtgaatacgttcccgggtcttgtacacaccgcccgtcacaccatgggagtcggaaatgcccgaagtcggtgacctaacgaaagaaggagccgccgaaggcaggtctgataactggggtgaagtcgtaacaaggtagccgtatcggaaggtgcggctggatcacctccttt

SEQ ID NO: 1412 - DNA, 1530 bp, artificial sequence
  STR00897_Lachnospira_pectinoschiza
ttatgagagtttgatcctggctcaggatgaacgctggcggcgtgcttaacacatgcaagtcgaacgaagcatttgcgacagatttcttcggattgaagttgcttatgactgagtggcggacgggtgagtaacgcgtgggtaacctgcctcacacagggggatagcagttggaaacggctgataataccgcataagcgcacagtaccgcatggtacagtgtgaaaaactccggtggtgtgagatggacccgcgtctgattagcttgttggcagggtaacggcctaccaaggcaacgatcagtagccgacctgagagggtgaccggccacattgggactgagacacggcccagactcctacgggaggcagcagtggggaatattgcacaatggaggaaactctgatgcagcgacgccgcgtgagtgaagaagtaattcgttatgtaaagctctatcagcagggaagatagtgacggtacctgactaagaagctccggctaaatacgtgccagcagccgcggtaatacgtatggagcaagcgttatccggatttactgggtgtaaagggagtgtaggtggcatcacaagtcagaagtgaaagcccggggctcaaccccgggactgcttttgaaactgtggagctggagtgcaggagaggcaagtggaattcctagtgtagcggtgaaatgcgtagatattaggaggaacaccagtggcgaaggcggcttgctggactgtaactgacactgaggctcgaaagcgtggggagcaaacaggattagataccctggtagtccacgccgtaaacgatgaatactaggtgtcggggctcataagagcttcggtgccgcagcaaacgcaataagtattccacctggggagtacgttcgcaagaatgaaactcaaaggaattgacggggacccgcacaagcggtggagcatgtggtttaattcgaagcaacgcgaagaaccttaccaagtcttgacatcctcttgcccggtcagtaatgtgaccttttcttcggaacaagagtgacaggtggtgcatggttgtcgtcagctcgtgtcgtgagatgttgggttaagtcccgcaacgagcgcaacccctattcttagtagccagcatttaaggtgggcactctaggaagactgccagggataacctggaggaaggtggggatgacgtcaaatcatcatgccccttatgacttgggctacacacgtgctacaatggcgtaaacaaagtgaagcgagagtgtgagcttaagcaaatcacaaaaataacgtctcagttcggattgtagtctgcaactcgactacatgaagctggaatcgctagtaatcgcgaatcagaatgtcgcggtgaatacgttcccgggtcttgtacacaccgcccgtcacaccatgggagtcggaaatgcccgaagtcggtgacctaacgaaagaaggagccgccgaaggcaggtctgataactggggtgaagtcgtaacaaggtagccgtatcggaaggtgcggctggatcacctccttt

SEQ ID NO: 1413 - DNA, 1530 bp, artificial sequence
  STR02302_Lachnospira_pectinoschiza
ttatgagagtttgatcctggctcaggatgaacgctggcggcgtgcttaacacatgcaagtcgaacgaagcatttgcgacagatttcttcggattgaagttgcttatgactgagtggcggacgggtgagtaacgcgtgggtaacctgcctcacacagggggatagcagttggaaacggctgataataccgcataagcgcacagtaccgcatggtacagtgtgaaaaactccggtggtgtgagatggacccgcgtctgattagcttgttggcagggtaacggcctaccaaggcaacgatcagtagccgacctgagagggtgaccggccacattgggactgagacacggcccagactcctacgggaggcagcagtggggaatattgcacaatggaggaaactctgatgcagcgacgccgcgtgagtgaagaagtaattcgttatgtaaagctctatcagcagggaagatagtgacggtacctgactaagaagctccggctaaatacgtgccagcagccgcggtaatacgtatggagcaagcgttatccggatttactgggtgtaaagggagtgtaggtggcatcacaagtcagaagtgaaagcccggggctcaaccccgggactgcttttgaaactgtggagctggagtgcaggagaggcaagtggaattcctagtgtagcggtgaaatgcgtagatattaggaggaacaccagtggcgaaggcggcttgctggactgtaactgacactgaggctcgaaagcgtggggagcaaacaggattagataccctggtagtccacgccgtaaacgatgaatactaggtgtcggggctcataagagcttcggtgccgcagcaaacgcaataagtattccacctggggagtacgttcgcaagaatgaaactcaaaggaattgacggggacccgcacaagcggtggagcatgtggtttaattcgaagcaacgcgaagaaccttaccaagtcttgacatcctcttgaccggtcagtaatgtggccttttcttcggaacaagagtgacaggtggtgcatggttgtcgtcagctcgtgtcgtgagatgttgggttaagtcccgcaacgagcgcaacccctattcttagtagccagcatttaaggtgggcactctaggaagactgccagggataacctggaggaaggtggggatgacgtcaaatcatcatgccccttatgacttgggctacacacgtgctacaatggcgtaaacaaagtgaagcgagagtgtgagcttaagcaaatcacaaaaataacgtctcagttcggattgtagtctgcaactcgactacatgaagctggaatcgctagtaatcgcgaatcagaatgtcgcggtgaatacgttcccgggtcttgtacacaccgcccgtcacaccatgggagtcggaaatgcccgaagtcggtgacctaacgaaagaaggagccgccgaaggcaggtctgataactggggtgaagtcgtaacaaggtagccgtatcggaaggtgcggctggatcacctccttt

SEQ ID NO: 1414 - DNA, 1530 bp, artificial sequence
  STR02336_Lachnospira_pectinoschiza
ttatgagagtttgatcctggctcaggatgaacgctggcggcgtgcttaacacatgcaagtcgaacgaagcatttgcgacagatttcttcggattgaagttgcttatgactgagtggcggacgggtgagtaacgcgtgggtaacctgcctcacacagggggatagcagttggaaacggctgataataccgcataagcgcacagtaccgcatggtacagtgtgaaaaactccggtggtgtgagatggacccgcgtctgattagcttgttggcagggtaacggcccaccaaggcaacgatcagtagccgacctgagagggtgaccggccacattgggactgagacacggcccagactcctacgggaggcagcagtggggaatattgcacaatggaggaaactctgatgcagcgacgccgcgtgagtgaagaagtaattcgttatgtaaagctctatcagcagggaagatagtgacggtacctgactaagaagctccggctaaatacgtgccagcagccgcggtaatacgtatggagcaagcgttatccggatttactgggtgtaaagggagtgtaggtggcatcacaagtcagaagtgaaagcccggggctcaaccccgggactgcttttgaaactgtggagctggagtgcaggagaggcaagtggaattcctagtgtagcggtgaaatgcgtagatattaggaggaacaccagtggcgaaggcggcttgctggactgtaactgacactgaggctcgaaagcgtggggagcaaacaggattagataccctggtagtccacgccgtaaacgatgaatactaggtgtcggggctcataagagcttcggtgccgcagcaaacgcaataagtattccacctggggagtacgttcgcaagaatgaaactcaaaggaattgacggggacccgcacaagcggtggagcatgtggtttaattcgaagcaacgcgaagaaccttaccaagtcttgacatcctcttgaccggtcagtaatgtggccttttcttcggaacaagagtgacaggtggtgcatggttgtcgtcagctcgtgtcgtgagatgttgggttaagtcccgcaacgagcgcaacccctattcttagtagccagcatttaaggtgggcactctaggaagactgccagggataacctggaggaaggtggggatgacgtcaaatcatcatgccccttatgacttgggctacacacgtgctacaatggcgtaaacaaagtgaagcgagagtgtgagcttaagcaaatcacaaaaataacgtctcagttcggattgtagtctgcaactcgactacatgaagctggaatcgctagtaatcgcgaatcagaatgtcgcggtgaatacgttcccgggtcttgtacacaccgcccgtcacaccatgggagtcggaaatgcccgaagtcggtgacctaacgaaagaaggagccgccgaaggcaggtctgataactggggtgaagtcgtaacaaggtagccgtatcggaaggtgcggctggatcacctccttt

SEQ ID NO: 1415 - DNA, 1467 bp, artificial sequence
  STR02518_Lachnospira_pectinoschiza
ttatgagagtttgatcctggctcaggatgaacgctggcggcgtgcttaacacatgcaagtcgaacgaagcatttgcgacagatttcttcggattgaagttgcttatgactgagtggcggacgggtgagtaacgcgtgggtaacctgcctcacacagggggatagcagttggaaacggctgataataccgcataagcgcacagtaccgcatggtacagtgtgaaaaactccggtggtgtgagatggacccgcgtctgattagcttgttggcagggtaacggcctaccaaggcaacgatcagtagccgacctgagagggtgaccggccacattgggactgagacacggcccagactcctacgggaggcagcagtggggaatattgcacaatggaggaaactctgatgcagcgacgccgcgtgagtgaagaagtaattcgttatgtaaagctctatcagcagggaagatagtgacggtacctgactaagaagctccggctaaatacgtgccagcagccgcggtaatacgtatggagcaagcgttatccggatttactgggtgtaaagggagtgtaggtggcatcacaagtcagaagtgaaagcccggggctcaaccccgggactgcttttgaaactgtggagctggagtgcaggagaggcaagtggaattcctagtgtagcggtgaaatgcgtagatattaggaggaacaccagtggcgaaggcggcttgctggactgtaactgacactgaggctcgaaagcgtggggagcaaacaggattagataccctggtagtccacgccgtaaacgatgaatactaggtgtcggggctcataagagcttcggtgccgcagcaaacgcaataagtattccacctggggagtacgttcgcaagaatgaaactcaaaggaattgacggggacccgcacaagcggtggagcatgtggtttaattcgaagcaacgcgaagaaccttaccaagtcttgacatcctcttgcccggtcagtaatgtggccttttcttcggaacaagagtgacaggtggtgcatggttgtcgtcagctcgtgtcgtgagatgttgggttaagtcccgcaacgagcgcaacccctattcttagtagccagcatttaaggtgggcactctaggaagactgccagggataacctggaggaaggtggggatgacgtcaaatcatcatgccccttatgacttgggctacacacgtgctacaatggcgtaaacaaagtgaagcgagagtgtgagcttaagcaaatcacaaaaataacgtctcagttcggattgtagtctgcaactcgactacatgaagctggaatcgctagtaatcgcgaatcagaatgtcgcggtgaatacgttcccgggtcttgtacacaccgcccgtcacaccatgggagtcggaaatgcccgaagtcggtgacctaacgaaagaaggagccgccgaaggcaggtctg

SEQ ID NO: 1416 - DNA, 1128 bp, artificial sequence
  STR02608_Lachnospira_pectinoschiza
ttatgagagtttgatcctggctcaggatgaacgctggcggcgtgcttaacacatgcaagtcgaacgaagcatttgcgacagatttcttcggattgaagttgcttatgactgagtggcggacgggtgagtaacgcgtgggtaacctgcctcacacagggggatagcagttggaaacggctgataataccgcataagcgcacagtaccgcatggtacagtgtgaaaaactccggtggtgtgagatggacccgcgtctgattagcttgttggcagggtaacggcctaccaaggcaacgatcagtagccgacctgagagggtgaccggccacattgggactgagacacggcccagactcctacgggaggcagcagtggggaatattgcacaatggaggaaactctgatgcagcgacgccgcgtgagtgaagaagtaattcgttatgtaaagctctatcagcagggaagatagtgacggtacctgactaagaagctccggctaaatacgtgccagcagccgcggtaatacgtatggagcaagcgttatccggatttactgggtgtaaagggagtgtaggtggcatcacaagtcagaagtgaaagcccggggctcaaccccgggactgcttttgaaactgtggagctggagtgcaggagaggcaagtggaattcctagtgtagcggtgaaatgcgtagatattaggaggaacaccagtggcgaaggcggcttgctggactgtaactgacactgaggctcgaaagcgtggggagcaaacaggattagataccctggtagtccacgccgtaaacgatgaatactaggtgtcggggctcataagagcttcggtgccgcagcaaacgcaataagtattccacctggggagtacgttcgcaagaatgaaactcaaaggaattgacggggacccgcacaagcggtggagcatgtggtttaattcgaagcaacgcgaagaaccttaccaagtcttgacatcctcttgaccggtcagtaatgtggccttttcttcggaacaagagtgacaggtggtgcatggttgtcgtcagctcgtgtcgtgagatgttgggttaagtcccgcaacgagcgcaacccctattcttagtagccagcatttaa

SEQ ID NO: 1417 - DNA, 1529 bp, artificial sequence
  GCF_003460505.1_01483_Lachnospiraceae_NG17_sp3
tgaagagtttgatcctggctcagattgaacgctggcggcatgccttacacatgcaagtcgaacggcagcacgggtgcttgcacctggtggcgagtggcgaacgggtgagtaatacatcggaacatgtcctgtagtgggggatagcccggcgaaagccggattaataccgcatacgatctgaggatgaaagcgggggaccttcgggcctcgcgctatagggttggccgatggctgattagctagttggtggggtaaaggcctaccaaggcgacgatcagtagctggtctgagaggacgaccagccacactgggactgagacacggcccagactcctacgggaggcagcagtggggaattttggacaatgggcgcaagcctgatccagcaatgccgcgtgtgtgaagaaggccttcgggttgtaaagcacttttgtccggaaagaaatcctaccgactaatactgggtggggatgacggtaccggaagaataagcaccggctaactacgtgccagcagccgcggtaatacgtagggtgcgagcgttaatcggaattactgggcgtaaagcgtgcgcaggcggtttgttaagaccgatgtgaaatccccgggctcaacctgggaactgcattggtgactggcaagctagagtatggcagaggggggtagaattccacgtgtagcagtgaaatgcgtagagatgtggaggaataccgatggcgaaggcagccccctgggccaatactgacgctcatgcacgaaagcgtggggagcaaacaggattagataccctggtagtccacgccctaaacgatgtcaactagttgttggggattcatttccttagtaacgtagctaacgcgtgaagttgaccgcctggggagtacggtcgcaagattaaaactcaaaggaattgacggggacccgcacaagcggtggatgatgtggattaattcgatgcaacgcgaaaaaccttacctacccttgacatggtcggaatcctgctgagaggtgggagtgctcgaaagagagccgatacacaggtgctgcatggctgtcgtcagctcgtgtcgtgagatgttgggttaagtcccgcaacgagcgcaacccttgtccttagttgctacgcaagagcactctaaggagactgccggtgacaaaccggaggaaggtggggatgacgtcaagtcctcatggcccttatgggtagggcttcacacgtcatacaatggtcggaacagagggtcgccaacccgcgagggggagccaatcccagaaaaccgatcgtagtccggattgcactctgcaactcgagtgcatgaagctggaatcgctagtaatcgcggatcagcatgccgcggtgaatacgttcccgggtcttgtacacaccgcccgtcacaccatgggagtgggttttaccagaagtggctagtctaaccgcaaggaggacggtcaccacggtaggattcatgactggggtgaagtcgtaacaaggtagccgtatcggaaggtgcggctggatcacctccttt

SEQ ID NO: 1418 - DNA, 1522 bp, artificial sequence
  GCF_003477765.1_00666_Lachnospiraceae_NG17_sp3
tacggagagtttgatcctggctcaggacgaacgctggcggcgtgcttaacacatgcaagtcgaacggtgataggggagcttgcttctcttgatcagtggcgaacgggtgagtaacacgtgagtaacctgcccttgactctgggataactccgggaaaccggggctaatactggatatgaagcgccccggcatcgggtgtgcttggaaagtttttcggtcaaggatggactcgcggcctatcagcttgttggcggggtaacggcccaccaaggcgtcgacgggtagccggcctgagagggcgaccggccacactgggactgagacacggcccagactcctacgggaggcagcagtggggaatattgcacaatgggcgaaagcctgatgcagcgacgccgcgtgagggatgaaggccttcgggttgtaaacctctttcagtagggaagaagcgaaagtgacggtacctgcagaagaagcgccggctaactacgtgccagcagccgcggtaatacgtagggcgcaagcgttgtccggaattattgggcgtaaagagctcgtaggcggtttgtcgcgtctggtgtgaaaactcaaggctcaaccttgagcttgcatcgggtacgggcagactagagtgcggtaggggtgactggaattcctggtgtagcggtggaatgcgcagatatcaggaggaacaccgatggcgaaggcaggtcactgggccgcaactgacgctgaggagcgaaagcatggggagcgaacaggattagataccctggtagtccatgccgtaaacgttgggcactaggtgtggggctcattccacgagttccgtgccgcagcaaacgcattaagtgccccgcctggggagtacggccgcaaggctaaaactcaaaggaattgacgggggcccgcacaagcggcggagcatgcggattaattcgatgcaacgcgaagaaccttaccaaggcttgacatacaccggaatcggccagagatggtcgcgtcttcggactggtgtacaggtggtgcatggttgtcgtcagctcgtgtcgtgagatgttgggttaagtcccgcaacgagcgcaaccctcgtcctatgttgccagcacgttatggtggggactcataggagactgccggggtcaactcggaggaaggtggggatgacgtcaaatcatcatgccccttatgtcttgggcttcacgcatgctacaatggccggtacaaagggctgcgataccgcgaggtggagcgaatcccaaaaagccggtctcagttcggattggggtctgcaactcgaccccatgaagtcggagtcgctagtaatcgcagatcagcaacgctgcggtgaatacgttcccgggccttgtacacaccgcccgtcaagtcacgaaagtcggtaacacccgaagccggtggcctaaccccttgtgggacggagccgtcgaaggtgggattggcgattgggactaagtcgtaacaaggtagccgtaccggaaggtgcggctggatcacctccttt

SEQ ID NO: 1419 - DNA, 1530 bp, artificial sequence
  STR00500_Lachnospiraceae_NG18_sp7
atgagagtttgatcctggctcaggatgaacgctggcggcgtgcctaacacatgcaagtcgaacgaagctcctgcgacagattccttcgggatgaagatgcttgagacttagtggcggacgggtgagtaacgcgtgggtaacctgccctgtactgggggacaacagttagaaatgactgctaataccgcataagcctacggagtcgcatgactcagcaggaaaaattccggtggtacaggatgggcccgcgtctgattagctagttggtgaggtaatggctcaccaaggcgacgatcagtagccggcttgagagagtgaacggccacattgggactgagacacggcccaaactcctacgggaggcagcagtggggaatattgcacaatgggggaaaccctgatgcagcaacgccgcgtgagtgaagaagtatttcggtatgtaaagctctatcagcagggaagaaaatgacggtacctgactaagaagcaccggctaaatacgtgccagcagccgcggtaatacgtatggtgcaagcgttatccggatttactgggtgtaaagggagcgcaggcggtttggcaagtctgatgtgaaaatccggggctcaactccggaactgcattggaaactgtcagactagagtgtcggagaggtaagtggaattcctagtgtagcggtgaaatgcgtagatattaggaggaacaccagtggcgaaggcggcttactggacgataactgacgctgaggctcgaaagcgtggggagcaaacaggattagataccctggtagtccacgccgtaaacgatgaatactaggtgtcggggcacaaaagtgcttcggtgccgcagcaaacgcattaagtattccacctggggagtacgttcgcaagaatgaaactcaaaggaattgacggggacccgcacaagcggtggagcatgtggtttaattcgaagcaacgcgaagaaccttaccagtccttgacatcccgatgaccgacctgtaacgaggtcttctcttcggagcatcggagacaggtggtgcatggttgtcgtcagctcgtgtcgtgagatgttgggttaagtcccgcaacgagcgcaacccctgtccttagtagccagcagttcggctgggcactctagggagactgccggggataacccggaggaaggtggggacgacgtcaaatcatcatgccccttatgggctgggctacacacgtgctacaatggtgctaacaaagtgaagcaagctggtgacagtaagcaaatcacaaaaatggcatctcagttcggattgtagtctgcaactcgactacatgaagctggaatcgctagtaatcgcagatcagaatgctgcggtgaatacgttcccgggtcttgtacacaccgcccgtcacaccatgggagttggaaatgcccgaagtcagtgacccaaccgcaaggagggagctgccgaaggcaggtctgataactggggtgaagtcgtaacaaggtagccgtatcggaaggtgcggctggatcacctccttt

SEQ ID NO: 1420 - DNA, 1530 bp, artificial sequence
  STR01694_Lachnospiraceae_NG18_sp7
atgagagtttgatcctggctcaggatgaacgctggcggcgtgcctaacacatgcaagtcgaacgaagctcctgcgacagattccttcgggatgaagatgcttgagacttagtggcggacgggtgagtaacgcgtgggtaacctgccctgtactgggggacaacagttagaaatgactgctaataccgcataagcctacggagtcgcatgactcagcaggaaaaattccggtggtacaggatgggcccgcgtctgattagctagttggtgaggtaatggctcaccaaggcgacgatcagtagccggcttgagagagtgaacggccacattgggactgagacacggcccaaactcctacgggaggcagcagtggggaatattgcacaatgggggaaaccctgatgcagcaacgccgcgtgagtgaagaagtatttcggtatgtaaagctctatcagcagggaagaaaatgacggtacctgactaagaagcaccggctaaatacgtgccagcagccgcggtaatacgtatggtgcaagcgttatccggatttactgggtgtaaagggagcgcaggcggtctggcaagtctgatgtgaaaatccggggctcaactccggaactgcattggaaactgtcagactagagtgtcggagaggtaagtggaattcctagtgtagcggtgaaatgcgtagatattaggaggaacaccagtggcgaaggcggcttactggacgataactgacgctgaggctcgaaagcgtggggagcaaacaggattagataccctggtagtccacgctgtaaacgatgaatactaggtgtcggggcacaaaagtgcttcggtgccgcagcaaacgcattaagtattccacctggggagtacgttcgcaagaatgaaactcaaaggaattgacggggacccgcacaagcggtggagcatgtggtttaattcgaagcaacgcgaagaaccttaccagtccttgacatcccgatgaccgacctgtaacgaggtcttctcttcggagcatcggagacaggtggtgcatggttgtcgtcagctcgtgtcgtgagatgttgggttaagtcccgcaacgagcgcaacccctgtccttagtagccagcagttcggctgggcactctagggagactgccggggataacccggaggaaggtggggacgacgtcaaatcatcatgccccttatgggctgggctacacacgtgctacaatggtgctaacaaagtgaagcaagctggtgacagtaagcaaatcacaaaaatggcatctcagttcggattgtagtctgcaactcgactacatgaagctggaatcgctagtaatcgcagatcagaatgctgcggtgaatacgttcccgggtcttgtacacaccgcccgtcacaccatgggagttggaaatgcccgaagtcagtgacccaaccgcaaggagggagctgccgaaggcaggtctgataactggggtgaagtcgtaacaaggtagccgtatcggaaggtgcggctggatcacctccttt

SEQ ID NO: 1421 - DNA, 1530 bp, artificial sequence
  STR02273_Lachnospiraceae_NG18_sp7
atgagagtttgatcctggctcaggatgaacgctggcggcgtgcctaacacatgcaagtcgaacgaagctcctgcgacagattccttcgggatgaagatgcttgagacttagtggcggacgggtgagtaacgcgtgggtaacctgccctgtactgggggacaacagttagaaatgactgctaataccgcataagcctacggagtcgcatgactcagcaggaaaaattccggtggtacaggatgggcccgcgtctgattagctagttggtgaggtaatggctcaccaaggcgacgatcagtagccggcttgagagagtgaacggccacattgggactgagacacggcccaaactcctacgggaggcagcagtggggaatattgcacaatgggggaaaccctgatgcagcaacgccgcgtgagtgaagaagtatttcggtatgtaaagctctatcagcagggaagaaaatgacggtacctgactaagaagcaccggctaaatacgtgccagcagccgcggtaatacgtatggtgcaagcgttatccggatttactgggtgtaaagggagcgcaggcggtctggcaagtctgatgtgaaaatccggggctcaactccggaactgcattggaaactgtcagactagagtgtcggagaggtaagtggaattcctagtgtagcggtgaaatgcgtagatattaggaggaacaccagtggcgaaggcggcttactggacgataactgacgctgaggctcgaaagcgtggggagcaaacaggattagataccctggtagtccacgccgtaaacgatgaatactaggtgtcggggcacaaaagtgcttcggtgccgcagcaaacgcattaagtattccacctggggagtacgttcgcaagaatgaaactcaaaggaattgacggggacccgcacaagcggtggagcatgtggtttaattcgaagcaacgcgaagaaccttaccagtccttgacatcccgatgaccgacctgtaacgaggtcttctcttcggagcatcggagacaggtggtgcatggttgtcgtcagctcgtgtcgtgagatgttgggttaagtcccgcaacgagcgcaacccctgtccttagtagccagcagttcggctgggcactctagggagactgccggggataacccggaggaaggtggggacgacgtcaaatcatcatgccccttatgggctgggctacacacgtgctacaatggtgctaacaaagtgaagcaagctggtgacagtaagcaaatcacaaaaatggcatctcagttcggattgtagtctgcaactcgactacatgaagctggaatcgctagtaatcgcagatcagaatgctgcggtgaatacgttcccgggtcttgtacacaccgcccgtcacaccatgggagttggaaatgcccgaagtcagtgacccaaccgcaaggagggagctgccgaaggcaggtctgataactggggtgaagtcgtaacaaggtagccgtatcggaaggtgcggctggatcacctccttt

SEQ ID NO: 1422 - DNA, 1530 bp, artificial sequence; identical to SEQ ID NO: 1421
  STR02588_Lachnospiraceae_NG18_sp7

SEQ ID NO: 1423 - DNA, 1486 bp, artificial sequence
  GCF_001414325.1_00389_Lachnospiraceae_NG18_sp7
cttgagagtttgatcctggctcagagcgaacgctggcggcaggcttaacacatgcaagtcgagcgggcgcagcaatgcgtcagcggcagacgggtgagtaacgcgtgggaacataccttttggttcggaacaacacagggaaacttgtgctaataccggataagcccttacggggaaagatttatcgccgaaagattggcccgcgtctgattagctagttggtagggtaacggcctaccaaggcgacgatcagtagctggtctgagaggatgatcagccacattgggactgagacacggcccaaactcctacgggaggcagcagtggggaatattggacaatgggggcaaccctgatccagccatgccgcgtgagtgatgaaggccctagggttgtaaagctcttttgtgcgggaagataatgacggtaccgcaagaataagccccggctaacttcgtgccagcagccgcggtaatacgaagggggctagcgttgctcggaatcactgggcgtaaagggtgcgtaggcgggtttttaagtcaggggtgaaatcctggagctcaactccagaactgcctttgatactgaagatcttgagtccgggagaggtgagtggaactgcgagtgtagaggtgaaattcgtagatattcgcaagaacaccagtggcgaaggcggctcactggcccggtactgacgctgaggcacgaaagcgtggggagcaaacaggattagataccctggtagtccacgccgtaaacgatgaatgccagccgttagtgggtttactcactagtggcgcagctaacgctttaagcattccgcctggggagtacggtcgcaagattaaaactcaaaggaattgacgggggcccgcacaagcggtggagcatgtggtttaattcgacgcaacgcgcagaaccttaccagcccttgacatgtccaggaccggtcgcagagatgtgaccttctcttcggagcctggagcacaggtgctgcatggctgtcgtcagctcgtgtcgtgagatgttgggttaagtcccgcaacgagcgcaacccccgtccttagttgctaccatttagttgagcactctaaggagactgccggtgataagccgcgaggaaggtggggatgacgtcaagtcctcatggcccttacgggctgggctacacacgtgctacaatggcggtgacaatgggacgctaaggggcaacccttcgcaaatctcaaaaagccgtctcagttcggattgggctctgcaactcgagcccatgaagttggaatcgctagtaatcgtggatcagcacgccacggtgaatacgttcccgggccttgtacacaccgcccgtcacaccatgggagttggttttacctgaaggtagtgcgctaacccgcaagggaggcagctaaccacggtagggtcagcgactggggtgaagtcgtaacaaggtagccgtaggggaacctgcggctggatcacctccttt

SEQ ID NO: 1424 - DNA, 1513 bp, artificial sequence
  GCF_003477845.1_02069_Lachnospiraceae_NG18_sp7
atggagagtttgatcctggctcaggatgaacgctagcgggaggcctaacacatgcaagccgagcggtagagattcttcggaatcttgagagcggcgcacgggtgcggaacacgtgtgcaacctgcctttatctgggggatagcctttcgaaaggaagattaataccccataatatgttggatggcatcattcgacattgaaaactccggtggatagagatgggcacgcgcaggattagatagttggtgaggtaacggctcaccaagtcaacgatccttagggggcctgagagggtgatcccccacactggtactgagacacggaccagactcctacgggaggcagcagtgaggaatattggacaatgggtgagagcctgatccagccatcccgcgtgaaggacgacggccctatgggttgtaaacttcttttgtatagggataaacctactctcgtgagagtagctgaaggtactatacgaataagcaccggctaactccgtgccagcagccgcggtaatacggagggtgcaagcgttatccggatttattgggtttaaagggtccgtaggcggatgtgtaagtcagtggtgaaatctcacagcttaactgtgaaactgccattgatactgcatgtcttgagtgttgttgaagtagctggaataagtagtgtagcggtgaaatgcatagatattacttagaacaccaattgcgaaggcaggttactaagcaacaactgacgctgatggacgaaagcgtggggagcgaacaggattagataccctggtagtccacgccgtaaacgatgctaactcgtttttggattttcggattcagagactaagcgaaagtgataagttagccacctggggagtacgttcgcaagaatgaaactcaaaggaattgacgggggcccgcacaagcggtggattatgtggtttaattcgatgatacgcgaggaaccttaccaaggcttaaatgggaaatgacaggtttagaaatagacttttcttcggacatttttcaaggtgctgcatggttgtcgtcagctcgtgccgtgaggtgttaggttaagtcctgcaacgagcgcaacccctgtcactagttgccatcattaagttggggactctagtgagactgcctacgcaagtagagaggaaggtggggatgacgtcaaatcatcacggcccttacgccttgggccacacacgtaatacaatggccagtacagagggcagctacacagcgatgtgatgcaaatctcgaaagctggtctcagttcggattggagtctgcaactcgactctatgaagctggaatcgctagtaatcgcgcatcagccatggcgcggtgaatacgttcccgggccttgtacacaccgcccgtcaagccatggaagtctggggtacctgaagtcggtgaccgtaacaggagctgcctagggtaaaacaggtaactagggctaagtcgtaacaaggtagccgtaccggaaggtgcggctggaacatctcatt

SEQ ID NO: 1425 - DNA, 1525 bp, artificial sequence
  GCF_003480745.1_01143_Lachnospiraceae_NG18_sp7
acggagagtttgatcctggctcaggacgaacgctggcggcgtgcttaacacatgcaagtcgaacgatgaaccggcttcggctggggattagtggcgaacgggtgagtaacacgtgggcaatctgccctgcactctgggacaagccctggaaacggggtctaataccggatatgacctggtgaggcatctcattgggtggaaagctccggcggtgcaggatgagcccgcggcctatcagcttgttggtggggtgatggcctaccaaggcgacgacgggtagccggcctgagagggcgaccggccacactgggactgagacacggcccagactcctacgggaggcagcagtggggaatattgcacaatgggcgaaagcctgatgcagcgacgccgcgtgagggatgacggccttcgggttgtaaacctctttcagcagggaagaagcgcaagtgacggtacctgcagaagaagcgccggctaactacgtgccagcagccgcggtaatacgtagggcgcaagcgttgtccggaattattgggcgtaaagagctcgtaggcggcttgtcacgtcggatgtgaaagcccggggcttaaccccgggtctgcattcgatacgggcaggctagagttcggtaggggagatcggaattcctggtgtagcggtgaaatgcgcagatatcaggaggaacaccggtggcgaaggcggatctctgggccgatactgacgctgaggagcgaaagcgtggggagcgaacaggattagataccctggtagtccacgccgtaaacgttgggaactaggtgtgggcgacattccacgttgtccgcgccgcagctaacgcattaagttccccgcctggggagtacggccgcaaggctaaaactcaaaggaattgacgggggcccgcacaagcggcggagcatgtggcttaattcgacgcaacgcgaagaaccttaccaaggcttgacatacaccggaaacatccagagatgggtgcccccttgtggtcggtgtacaggtggtgcatggctgtcgtcagctcgtgtcgtgagatgttgggttaagtcccgcaacgagcgcaacccttgttctgtgttgccagcatgcccttcggggtgatggggactcacaggagactgccggggtcaactcggaggaaggtggggacgacgtcaagtcatcatgccccttatgtcttgggctgcacacgtgctacaatggccggtacaatgagctgcgataccgtgaggtggagcgaatctcaaaaagccggtctcagttcggattggggtctgcaactcgaccccatgaagtcggagtcgctagtaatcgcagatcagcattgctgcggtgaatacgttcccgggccttgtacacaccgcccgtcacgtcacgaaagtcggtaacacccgaagccggtggcccaaccccttgtgggagggagtcgtcgaaggtgggactggcgattgggacgaagtcgtaacaaggtagccgtaccggaaggtgcggctggatcacctccttt

SEQ ID NO: 1426 - DNA, 1458 bp, artificial sequence
  GCF_003481325.1_00389_Lachnospiraceae_NG18_sp7
ttgagagtttgatcctggctcagaacgaacgctggcggcaggcctaacacatgcaagtcgagcgagatcttcggatctagcggcggacgggttagtaacgcgtgggaacgtacccaaaggtagggaatagccactggaaacggtgagtaataccctatgtgcccttcgggggaaagatttatcgcctttggatcggcccgcgttagattagatagttggtggggtaacggcctaccaagtctacgatctatagctggttttagaggatgatcagcaacactgggactgagacacggcccagactcctacgggaggcagcagtggggaatcttggacaatgggggcaaccctgatccagccatgccgcgtgagtgatgaaggccctagggtcgtaaagctctttcgcctgtgaagataatgactgtagcaggtaaagaaaccccggctaactccgtgccagcagccgcggtaatacggagggggttagcgttgttcggaattactgggcgtaaagcgcgcgtaggcggactggaaagttgggggtgaaatcccagggctcaaccctggaactgcctccaaaactatcagtctagagttcgagagaggtgagtggaattccgagtgtagaggtgaaattcgtagatattcggaggaacaccagtggcgaaggcggctcactggctcgatactgacgctgaggtgcgaaagtgtggggagcaaacaggattagataccctggtagtccacaccgtaaacgatgaatgccagtcgtcgggtagcatgctattcggtgacacacctaacggattaagcattccgcctggggagtacggtcgcaagattaaaactcaaaggaattgacgggggcccgcacaagcggtggagcatgtggtttaattcgaagcaacgcgcagaaccttaccaacccttgacatcctcggaccgccagagagatttggctttcacttcggtgaccgagtgacaggtgctgcatggctgtcgtcagctcgtgtcgtgagatgttcggttaagtccggcaacgagcgcaacccacatccttagttgccagcagttcggctgggcactctaaggaaactgcccgtgataagcgggaggaaggtgtggatgacgtcaagtcctcatggcccttacgggttgggctacacacgtgctacaatggcagtgacaatgggttaatcccaaaaaactgtctcagttcggattggggtctgcaactcgaccccatgaagtcggaatcgctagtaatcgcgtaacagcatgacgcggtgaatacgttcccgggccttgtacacaccgcccgtcacaccatgggagttggttctacccgacgacgctgcgctaaccttcgggaggcaggcggccacggtaggatcagcgactggggtgaagtcgtaacaaggtagccgtaggggaacctgcggctggatcacctccttt

SEQ ID NO: 1427 - DNA, 1546 bp, artificial sequence
  GCF_000014405.1_00048_Lactobacillus_delbrueckii
atggagagtttgatcctggctcagaacgaacgctggcggtgcgttttaagcatgcaagtcgaacggcaaggaagcgaattttcgtttctctagagtggcggactggtgagtaacgcgtgggtaatctgcctttgagatggggatagcctctagaaatagggggtaataccgaatacgctcttttggacgtaggtctttgagaggaaaggggctgcggcctcgctcagagatgagcctgcgacccattagcttgttggtggggtaatggcctaccaaggcgtcgatgggtatccgacctgagagggtgaccggacacactgggactgagatacggcccagactcctacgggaggcagcagctaagaatattccgcaatgggcgaaagcctgacggagcgacaccgcgtggatgaggaaggtcgaaagattgtaaagttcttttgccgacgaagaatgaggacgggagggaatgcccgtttgatgacggtagtcgtgcgaataagccccggctaattacgtgccagcagccgcggtaacacgtaaggggcgagcgttgttcggaattattgggcgtaaagggcatgcaggcggactggtaagcctggtgtgaaatccccgagctcaacttgggaactgcactgggtactgctggtctagaatcacggaggggaaaccggaattccaagtgtaggggtggaatctgtagatatttggaagaacaccggtggcgaaggcgggtttctggccgatgattgacgctgaggtgcgaaggtgtggggagcgaacaggattagataccctggtagtccacacagtaaacgatgtacactaggtgttggggcatgagtctcggcgccgacgcgaacgcattaagtgtaccgcctggggagtatgctcgcaagagtgaaactcaaaggaattgacgggggcccgcacaagcggtggagcatgtggtttaattcgatgatacgcgaggaaccttacccgggtttgacatcaagaggagcgccgtagaaatgcggtggcgtagcgatacgcctcttgacaggtgctgcatggctgtcgtcagctcgtgccgtgaggtgttgggttaagtcccgcaacgagcgcaacccctactgccagttgccagcaagtggtgttggggactctggcggaactgccggtgacaaaccggaggaaggtggggatgacgtcaagtcatcatggcccttatgtccggggctacacacgtgctacaatggttgctacagagcgatgcgaggttgtgaagtggagcaaaccgcaaaaaggcaatcgtagtccggattgaagtctgaaactcgacttcatgaagttggaatcgctagtaatcgcacatcagcatggtgcggtgaatgtgttcccgggccttgtacacaccgcccgtcacaccatccgagttggagatacccgaagtcactagcctaacccgcaagggagggcggtgccgaaggtatgtttggtaaggagggtgaagtcgtaacaaggtagccgtaccggaaggtgcggctggatcacctccttt

SEQ ID NO: 1428 - DNA, 1533 bp, artificial sequence
  GCF_000014405.1_00738_Lactobacillus_delbrueckii
ctgaagagtttgatcatggctcagattgaacgctggcggcaggcttaacacatgcaagtcgagcgggggaaggtagcttgctaccgtacctagcggcggacgggtgagtaatgcttaggaatctgcctattagtgggggacaacatctcgaaagggatgctaataccgcatacgtcctacgggagaaagcaggggatcttcggaccttgcgctaatagatgagcctaagtcggattagctagttggtggggtaaaggcctaccaaggcgacgatctgtagcgggtctgagaggatgatccgccacactgggactgagacacggcccagactcctacgggaggcagcagtggggaatattggacaatggggggaaccctgatccagccataccgcgtgtgtgaagaaggccttatggttgtaaagcactttaagcgaggaggaggctactttagttaatacctagggatagtggacgttactcgcagaataagcaccggctaactctgtgccagcagccgcggtaatacagagggtgcgagcgttaatcggatttactgggcgtaaagcgtgcgtaggcggcttattaagtcggatgtgaaatccccgagcttaacttgggaattgcattcgatactggtgagctagagtatgggagaggatggtagaattccaggtgtagcggtgaaatgcgtagagatctggaggaataccgatggcgaaggcagccatctggcctaatactgacgctgaggtacgaaagcatggggagcaaacaggattagataccctggtagtccatgccgtaaacgatgtctactagccgttggggcctttgaggctttagtggcgcagctaacgcgataagtagaccgcctggggagtacggtcgcaagactaaaactcaaatgaattgacgggggcccgcacaagcggtggagcatgtggtttaattcgatgcaacgcgaagaaccttacctggccttgacatactagaaactttccagagatggattggtgccttcgggaatctagatacaggtgctgcatggctgtcgtcagctcgtgtcgtgagatgttgggttaagtcccgcaacgagcgcaacccttttccttacttgccagcatttcggatgggaactttaaggatactgccagtgacaaactggaggaaggcggggacgacgtcaagtcatcatggcccttacggccagggctacacacgtgctacaatggtcggtacaaagggttgctacacagcgatgtgatgctaatctcaaaaagccgatcgtagtccggattggagtctgcaactcgactccatgaagtcggaatcgctagtaatcgcggatcagaatgccgcggtgaatacgttcccgggccttgtacacaccgcccgtcacaccatgggagtttgttgcaccagaagtagctagcctaactgcaaagagggcggttaccacggtgtggccgatgactggggtgaagtcgtaacaaggtagccgtaggggaacctgcggctggatcacctcctt

SEQ ID NO: 1429 - DNA, 1533 bp, artificial sequence; identical to SEQ ID NO: 1428
  GCF_000014405.1_00846_Lactobacillus_delbrueckii

SEQ ID NO: 1430 - DNA, 1533 bp, artificial sequence; identical to SEQ ID NO: 1428
  GCF_000014405.1_01474_Lactobacillus_delbrueckii

SEQ ID NO: 1431 - DNA, 1533 bp, artificial sequence; identical to SEQ ID NO: 1428
  GCF_000014405.1_01600_Lactobacillus_delbrueckii

SEQ ID NO: 1432 - DNA, 1533 bp, artificial sequence; identical to SEQ ID NO: 1428
  GCF_000014405.1_01686_Lactobacillus_delbrueckii

SEQ ID NO: 1433 - DNA, 1543 bp, artificial sequence
  GCF_000014405.1_01746_Lactobacillus_delbrueckii
aatgagagtttgatcctggctcaggacgaacgctggcggcgtgcctaatacatgcaagtagaacgctgaaggaggagcttgcttctccggatgagttgcgaacgggtgagtaacgcgtaggtaacctgcctggtagcgggggataactattggaaacgatagctaataccgcataagagtagatgttgcatgacatttgcttaaaaggtgcaattgcatcactaccagatggacctgcgttgtattagctagttggtggggtaacggctcaccaaggcgacgatacatagccgacctgagagggtgatcggccacactgggactgagacacggcccagactcctacgggaggcagcagtagggaatcttcggcaatggacggaagtctgaccgagcaacgccgcgtgagtgaagaaggttttcggatcgtaaagctctgttgtaagagaagaacgagtgtgagagtggaaagttcacactgtgacggtatcttaccagaaagggacggctaactacgtgccagcagccgcggtaatacgtaggtcccgagcgttgtccggatttattgggcgtaaagcgagcgcaggcggttagataagtctgaagttaaaggctgtggcttaaccatagtacgctttggaaactgtttaacttgagtgcaagaggggagagtggaattccatgtgtagcggtgaaatgcgtagatatatggaggaacaccggtggcgaaagcggctctctggcttgtaactgacgctgaggctcgaaagcgtggggagcaaacaggattagataccctggtagtccacgccgtaaacgatgagtgctaggtgttagaccctttccggggtttagtgccgcagctaacgcattaagcactccgcctggggagtacgaccgcaaggttgaaactcaaaggaattgacgggggcccgcacaagcggtggagcatgtggtttaattcgaagcaacgcgaagaaccttaccaggtcttgacatccctctgaccgctctagagatagagttttccttcgggacagaggtgacaggtggtgcatggttgtcgtcagctcgtgtcgtgagatgttgggttaagtcccgcaacgagcgcaacccctattgttagttgccatcatttagttgggcactctagcgagactgccggtaataaaccggaggaaggtggggatgacgtcaaatcatcatgccccttatgacctgggctacacacgtgctacaatggctggtacaacgagtcgcaagccggtgacggcaagctaatctcttaaagccagtctcagttcggattgtaggctgcaactcgcctacatgaagtcggaatcgctagtaatcgcggatcagcacgccgcggtgaatacgttcccgggccttgtacacaccgcccgtcacaccacgagagtttgtaacacccgaagtcggtgaggtaaccttttaggagccagccgcctaaggtgggatagatgattggggtgaagtcgtaacaaggtagccgtatcggaaggtgcggctggatcacctcctt

SEQ ID NO: 1434 - DNA, 1543 bp, artificial sequence; identical to SEQ ID NO: 1433
  GCF_000014405.1_01960_Lactobacillus_delbrueckii

SEQ ID NO: 1435 - DNA, 1543 bp, artificial sequence; identical to SEQ ID NO: 1433
  GCF_000014405.1_01974_Lactobacillus_delbrueckii

SEQ ID NO: 1436 - DNA, 1518 bp, artificial sequence
  GCF_000179375.1_00928_Lactobacillus_delbrueckii
catggagagtttgatcctggctcaggacgaacgctggcggcgtgcttaacacatgcaagtcgaacgatgacggtggtgcttgcaccgcctgattagtggcgaacgggtgagtaacacgtgagtaacctgccctccacttcgggataacctcgggaaatcgtggctaataccggatatgagcactcatcgcatggtgggtgttggaaagatttatcggtgggggatggactcgcggcctatcagtttgttggtgaggtgatggctcaccaagacgatgacgggtagccggcctgagagggcgaccggccacactgggactgagacacggcccagactcctacgggaggcagcagtggggaatattgcacaatgggcgaaagcctgatgcagcgacgccgcgtgggggatgacggccttcgggttgtaaacccctttcagtagggaagaagcgagagtgacggtacctgcagaagaagcgccggctaactacgtgccagcagccgcggtaatacgtagggcgcaagcgttgtccggaattattgggcgtaaagagcttgtaggtggcttgtcgcgtctgccgtgaaaacccgaggctcaacctcgggcgtgcggtgggtacgggcaggctagagtgtggtaggggagactggaactcctggtgtagcggtgaaatgcgcagatatcaggaagaacaccgatggcgaaggcaggtctctgggccattactgacactgagaagcgaaagcatgggtagcgaacaggattagataccctggtagtccatgccgtaaacgttgggcactaggtgtgggggacattccacgttttccgcgccgtagctaacgcattaagtgccccgcctggggagtacggccgcaaggctaaaactcaaaggaattgacgggggcccgcacaagcggcggagcatgctgattaattcgatgcaacgcgaagaaccttaccaaggcttgacatgcactggacggctgcagagatgtggctttctttggactggtgcacaggtggtgcatggttgtcgtcagctcgtgtcgtgagatgttgggttaagtcccgcaacgagcgcaaccctcgttctatgttgccagcacgtgatggtggggactcataggagactgccggggtcaactcggaggaaggtggggacgacgtcaaatcatcatgccccttatgtcttgggcttcaagcatgctacaatggtcggtacaatgggttgcgaaactgtgaggtggagcgaatcccaaaaagccggcctcagttcggattggggtctgcaactcgaccccatgaagtcggagtcgctagtaatcgcagatcagcaacgctgcggtgaatacgttcccgggccttgtacacaccgcccgtcaagtcacgaaagtcggtaacacccgaagccagtggcccatcctcgtgagggagctgtctaaggtgggatcggtgattgggactaagtcgtaacaaggtagccgtaccggaaggtgcggctggatcacctccttt

SEQ ID NO: 1437 - DNA, 1523 bp, artificial sequence
  GCF_000182835.1_00035_Lactobacillus_delbrueckii
acggagagtttgatcctggctcaggacgaacgctggcggcgtgcttaacacatgcaagtcgaacgatgaaccacttcggtggggattagtggcgaacgggtgagtaacacgtgggcaatctgcccttcactctgggacaagccctggaaacggggtctaataccggatatgaccatcttgggcatccttgatggtgtaaagctccggcggtgaaggatgagcccgcggcctatcagcttgttggtgaggtaatggctcaccaaggcgacgacgggtagccggcctgagagggcgaccggccacactgggactgagacacggcccagactcctacgggaggcagcagtggggaatattgcacaatgggcgaaagcctgatgcagcgacgccgcgtgagggatgacggccttcgggttgtaaacctctttcagcagggaagaagcgaaagtgacggtacctgcagaagaagcgccggctaactacgtgccagcagccgcggtaatacgtagggcgcaagcgttgtccggaattattgggcgtaaagagctcgtaggcggcttgtcacgtcgattgtgaaagcccgaggcttaacctcgggtctgcagtcgatacgggctagctagagtgtggtaggggagatcggaattcctggtgtagcggtgaaatgcgcagatatcaggaggaacaccggtggcgaaggcggatctctgggccattactgacgctgaggagcgaaagcgtggggagcgaacaggattagataccctggtagtccacgccgtaaacggtgggaactaggtgttggcgacattccacgtcgtcggtgccgcagctaacgcattaagttccccgcctggggagtacggccgcaaggctaaaactcaaaggaattgacgggggcccgcacaagcggcggagcatgtggcttaattcgacgcaacgcgaagaaccttaccaaggcttgacatacaccggaaacgtctggagacaggcgcccccttgtggtcggtgtacaggtggtgcatggctgtcgtcagctcgtgtcgtgagatgttgggttaagtcccgcaacgagcgcaacccttgttctgtgttgccagcatgcccttcggggtgatggggactcacaggagaccgccggggtcaactcggaggaaggtggggacgacgtcaagtcatcatgccccttatgtcttgggctgcacacgtgctacaatggccggtacaatgagctgcgataccgtgaggtggagcgaatctcaaaaagccggtctcagttcggattggggtctgcaactcgaccccatgaagtcggagtcgctagtaatcgcagatcagcattgctgcggtgaatacgttcccgggccttgtacacaccgcccgtcacgtcacgaaagttggtaacacccgaagccggtggcccaaccccttgtgggagggagctgtcgaaggtgggactagcgattgggacgaagtcgtaacaaggtagccgtaccggaaggtgcggctggatcacctccttt

SEQ ID NO: 1438 - DNA, 1533 bp, artificial sequence
  GCF_000182835.1_00740_Lactobacillus_delbrueckii
ctgaagagtttgatcatggctcagattgaacgctggcggcaggcctaacacatgcaagtcgagcggatgagaggagcttgctcctcgattcagcggcggacgggtgagtaatgcctaggaatctgcctagtagtgggggacaacgtttcgaaaggaacgctaataccgcatacgtcctacgggagaaagtgggggatcttcggacctcacgctattagatgagcctaggtcggattagctagttggtagggtaaaggcctaccaaggcgacgatccgtaactggtctgagaggatgatcagtcacactggaactgagacacggtccagactcctacgggaggcagcagtggggaatattggacaatgggcgaaagcctgatccagccatgccgcgtgtgtgaagaaggccctcgggtcgtaaagcactttaagttgggaggaagggcttacagcgaatacctgtgagttttgacgttaccgacagaataagcaccggctaacttcgtgccagcagccgcggtaatacgaagggtgcaagcgttaatcggaattactgggcgtaaagcgcgcgtaggtggcttgataagttggatgtgaaatccccgggctcaacctgggaactgcatccaaaactgtctggctagagtgtggtagagggtagtggaatttccagtgtagcggtgaaatgcgtagatattggaaggaacaccagtggcgaaggcgactacctggactaacactgacactgaggtgcgaaagcgtggggagcaaacaggattagataccctggtagtccacgccgtaaacgatgtcaactagccgttgggatccttgagatcttagtggcgcagctaacgcattaagttgaccgcctggggagtacggccgcaaggttaaaactcaaatgaattgacgggggcccgcacaagcggtggagcatgtggtttaattcgaagcaacgcgaagaaccttacctggccttgacatgctgagaactttccagagatggattggtgccttcgggaactcagacacaggtgctgcatggctgtcgtcagctcgtgtcgtgagatgttgggttaagtcccgtaacgagcgcaacccttgtccttagttaccagcacgttatggtgggcactctaaggagactgccggtgacaaaccggaggaaggtggggatgacgtcaagtcatcatggcccttacggccagggctacacacgtgctacaatggtcggtacaaagggttgccaagccgcgaggtggagctaatcccataaaaccgatcgtagtccggatcgcagtctgcaactcgactgcgtgaagtcggaatcgctagtaatcgtgaatcagaacgtcacggtgaatacgttcccgggccttgtacacaccgcccgtcacaccatgggagtgggttgctccagaagtagctagtctaaccttcgggaggacggttaccacggagtgattcatgactggggtgaagtcgtaacaaggtagccgtaggggaacctgcggctggatcacctcctt

SEQ ID NO: 1439 - DNA, 1539 bp, artificial sequence
  GCF_000182835.1_00846_Lactobacillus_delbrueckii
ttgaagagtttgatcatggctcagattgaacgctggcggcaggcctaacacatgcaagtcgaacggtagcacagaggagcttgctccttgggtgacgagtggcggacgggtgagtaatgcctgggaaactgcccgatggagggggataactactggaaacggtagctaataccgcataacgtcttcggaccaaagtgggggaccttcgggcctcacaccatcggatgtgcccaggtgggattagctagtaggtggggtaatggctcacctaggcgacgatccctagctggtctgagaggatgaccagccacactggaactgagacacggtccagactcctacgggaggcagcagtggggaatattgcacaatgggcgcaagcctgatgcagccatgccgcgtgtatgaagaaggccttcgggttgtaaagtactttcagtggggaggaaggcgatgaggttaatagcctcgtcgattgacgttacccgcagaagaagcaccggctaactccgtgccagcagccgcggtaatacggagggtgcaagcgttaatcggaattactgggcgtaaagcgcacgcaggcggtctgtcaagtcggatgtgaaatccccgggctcaacctgggaactgcattcgaaactggcagactagagtcttgtagaggggggtagaattccaggtgtagcggtgaaatgcgtagagatctggaggaataccggtggcgaaggcggccccctggacaaagactgacgctcaggtgcgaaagcgtggggagcaaacaggattagataccctggtagtccacgccgtaaacgatgtcgacttggaggttgtgcccttgaggcgtggcttccggagctaacgcgttaagtcgaccgcctggggagtacggccgcaaggttaaaactcaaatgaattgacgggggcccgcacaagcggtggagcatgtggtttaattcgatgcaacgcgaagaaccttacctggccttgacatccacggaattcggcagagatgccttagtgccttcgggaaccgtgagacaggtgctgcatggctgtcgtcagctcgtgttgtgaaatgttgggttaagtcccgcaacgagcgcaacccttatcctttgttgccagcgagtaatgtcgggaactcaaaggagactgccggtgataaaccggaggaaggtggggatgacgtcaagtcatcatggcccttacggccagggctacacacgtgctacaatggcgcatacaaagagaagcgacctcgcgagagcaagcggacctcataaagtgcgtcgtagtccggatcggagtctgcaactcgactccgtgaagtcggaatcgctagtaatcgtagatcagaatgctacggtgaatacgttcccgggccttgtacacaccgcccgtcacaccatgggagtgggttgcaaaagaagtaggtagcttaaccttcgggagggcgcttaccactttgtgattcatgactggggtgaagtcgtaacaaggtaaccgtaggggaacctgcggttggatcacctcctt

SEQ ID NO: 1440 - DNA, 1514 bp, artificial sequence
  GCF_000182835.1_01538_Lactobacillus_delbrueckii
ttggagagtttgatcctggctcaggacgaacgctggcggcgtgcttaacacatgcaagtcgaacgaggtccatggagcttgctccggaagacctagtggcgaacgggtgcgtaacacgtgagaaacctgccccggacttgggaataacagtcggaaacgactgctaataccgaataccttcacaccgtcgcatggcggagtgaagaaagcttttgcggtttgggagggtctcgcggcctatcagctagttggtgaggtaacggctcaccaaggcgtcgacgggtagctggtctgagaggatgatcagccacactgggactgagacacggcccagactcctacgggaggcagcagtggggaatattgcacaatgggcgcaagcctgatgcagcaacgccgcgtgcgggaagaaggccctagggttgtaaaccgctttcagcagggaagaaaatgacggtacctgcagaagaaggtgcggccaactacgtgccagcagccgcggtgacacgtaggcaccaagcgttgtccggatttattgggcgtaaagagctcgtaggcggttttgtaagtcgggtgtgaaaactctgggctcaacccagagaggccacccgatactgcaatgacttgagtacggtaggggagcggggaattcctggtgtagcggtgaaatgcgcagatatcaggaggaacaccagtggcgaaggcgccgctctgggccgtaactgacgctgaggagcgaaagcatgggtagcaaacaggattagataccctggtagtccatgccgtaaacgttgggcactaggtgtgggtctcaaccaacgagatccgcgccgtcgctaacgcattaagtgccccgcctggggagtacggtcgcaagactaaaactcaaaggaattgacgggggcccgcacaagcagcggagcgtgttgcttaattcgatgcaacgcgaagaaccttacctgggtttgacatgtagggaaaagctctagagatagggtgtccttcggggctctacacaggtggtgcatggctgtcgtcagctcgtgtcgtgagatgttgggttaagtcccgcaacgagcgcaacccttatcctatgttgccagcatttagttggggactcgtaggagactgccggggtcaactcggaggaaggtggggatgacgtcaagtcatcatgccccttatgcccagggctgcaaacacgctacaatggacggtacagagggctgcgatcccgcgagggtgagcgaatcccacaaagccgttctcagttcggattggagtctgcaactcgactccatgaagccggagttgctagtaatcctggatcagcacgccagggtgaatacgttcccgggccttgtacacaccgcccgtcacaccacgaaagtcggtaacacccgaagccggtggcccaaccctctgggagggagccgtcgaaggtgggatcggtgattggggtgaagtcgtaacaaggtagccgtaccggaaggtgcggctggatcacctccttt

SEQ ID NO: 1441 - DNA, 1260 bp, artificial sequence
  GCF_000182835.1_01657_Lactobacillus_delbrueckii
ggagagtttgatcctggctcaggacgaacgctggcggcgtgcctaatacatgcaagtcgagcggacagaagggagcttgctcccggatgttagcggcggacgggtgagtaacacgtgggtaacctgcctgtaagactgggataactccgggaaaccggagctaataccggatagttccttgaaccgcatggttcaaggatgaaagacggtttcggctgtcacttacagatggacccgcggcgcattagctagttggtggggtaatggctcaccaaggcgacgatgcgtagccgacctgagagggtgatcggccacactgggactgagacacggcccagactcctacgggaggcagcagtagggaatcttccgcaatggacgaaagtctgacggagcaacgccgcgtgagtgatgaaggttttcggatcgtaaagctctgttgttagggaagaacaagtgcgagagtaactgctcgcaccttgacggtacctaaccagaaagccacggctaactacgtgccagcagccgcggtaatacgtaggtggcaagcgttgtccggaattattgggcgtaaagggctcgcaggcggtttcttaagtctgatgtgaaagcccccggctcaaccggggagggtcattggaaactgggaaacttgagtgcagaagaggagagtggaattccacgtgtagcggtgaaatgcgtagagatgtggaggaacaccagtggcgaaggcgactctctggtctgtaactgacgctgaggagcgaaagcgtggggagcgaacaggattagataccctggtagtccacgccgtaaacgatgagtgctaagtgttagggggtttccgccccttagtgctgcagctaacgcattaagcactccgcctggggagtacggtcgcaagactgaaactcaaaggaattgacgggggcccgcacaagcggtggagcatgtggtttaattcgaagcaacgcgaagaaccttaccaggtcttgacatcctctgacaaccctagagatagggctttcccttcggggacagagtgacaggtggtgcatggttgtcgtcagctcgtgtcgtgagatgttgggttaagtcccgcaacgagcgcaacccttgatcttagttgccagcattcagttgggcactctaaggtgactgccggtgacaaaccggaggaaggtggggatgacgtcaaatcatcatgccccttatgacctgggctacacacgtgctacaatggacagaacaaagggctgc

SEQ ID NO: 1442 - DNA, 1525 bp, artificial sequence
  GCF_000182835.1_01749_Lactobacillus_delbrueckii
ttggagagtttgatcctggctcagattgaacgctggcggcatgcctaacacatgcaagtcgaacgggttgtagcaatacaactagtggcggacgggtgaggaatacataggaatttgcctttaggtgggggatagtccggggaaactcggtttaataccgcatgatgtcgcaagaccaaagcaggggatcgcaagaccttgcgcctttagagaagcctatgtcggattagctagttggtagggtaatggcctaccaaggcgacgatccgtaactggtctgagaggacgatcagtcacaccggaactgagacacggtccggactcctacgggaggcagcagtggggaatattggacaatgggcgaaagcctgatccagcaatgccgcgtgtgtgaagaaggccttcgggttgtaaagcactttaggctgggaagaaaaagcttcacctaatacgtggagccttgacggtaccagcggaataagcaccggctaactctgtgccagcagccgcggtaatacagagggtgctagcgttaatcggatttactgggcgtaaagcgtgtgtaggcggttcgttaagtcggatgtgaaagccctgggctcaacctaggaattgcattcgatactggcgggctagagtacggtagagggcggcggaattccgggtgtagcggtgaaatgcgtagatatccggaggaacaccgatggcgaaggcaaccgcctgggcctgtactgacgctgagacacgaaagcgtggggagcaaacaggattagataccctggtagtccacgccgtaaacgatgagaacttgacgtcggtttgctctgcgaatcggtgtcgtagctaacgcgctaagttctccgcctggggagtacggccgcaaggttgaaactcaaaggaattgacgggggcccgcacaagcggtggagtatgtggtttaattcgatgcaacgcgaagaaccttacctggtcttgacatgtcagaaaccctgcagagatgcgggggtgccttcgggaatctgaacacaggtgctgcatggctgtcgtcagctcgtgtcgtgagatgttgggttaagtcccgcaacgagcgcaacccttgcccttagttgccatcattcagttgggcactctaaggggaccgccggtgacaaaccggaggaaggtggggatgacgtcaagtcatcatggcccttatgaccagggctacacacgtactacaatggtcggtacagagggttgccaacccgcgagggggagctaatcccaaaaagccgatcgtagtccggattggagtctgcaactcgactccatgaagtcggaatcgctagtaatcgcggatcagcacttgtcgcggtgaatacgttcccgggccttgtacacaccgcccgtcacaccatggaagtctgctgcaccagaagtaggtagtctaaccgcaaggggggcgcctaccacggtgtggccgatgactggggtgaagtcgtaacaaggtagccgtaggggaacctgcggctggatcacctccttt

SEQ ID NO: 1443 - DNA, 1533 bp, artificial sequence
  GCF_000182835.1_01810_Lactobacillus_delbrueckii
tgaagagtttgatcatggctcagattgaacgctggcggcaggcttaacacatgcaagtcgagcggagtgatggtgcttgcactatcacttagcggcggacgggtgagtaatgcttaggaatctgcctattagtgggggacaacatttcgaaaggaatgctaataccgcatacgtcctacgggagaaagcaggggatcttcggaccttgcgctaatagatgagcctaagtcggattagctagttggtggggtaaaggcctaccaaggcgacgatctgtagcgggtctgagaggatgatccgccacactgggactgagacacggcccagactcctacgggaggcagcagtggggaatattggacaatgggcgcaagcctgatccagccatgccgcgtgtgtgaagaaggccttatggttgtaaagcactttaagcgaggaggaggctactgaagttaataccttcagatagtggacgttactcgcagaataagcaccggctaactctgtgccagcagccgcggtaatacagagggtgcaagcgttaatcggatttactgggcgtaaagcgcgcgtaggcggctaattaagtcaaatgtgaaatccccgagcttaacttgggaattgcattcgatactggttagctagagtgtgggagaggatggtagaattccaggtgtagcggtgaaatgcgtagagatctggaggaataccgatggcgaaggcagccatctggcctaacactgacgctgaggtgcgaaagcatggggagcaaacaggattagataccctggtagtccatgccgtaaacgatgtctactagccgttggggcctttgaggctttagtggcgcagctaacgcgataagtagaccgcctggggagtacggtcgcaagactaaaactcaaatgaattgacgggggcccgcacaagcggtggagcatgtggtttaattcgatgcaacgcgaagaaccttacctggccttgacatagtaagaactttccagagatggattggtgccttcgggaacttacatacaggtgctgcatggctgtcgtcagctcgtgtcgtgagatgttgggttaagtcccgcaacgagcgcaacccttttccttatttgccagcgagtaatgtcgggaactttaaggatactgccagtgacaaactggaggaaggcggggacgacgtcaagtcatcatggcccttacggccagggctacacacgtgctacaatggtcggtacaaagggttgctacctagcgataggatgctaatctcaaaaagccgatcgtagtccggattggagtctgcaactcgactccatgaagtcggaatcgctagtaatcgcggatcagaatgccgcggtgaatacgttcccgggccttgtacacaccgcccgtcacaccatgggagtttgttgcaccagaagtaggtagtctaaccgcaaggaggacgcttaccacggtgtggccgatgactggggtgaagtcgtaacaaggtagccgtaggggaacctgcggctggatcacctcctt

SEQ ID NO: 1444 - DNA, 1514 bp, artificial sequence
  GCF_000182835.1_02056_Lactobacillus_delbrueckii
atgaagagtttgatcctggctcaggatgaacgctagcggcaggcctaacacatgcaagtcgaacggtaacagcacttcggtggctgacgagtggcgcacgggtgagtaacgcgtatgcaacctacctttcacagtgggatagcccagagaaatttggattaataccgcatagtatacgggaccagcattggacctgtattaaacatttatgggtgagagatgggcatgcgttctattagttagttggtaaggtaacggcttaccaagaccgcgatagataggggccctgagagggggatcccccacactggtactgagacacggaccagactcctacgggaggcagcagtgaggaatattggacaatgggcgcaagcctgatccagccatgccgcgtgcaggaagacggccctatgggttgtaaactgcttttatacaggaagaaacaccccgacgtgtcgggacttgacggtactgtaagaataaggatcggctaactccgtgccagcagccgcggtaatacggaggatccaagcgttatccggaatcattgggtttaaagggtccgtaggtggacgattaagtcagaggtgaaatcctgcagctcaactgtagaattgcctttgaaactggttgtcttgaatcattatgaagtggttagaatatgtggtgtagcggtgaaatgcatagatatcacatagaataccgattgcgaaggcagatcactaataatgtattgacactgatggacgaaagcgtggggagcgaacaggattagataccctggtagtccacgccgtaaacgatggatactagttgttcgggcttcggcctgagtgactaagcgaaagtgataagtatcccacctggggagtacgttcgcaagaatgaaactcaaaggaattgacgggggcccgcacaagcggtggagcatgtggtttaattcgatgatacgcgaggaaccttaccagggcttaaatgtggattgacaggtctagagatagactttccttcgggcaatctacaaggtgctgcatggttgtcgtcagctcgtgccgtgaggtgtcaggttaagtcctataacgagcgcaacccctgttgttagttgccagcgagtcatgtcgggaactctagcaagactgccagtgcaaactgtgaggaaggtggggatgacgtcaaatcatcacggcccttacgtcctgggctacacacgtgctacaatggtaggtacagagagcagccactgggcgaccaggagcgaatctataaaacctatctcagttcggatcggagtctgcaactcgactccgtgaagctggaatcgctagtaatcggatatcagccatgatccggtgaatacgttcccgggccttgtacacaccgcccgtcaagccatggaagccgggagtgcctgaagtccgtcaccgcaaggagcggcctagggtaaaattggtaactagggctaagtcgtaacaaggtagccgtaccggaaggtgcggctggaacacctcctt

SEQ ID NO: 1445 - DNA, 1530 bp, artificial sequence
  GCF_000182835.1_02074_Lactobacillus_delbrueckii
ttggagagtttgatcctggctcaggacgaacgctggcggcgtgcttcacacatgcaagtcgaacggaaaggcccgcttgcgggtactcgagtggcgaacgggtgagtaacacgtgggtaacctgcccccatctctgggataaccgttggaaacggcggctaataccggatacgaccacgctctgcatggggtgtggtggaaagtttttgcggttggggaggggcccgcggcctatcagctggttggtggggtgatggcctaccaaggcgttgacgggtagccggcctgagagggcggtcggtcacattgggactgagatacggcccagactcctacgggaggcagcagtggggaattttgcacaatgggcggaagcctgatgcagcgacgccgcgtgagggatgacggctttcgggttgtaaacctcttttatccaccacgaaggccaggtattcgcctggttgacggtagtggttgaataagcgccggctaactacgtgccagcagccgcggtaagacgtagggcgcgagcgttgtccggatttattgggcgtaaagggctcgtaggcggttgattgcgtccgccgtgaaaggcctcggcttaaccggggttttgcggtggatacgggtcgacttgaggcaagtaggggagatcggaattctacgtgtagcggtgaaatgcgcagatatgtggaggaacaccggtggcgaaggcggatctctgggcttgttctgacgctgaggagcgaaagcgtggggagcgaacaggattagataccctggtagtccatgctgtaaacggtgggcgctaggtgtggggccacgttggttggttctgtgccgtagctaacgcattaagcgccccgcctggggagtacggccgcaaggctaaaactcaaaggaattgacgggggcccgcacaagcggcggagcatgcggattaattcgatgcaacgcgaagaaccttacctgggtttgacatcacccggaaaccctcagagatgagggcctcttcggactgggtgacaggtggtgcatggctgtcgtcagctcgtgtcgtgagatgttgggttaagtcccgcaacgagcgcaacccttatcccgtgttgccagcattgagttggggactcgcgggagactgccggggttaactcggaggaaggtggggatgaggtcaagtcatcatgccccttatgtccagggcttcacgcatgctacattggccggtacagcgggttgcgataccgtgaggtggagcgaatctctgtaaagccggtcttggttcggattcgagtctgcaactcgactcgatgaaggtggagtcgctagtaatcgcagatcagcaacgctgcggtgaatgcgttcccgggccttgtacacaccgcccgtcacgtcatgaaagttggcaacacccgaagcctgcggcctaaccagctttgctggagggagtggtcgaaggtggggctggcgattaggacgaagtcgtaacaaggtagccgtaccggaaggtgcggctggatcacctccttt

SEQ ID NO: 1446 - DNA, 1532 bp, artificial sequence
  GCF_000191165.1_00040_Lactobacillus_delbrueckii
tgaagagtttgatcatggctcagattgaacgctggcggcaggcctaacacatgcaagtcgagcggatgaagggagcttgctcctggattcagcggcggacgggtgagtaatgcctaggaatctgcctggtagtgggggacaacgtttcgaaaggaacgctaataccgcatacgtcctacgggagaaagcaggggaccttcgggccttgcgctatcagatgagcctaggtcggattagctagttggtgaggtaatggctcaccaaggcgacgatccgtaactggtctgagaggatgatcagtcacactggaactgagacacggtccagactcctacgggaggcagcagtggggaatattggacaatgggcgaaagcctgatccagccatgccgcgtgtgtgaagaaggtcttcggattgtaaagcactttaagttgggaggaagggttgtagattaatactctgcaattttgacgttaccgacagaataagcaccggctaactctgtgccagcagccgcggtaatacagagggtgcaagcgttaatcggaattactgggcgtaaagcgcgcgtaggtggttcgttaagttggatgtgaaatccccgggctcaacctgggaactgcatccaaaactggcgagctagagtatggtagagggtggtggaatttcctgtgtagcggtgaaatgcgtagatataggaaggaacaccagtggcgaaggcgaccacctggactgatactgacactgaggtgcgaaagcgtggggagcaaacaggattagataccctggtagtccacgccgtaaacgatgtcaactagccgttgggagccttgagctcttagtggcgcagctaacgcattaagttgaccgcctggggagtacggccgcaaggttaaaactcaaatgaattgacgggggcccgcacaagcggtggagcatgtggtttaattcgaagcaacgcgaagaaccttaccaggccttgacatccaatgaactttccagagatggattggtgccttcgggaacattgagacaggtgctgcatggctgtcgtcagctcgtgtcgtgagatgttgggttaagtcccgtaacgagcgcaacccttgtccttagttaccagcacgttatggtgggcactctaaggagactgccggtgacaaaccggaggaaggtggggatgacgtcaagtcatcatggcccttacggcctgggctacacacgtgctacaatggtcggtacaaagggttgccaagccgcgaggtggagctaatcccataaaaccgatcgtagtccggatcgcagtctgcaactcgactgcgtgaagtcggaatcgctagtaatcgcgaatcagaatgtcgcggtgaatacgttcccgggccttgtacacaccgcccgtcacaccatgggagtgggttgcaccagaagtagctagtctaaccttcgggaggacggttaccacggtgtgattcatgactggggtgaagtcgtaacaaggtagccgtaggggaacctgcggctggatcacctcctt

SEQ ID NO: 1447 - DNA, 1320 bp, artificial sequence; identical to SEQ ID NO: 731
  GCF_000191165.1_00741_Lactobacillus_delbrueckii

SEQ ID NO: 1448 - DNA, 1461 bp, artificial sequence
  GCF_000191165.1_00850_Lactobacillus_delbrueckii
ttgagagtttgatcctggctcagaacgaacgctggcggcaggcctaacacatgcaagtcgagcgctctcttcggagggagcggcggacgggttagtaacgcgtgggaacgtgcccttctctaaggaatagccactggaaacggtgagtaataccttatacgcccttcggggaaagatttatcggagaaggatcggcccgcgttagattagatagttggtggggtaacggcctaccaagtctacgatctatagctggttttagaggatgatcagcaacactgggactgagacacggcccagactcctacgggaggcagcagtggggaatcttggacaatgggcgcaagcctgatccagccatgccgcgtgagtgatgaaggccttagggtcgtaaagctctttcgccagagatgataatgacagtatctggtaaagaaaccccggctaactccgtgccagcagccgcggtaatacggagggggttagcgttgttcggaattactgggcgtaaagcgcgcgtaggcggaccagaaagtaaggggtgaaatcccagggctcaaccctggaactgcctcttaaactcctggtcttgagttcgagagaggtgagtggaattccgagtgtagaggtgaaattcgtagatattcggaggaacaccagtggcgaaggcggctcactggctcgatactgacgctgaggtgcgaaagtgtggggagcaaacaggattagataccctggtagtccacaccgtaaacgatgaatgccagtcgtcgggtagcatgctattcggtgacacacctaacggattaagcattccgcctggggagtacggtcgcaagattaaaactcaaaggaattgacgggggcccgcacaagcggtggagcatgtggtttaattcgaagcaacgcgcagaaccttaccaacccttgacatccctggaccgctggagagattcagctttctcgtaagagaccaggtgacaggtgctgcatggctgtcgtcagctcgtgtcgtgagatgttcggttaagtccggcaacgagcgcaacccacatccttagttgccagcagttcggctgggcactctagggaaactgcccgtgataagcgggaggaaggtgtggatgacgtcaagtcctcatggcccttacgggttgggctacacacgtgctacaatggcagtgacaatgggttaatcccaaaaaactgtctcagttcggattggggtctgcaactcgaccccatgaagtcggaatcgctagtaatcgcgtaacagcatgacgcggtgaatacgttcccgggccttgtacacaccgcccgtcacaccatgggagttgggtttacccgaaggccgtgcgccaacctcttcggagggggcagcggaccacggtgagctcagcgactggggtgaagtcgtaacaaggtagccgtaggggaacctgcggctggatcacctccttt

SEQ ID NO: 1449 - DNA, 1462 bp, artificial sequence
  GCF_000191165.1_00910_Lactobacillus_delbrueckii
ttgagagtttgatcctggctcagaacgaacgctggcggcaggcctaacacatgcaagtcgagcgctctcttcggagggagcggcggacgggttagtaacgcgtgggaacgtgcccttctctaaggaatagccactggaaacggtgagtaataccttatacgcccttcgggggaaagatttatcggagaaggatcggcccgcgttagattagatagttggtggggtaacggcctaccaagtctacgatctatagctggttttagaggatgatcagcaacactgggactgagacacggcccagactcctacgggaggcagcagtggggaatcttggacaatgggcgcaagcctgatccagccatgccgcgtgagtgatgaaggccttagggtcgtaaagctctttcgccagagatgataatgacagtatctggtaaagaaaccccggctaactccgtgccagcagccgcggtaatacggagggggttagcgttgttcggaattactgggcgtaaagcgcgcgtaggcggaccagaaagtaaggggtgaaatcccagggctcaaccctggaactgcctcttaaactcctggtcttgagttcgagagaggtgagtggaattccgagtgtagaggtgaaattcgtagatattcggaggaacaccagtggcgaaggcggctcactggctcgatactgacgctgaggtgcgaaagtgtggggagcaaacaggattagataccctggtagtccacaccgtaaacgatgaatgccagtcgtcgggtagcatgctattcggtgacacacctaacggattaagcattccgcctggggagtacggtcgcaagattaaaactcaaaggaattgacgggggcccgcacaagcggtggagcatgtggtttaattcgaagcaacgcgcagaaccttaccaacccttgacatccctggaccgctggagagattcagctttctcgtaagagaccaggtgacaggtgctgcatggctgtcgtcagctcgtgtcgtgagatgttcggttaagtccggcaacgagcgcaacccacatccttagttgccagcagttcggctgggcactctagggaaactgcccgtgataagcgggaggaaggtgtggatgacgtcaagtcctcatggcccttacgggttgggctacacacgtgctacaatggcagtgacaatgggttaatcccaaaaaactgtctcagttcggattggggtctgcaactcgaccccatgaagtcggaatcgctagtaatcgcgtaacagcatgacgcggtgaatacgttcccgggccttgtacacaccgcccgtcacaccatgggagttgggtttacccgaaggccgtgcgccaacctcttcggagggggcagcggaccacggtgagctcagcgactggggtgaagtcgtaacaaggtagccgtaggggaacctgcggctggatcacctccttt

SEQ ID NO: 1450 - DNA, 1461 bp, artificial sequence
  GCF_000191165.1_01534_Lactobacillus_delbrueckii
ttgagagtttgatcctggctcagaacgaacgctggcggcaggcctaacacatgcaagtcgagcgctctcttcggagggagcggcggacgggttagtaacgcgtgggaacgtgcccttctctaaggaatagccactggaaacggtgagtaataccttatacgcccttcgggggaaagatttatcggagaaggatcggcccgcgttagattagatagttggtggggtaacggcctaccaagtctacgatctatagctggttttagaggatgatcagcaacactgggactgagacacggcccagactcctacgggaggcagcagtggggaatcttggacaatgggcgcaagcctgatccagccatgccgcgtgagtgatgaaggccttagggtcgtaaagctctttcgccagagatgataatgacagtatctggtaaagaaaccccggctaactccgtgccagcagccgcggtaatacggagggggttagcgttgttcggaattactgggcgtaaagcgcgcgtaggcggaccagaaagtaaggggtgaaatcccagggctcaaccctggaactgcctcttaaactcctggtcttgagttcgagagaggtgagtggaattccgagtgtagaggtgaaattcgtagatattcggaggaacaccagtggcgaaggcggctcactggctcgatactgacgctgaggtgcgaaagtgtggggagcaaacaggattagataccctggtagtccacaccgtaaacgatgaatgccagtcgtcgggtagcatgctattcggtgacacacctaacggattaagcattccgcctggggagtacggtcgcaagattaaaactcaaaggaattgacgggggcccgcacaagcggtggagcatgtggtttaattcgaagcaacgcgcagaaccttaccaacccttgacatccctggaccgctggagagattcagctttctcgtaagagaccaggtgacaggtgctgcatggctgtcgtcagctcgtgtcgtgagatgttcggttaagtccggcaacgagcgcaacccacatccttagttgccagcagttcggctgggcactctagggaaactgcccgtgataagcgggaggaaggtgtggatgacgtcaagtcctcatggcccttacgggttgggctacacacgtgctacaatggcagtgacaatgggttaatcccaaaaaactgtctcagttcggattggggtctgcaactcgaccccatgaagtcggaatcgctagtaatcgcgtaacagcatgacgcggtgaatacgttcccgggccttgtacacaccgcccgtcacaccatgggagttgggtttacccgaaggccgtgcgccaacctcttcggaggggcagcggaccacggtgagctcagcgactggggtgaagtcgtaacaaggtagccgtaggggaacctgcggctggatcacctccttt

SEQ ID NO: 1451 - DNA, 1461 bp, artificial sequence; identical to SEQ ID NO: 1448
  GCF_000191165.1_01662_Lactobacillus_delbrueckii

SEQ ID NO: 1452 - DNA, 1535 bp, artificial sequence
  GCF_000191165.1_01743_Lactobacillus_delbrueckii
tgaagagtttgatcatggctcagattgaacgctggcggcaggcctaacacatgcaagtcgagcggaaacgacgggagcttgctcccgggcgtcgagcggcggacgggtgagtaatgcataggaatctgcccggtagtgggggataacctggggaaactcaggctaataccgcatacgtcctacgggagaaagcaggggaccttcgggccttgcgctatcggatgagcctatgtcggattagctggttggtgaggtaacggctcaccaaggcgacgatccgtagctggtctgagaggatgatcagccacatcgggactgagacacggcccgaactcctacgggaggcagcagtggggaatattggacaatgggggcaaccctgatccagccatgccgcgtgtgtgaagaaggccttcgggttgtaaagcactttcagtggggaagaaggccttggggttaataccctcgaggaaggacatcacccacagaagaagcaccggctaactccgtgccagcagccgcggtaatacggagggtgcgagcgttaatcggaattactgggcgtaaagcgcgcgtaggcggcgtgataagccggttgtgaaagccccgggctcaacctgggaatggcatccggaactgtcaggctagagtgcaggagaggaaggtagaattcccggtgtagcggtgaaatgcgtagagatcgggaggaataccagtggcgaaggcggccttctggactgacactgacgctgaggtgcgaaagcgtgggtagcaaacaggattagataccctggtagtccacgccgtaaacgatgtcgactagccgttggggtcctcgagacctttgtggcgcagttaacgcgataagtcgaccgcctggggagtacggccgcaaggttaaaactcaaatgaattgacgggggcccgcacaagcggtggagcatgtggtttaattcgatgcaacgcgaagaaccttacctacccttgacatcctcggaagcctgcagagatgcgggtgtgccttcgggagccgagtgacaggtgctgcatggctgtcgtcagctcgtgttgtgaaatgttgggttaagtcccgtaacgagcgcaacccttgtccctatttgccagcgattcggtcgggaactctagggagactgccggtgacaaaccggaggaaggtggggacgacgtcaagtcatcatggcccttacgggtagggctacacacgtgctacaatggtcggtacaaagggttgcgagttcgcgaggacgagctaatcccgaaaagccgatctcagtccggatcggagtctgcaactcgactccgtgaagtcggaatcgctagtaatcgtgaatcagaatgtcacggtgaatacgttcccgggccttgtacacaccgcccgtcacaccatgggagtggactgcaccagaagtggttagcctaaccttcgggagggcgatcaccacggtgtggttcatgactggggtgaagtcgtaacaaggtagccgtaggggaacctgcggctggatcacctcctt

SEQ ID NO: 1453 - DNA, 1530 bp, artificial sequence
  GCF_000191165.1_01972_Lactobacillus_delbrueckii
atggagagtttgatcctggctcaggatgaacgctagcgataggcttaacacatgcaagtcgaggggtaacatgggagtagcttgctacttctgatgacgaccggcggatgggtgagtaacgcgtatgcaacttgcctcttagtggggaataacccggagaaatccggactaataccgcatacacttagttatccgcatggatgattaaggaaagatttattgctaagagataggcatgcgttccattagttagttggtgaggtaacggctcaccaaggcatcgatggataggggagctgagaggcttatcccccacattgggactgagacacggcccaaactcctacgggaggcagcagtgaggaatattggtcaatggaggaaactctgaaccagccaagtcgcgtgaaggatgactgtcctatggattgtaaacttctttagtaggcgagtaaacgtaggtacgagtacctacctgcaagtagcctaagaataagtatcggctaactccgtgccagcagccgcggtaatacggaggatacgagcgttatccggatttattgggtttaaagggtgcgtaggtggcagattaagtcagtggtgaaaagctgtggctcaaccatagtcttgccgttgaaactggtttgcttgagtacagttgatgtaggcggaatgcgtagtgtagcggtgaaatgcatagatattacgcagaactccgattgcgaaggcagcttacaaaagtgtaactgacactgatgcacgaaagcgtgggtatcaaacaggattagataccctggtagtccacgccgtaaactatgattactcagagtatgcgatataatgtatgctctcaagcgaaagcattaagtaatccacctggggagtacgtcggcaacgatgaaactcaaaggaattgacgggggcccgcacaagcggaggaacatgtggtttaattcgatgatacgcgaggaaccttacctgggattgaaatgtataggacaggggatggaaacattctttttctcttcggagacttatatgtaggtgctgcatggttgtcgtcagctcgtgccgtgaggtgtcggcttaagtgccataacgagcgcaacccttatcgttagttactagcaggtagtgctgaggactctagcgagactgccgtcgtaaggcgagaggaaggtggggatgacgtcaaatcagcacggcccttatatccagggcgacacacgtgttacaatggtgaggacaaagggtagctacctggtgacaggatgccaatctccaaacctcatctcagttcggatcgaagtctgcaactcgacttcgtgaagctggattcgctagtaatcgcgcatcagccatggcgcggtgaatacgttcccgggccttgtacacaccgcccgtcaagccatgggagctgggggtacctgaagtacgtgaccgcgaggagcgtccgagggtaagaccggtgactggggctaagtcgtaacaaggtagccgtaccggaaggtgcggctggaacacctcctt

SEQ ID NO: 1454 - DNA, 1530 bp, artificial sequence; identical to SEQ ID NO: 1453
  GCF_000191165.1_01988_Lactobacillus_delbrueckii

SEQ ID NO: 1455 - DNA, 1505 bp, artificial sequence
  GCF_000284715.1_00934_Lactobacillus_delbrueckii
ttcgagagtttgatcctggctcaggatgaacgctggctgtgtgcctaatacatgcatgtcgagcgaagttcattagaacttagcggcgaatgggtgagtaacacgtacttaacatacctcttagattgggataacggtgagaaattatcgctaataccggatacttatataagtcgcatgacttatatataaaagaagccttaaagcttcactaagagattggggtgcggaacattagctagttggtaaggtaatggcttaccaaggcaatgatgtttagcggggttgagagactgatccgccacactgggactgagatacggcccagactcctacgggaggcagcagtagggaattttccacaatggacgaaagtctgatggagcgacacagcgtgcaggatgacggccttcgggttgtaaactgctgttataagggaagaaaaagcattagaggaaatgctagtgccttgacggtaccttgttagaaagcaacggctaactatgtgccagcagccgcggtaatacataggttgcaagcgttatccggaattattgggcgtaaagcgtctgtaggttgtatgttaagtctggcgtgaaaacttggggctcaaccccaaattgcgttggatactggcatgctagaattgtgtagaggttagcggaattcctagtgaagcggtgaaatgcgtagatattaggaagaacaccaatttggcgaaggcagctaactgggcacatattgacactgagagacgaaagcgtggggagcaaacaggattagataccctggtagtccacgctgtaaacgatgatgattagctgatagagaggtctatcggcgcagctaacgcattaaatcatccgcctgagtagtatgctcgcaagagtgaaacttaaaggaattgacggggatccgcacaagcggtggagcatgtggtttaatttgaagatacgcgtagaaccttacccactcttgacatcttctgcaaagctatagagatatagcagaggttaacagaatgacagatggtgcatggttgtcgtcagctcgtgtcgtgagatgttcggttaagtcctgcaacgagcgcaacccttgtccttagttaattttttagggagactgcccgagtaattgggaggaaggtggggacgacgtcaaatcatcatgcctcttacgagtggggcaacacacgtgctacaatggatagtacaaagagaagcaacatggtgacatcaagcaaatctcaaaaaactattctcagttcggattgtagtctgcaactcgactacatgaagtcggaatcgctagtaatcgtagatcagctacgctacggtgaatacgttctcgggtcttgtacacaccgcccgtcacaccatgggagctggtaatgcccgaagtcggttttgttaactacggagacaactgcctaaggcagggccggtgactggggtgaagtcgtaacaaggtatccctacgagaacgtggggatggattacctcctt

SEQ ID NO: 1456 - DNA, 1512 bp, artificial sequence; identical to SEQ ID NO: 849
  GCF_000387565.1_01303_Lactobacillus_delbrueckii

SEQ ID NO: 1457 - DNA, 1517 bp, artificial sequence
  GCF_000409675.1_00517_Lactobacillus_delbrueckii
gttggagagtttgatcctggctcagggtgaacgctggcggcgtgcctaagacatgcaagtcgtgcgggccgcggggttttactccgtggtcagcggcggacgggtgagtaacgcgtgggtgacctacccggaagagggggacaacccggggaaactcgggctaatcccccatgtggacccgccccttggggtgtgtccaaagggctttgcccgcttccggatgggcccgcgtcccatcagctagttggtggggtaatggcccaccaaggcgacgacgggtagccggtctgagaggatggccggccacaggggcactgagacacgggccccactcctacgggaggcagcagttaggaatcttccgcaatgggcgcaagcctgacggagcgacgccgcttggaggaagaagcccttcggggtgtaaactcctgaacccgggacgaaacccccgacgaggggactgacggtaccggggtaatagcgccggccaactccgtgccagcagccgcggtaatacggagggcgcgagcgttacccggattcactgggcgtaaagggcgtgtaggcggcctggggcgtcccatgtgaaagaccacggctcaaccgtgggggagcgtgggatacgctcaggctagacggtgggagagggtggtggaattcccggagtagcggtgaaatgcgcagataccgggaggaacgccgatggcgaaggcagccacctggtccacccgtgacgctgaggcgcgaaagcgtggggagcaaaccggattagatacccgggtagtccacgccctaaacgatgcgcgctaggtctctgggtctcctgggggccgaagctaacgcgttaagcgcgccgcctggggagtacggccgcaaggctgaaactcaaaggaattgacgggggcccgcacaagcggtggagcatgtggtttaattcgaagcaacgcgaagaaccttaccaggccttgacatgctagggaacccgggtgaaagcctggggtgccccgcgaggggagccctagcacaggtgctgcatggccgtcgtcagctcgtgccgtgaggtgttgggttaagtcccgcaacgagcgcaacccccgccgttagttgccagcggttcggccgggcactctaacgggactgcccgcgaaagcgggaggaaggaggggacgacgtctggtcagcatggcccttacggcctgggcgacacacgtgctacaatgcccactacaaagcgaggccacccggcaacggggagctaatcgcaaaaaggtgggcccagttcggattggggtctgcaacccgaccccatgaagccggaatcgctagtaatcgcggatcagccatgccgcggtgaatacgttcccgggccttgtacacaccgcccgtcacgccatgggagcgggctctacccgaagtcgccgggagcctacgggcaggcgccgagggtagggcccgtgactggggcgaagtcgtaacaaggtagctgtaccggaaggtgcggctggatcacctccttt

SEQ ID NO: 1458 - DNA, 1529 bp, artificial sequence; identical to SEQ ID NO: 867
  GCF_000409675.1_01679_Lactobacillus_delbrueckii

SEQ ID NO: 1459 - DNA, 1525 bp, artificial sequence
  GCF_000751235.1_02016_Lactobacillus_delbrueckii
tgtagagtttgatcctggctcagattgaacgctggcggcatgccttacacatgcaagtcgaacggtaacaggtcttcggatgctgacgagtggcgaacgggtgagtaatacatcggaacgtgcccgatcgtgggggataacgaggcgaaagctttgctaataccgcataagatctatggatgaaagcaggggaccgcaaggccttgcgcgaacggagcggccgatggcagattaggtagttggtggggtaaaggcttaccaagcctacgatctgtagctggtctgagaggacgaccagccacactgggactgagacacggcccagactcctacgggaggcagcagtggggaattttggacaatgggcgcaagcctgatccagccatgccgcgtgcaggatgaaggccttcgggttgtaaactgcttttgtacggaacgaaaagccttcttctaataaagggaggtcatgacggtaccgtaagaataagcaccggctaactacgtgccagcagccgcggtaatacgtagggtgcaagcgttaatcggaattactgggcgtaaagcgtgcgcaggcggtgatgtaagacagatgtgaaatccccgggctcaacctgggaactgcatttgtgactgcatcgctggagtacggcagagggggatggaattccgcgtgtagcagtgaaatgcgtagatatgcggaggaacaccgatggcgaaggcaatcccctgggcctgtactgacgctcatgcacgaaagcgtggggagcaaacaggattagataccctggtagtccacgccctaaacgatgtcaactggttgttgggtcttcactgactcagtaacgaagctaacgcgtgaagttgaccgcctggggagtacggccgcaaggttgaaactcaaaggaattgacggggacccgcacaagcggtggatgatgtggtttaattcgatgcaacgcgaaaaaccttacccacctttgacatgtacggaatcctttagagatagaggagtgctcgaaagagaaccgtaacacaggtgctgcatggctgtcgtcagctcgtgtcgtgagatgttgggttaagtcccgcaacgagcgcaacccttgccattagttgctacgaaagggcactctaatgggactgccggtgacaaaccggaggaaggtggggatgacgtcaagtcctcatggcccttataggtggggctacacacgtcatacaatggctggtacagagggttgccaacccgcgagggggagctaatcccataaagccagtcgtagtccggatcgcagtctgcaactcgactgcgtgaagtcggaatcgctagtaatcgcggatcagaatgtcgcggtgaatacgttcccgggtcttgtacacaccgcccgtcacaccatgggagcgggttctgccagaagtaggtagcctaaccgtaaggagggcgcttaccacggcagggttcgtgactggggtgaagtcgtaacaaggtagccgtatcggaaggtgcggctggatcacctccttt

SEQ ID NO: 1460 - DNA, 1490 bp, artificial sequence
  GCF_000751655.1_01926_Lactobacillus_delbrueckii
atggagagtttgatcctggctcaggatgaacgctggcggtatgcttaacacatgcaagtcgaacggggtactttcgggtacctagtggcggacgggtgagtaacgcgtgagaatctggctataggttcgggacaacattgggaaactgatgctaataccggatgtgccgagaggtgaaagcttaatgtgcctatagatgagctcgcgtccgattagctagtaggtgaggtaaaagctcacctaggccatgatcggtagctggtctgagaggatggccagccacactgggactgagacacggcccagactcctacgggaggcagcagtggggaattttccgcaatgggcgaaagcctgacggagcaataccgcgtgagggaggaaggcttttgggtcgtaaacctcttttctctgggaagaagttctgacggtaccagaggaatcagcatcggctaactccgtgccagcagccgcggtaatacggaggatgcaagcgttatccggaattattgggcgtaaagcgtccgcaggtggttattcaagtctgctgttaaagcgtggagcttaactccatatcggcagtggaaactggatgactagagttcggtaggggtagcgggaattcccagtgtagcggtgaaatgcgtagatattgggaagaacaccagcggcgaaagcgcgctactgggccgagactgacactgagggacgaaagctaggggagcgaaagggattagatacccctgtagtcctagctgtaaacgatgggcactaggtgttgcgcgtatcgacccgtgcagtgccgtagctaacgcgttaagtgccccgcctggggagtacgcacgcaagtgtgaaactcaaaggaattgacgggggcccgcacaagcggtggagtatgtggtttaattcgatgcaacgcgaagaaccttaccagggcttgacatgtgcagaatctccttgaaaaaggagagtgccttcgggaactgcaacacaggtggtgcatggctgtcgtcagctcgtgtcgtgagatgttgggttaagtcccgcaacgagcgcaaccctcgtccttagttgccagcattgagttgggcactctggggagactgccggtgacaaaccggaggaaggtggggatgacgtcaagtcagcatgccccttacgtcctgggctacacacgtactacaatgctgtggacaaagagctgcaagtcggcgacgacaagccaatctcggaaaccacggctcagttcagattgcaggctgcaactcgcctgcatgaaggaggaatcgctagtaatcgcaggtcagcatactgcggtgaatacgttcccgggccttgtacacaccgcccgtcacaccatgggagttggccacgcccgaagtcgttactccaactgcttgcagagggggacgccgaaggcagggctgatgactggggtgaagtcgtaacaaggtagccgtaccggaaggtgtggctggatcacctccttt

SEQ ID NO: 1461 - DNA, 1149 bp, artificial sequence
  GCF_001189855.1_01810_Lactobacillus_delbrueckii
ttcggagagtttgatcctggctcaggacgaacgctggcggcgtgcttaacacatgcaagtcgaacgctgaagccccaacttgttggggtggatgagtggcgaacgggtgagtaacacgtgagtaacctgccctcacttcgggataagcactggaaacggtgtctaatactggatgtgacatcagcctgcatgggttggtgtggaaagattttttggtggtggatggactcgcggcctatcagcttgttggtggggtaatggcctaccaaggcgacgacgggtagccggcctgagagggtgaccggccacactgggactgagacacggcccagactcctacgggaggcagcagtggggaatattgcacaatgggcgcaagcctgatgcagcgacgccgcgtgagggatgacggccttcgggttgtaaacctctttcagccttgacgaagccctttggggtgacggtaggggcagaagaagcaccggctaactacgtgccagcagccgcggtaatacgtagggtgcgagcgttgtccggaattattgggcgtaaagagcttgtaggcggtttgtcgcgtctgctgtgaaagcccggggcttaactccgggtctgcagtgggtacgggcaggctagagtgtggtaggggagactggaattcctggtgtagcggtggaatgcgcagatatcaggaggaacaccgatggcgaaggcaggtctctgggccatgactgacgctgagaagcgaaagcgtggggagcgaacaggattagataccctggtagtccacgccgtaaacgttgggcgctaggtgtgggtcccattccacggggtccgtgccgcagctaacgcattaagcgccccgcctggggagtacggccgcaaggctaaaactcaaaggaattgacgggggcccgcacaagcggcggagcatgcggattaattcgatgcaacgcgaagaaccttaccaaggcttgacatacaccggacgatcgcagagatgtggtttccctttgtggctggtgtacaggtggtgcatggttgtcgtcagctcgtgtcgtgagatgttgggttaagtcccgcaacgagcgcaaccctcgttccatgttgccagcaacacctttgggtggttggggactcatgggagactgc

SEQ ID NO: 1462 - DNA, 1552 bp, artificial sequence
  GCF_001190005.1_01671_Lactobacillus_delbrueckii
ttgaagagtttgatcatggctcagattgaacgctggcggcaggcttaacacatgcaagtcgaacggtaacatgaactagcttgctagtttgatgacgagtggcggacgggtgagtaatgcttgggaatatgccttggagtgggggacaacagttggaaacgactgctaataccgcataacgtgctttttgtagtgaaaagtaccaaagggggggatcttcggacctcccgcttcttgattagcccaagtgagattagctagttggtaaggtaaaggcttaccaaggcgacgatctctagctggtttgagaggatgatcagccacactgggactgagacacggcccagactcctacgggaggcagcagtggggaatattgcacaatgggcgaaagcctgatgcagccatgccgcgtgtgtgaagaaggccttcgggttgtaaagcactttcagttgtgaggaaaggtggtgatttaataaatcatcactgtgacgttagcaacagaagaagcaccggctaacttcgtgccagcagccgcggtaatacgaggggtgcaagcgttaatcggaattactgggcgtaaagcgttcgtaggcggttatttaagcaagatgtgaaagcccagggctcaaccttggaactgcattttgaactgggtaactagagtactgtagagggtggtggaatttccagtgtagcggtgaaatgcgtagagattggaaggaacatcagtggcgaaggcggccacctggacagatactgacgctgaggaacgaaagcgtggggagcgaacaggattagataccctggtagtccacgccgtaaacgatgtcaactagccgttcgtggacttgatccgtgagtggcgcagctaacgcactaagttgaccgcctggggagtacggccgcaaggttaaaactcaaatgaattgacgggggcccgcacaagcggtggagcatgtggtttaattcgatgcaacgcgaagaaccttaccatcccttgacatcctcagaagccagtagagatacaggcgtgccttcgggaactgagtgacaggtgctgcatggctgtcgtcagctcgtgttgtgaaatgttgggttaagtcccgcaacgagcgcaacccctatccttatttgccagcgcgttatggcgggaactctaaggagactgccggtgataaaccggaggaaggtggggacgacgtcaagtcatcatggcccttacgggatgggctacacacgtgctacaatggcaggtacagagggctgcaataccgcgaggtggagcgaatcccacaaagcctgtcgtagtccggatcggagtctgcaactcgactccgtgaagtcggaatcgctagtaatcgtggatcagaacgccacggtgaatacgttcccgggccttgtacacaccgcccgtcacaccatgggagtgggatgcaaaagaagtggctagtttaaccttcgggaggacggtcaccactttgtgtttcatgactggggtgaagtcgtaacaaggtaaccctaggggaacctggggttggatcacctcctt

SEQ ID NO: 1463 - DNA, 1543 bp, artificial sequence
  GCF_001808415.1_01631_Lactobacillus_delbrueckii
tgaagagtttgatcctggctcagagtgaacgctggcggcaggcctaacacatgcaagtcgaacggcagcacagtaagagcttgctcttatgggtggcgagtggcggacgggtgaggaatacatcggaatctactctttcgtgggggataacgtagggaaacttacgctaataccgcatacgacctacgggtgaaagcggaggaccttcgggcttcgcgcgattgaatgagccgatgtcggattagctagttggcggggtaaaggcccaccaaggcgacgatccgtagctggtctgagaggatgatcagccacactggaactgagacacggtccagactcctacgggaggcagcagtggggaatattggacaatgggcgcaagcctgatccagccatgccgcgtgggtgaagaaggccttcgggttgtaaagcccttttgttgggaaagaaaagcagtcggttaatacccgattgttctgacggtacccaaagaataagcaccggctaacttcgtgccagcagccgcggtaatacgaagggtgcaagcgttactcggaattactgggcgtaaagcgtgcgtaggtggtggtttaagtctgttgtgaaagccctgggctcaacctgggaattgcagtggatactgggtcactagagtgtggtagagggtagcggaattcccggtgtagcagtgaaatgcgtagagatcgggaggaacatccgtggcgaaggcggctacctggaccaacactgacactgaggcacgaaagcgtggggagcaaacaggattagataccctggtagtccacgccctaaacgatgcgaactggatgttgggtgcaatttggcacgcagtatcgaagctaacgcgttaagttcgccgcctggggagtacggtcgcaagactgaaactcaaaggaattgacgggggcccgcacaagcggtggagtatgtggtttaattcgatgcaacgcgaagaaccttacctggtcttgacatccacggaactttccagagatggattggtgccttcgggaaccgtgagacaggtgctgcatggctgtcgtcagctcgtgtcgtgagatgttgggttaagtcccgcaacgagcgcaacccttgtccttagttgccagcacgtaatggtgggaactctaaggagaccgccggtgacaaaccggaggaaggtggggatgacgtcaagtcatcatggcccttacgaccagggctacacacgtactacaatggtagggacagagggctgcaaacccgcgagggtaagccaatcccagaaaccctatctcagtccggattggagtctgcaactcgactccatgaagtcggaatcgctagtaatcgcagatcagcattgctgcggtgaatacgttcccgggccttgtacacaccgcccgtcacaccatgggagtttgttgcaccagaagcaggtagcttaaccttcgggagggcgcttgccacggtgtggccgatgactggggtgaagtcgtaacaaggtagccgtatcggaaggtgcggctggatcacctccttt

SEQ ID NO: 1464 - DNA, 1552 bp, artificial sequence
  GCF_001888945.1_00040_Lactobacillus_delbrueckii
ctggagagtttgattctggctcagaatgaacgctggcggcgtgcctaacacatgcaagtcgagcgagaaagtttccttcgggagacgagtacagcggcgcacgggtgagtaacgcgtggataatctacctcgaggtatgggataactctgcgaaagcggggctaataccgtatagtctgcacacatatcgtgtgtggtaaagatggcctctgatataagctatcgccttgggatgagtccgcgtctcattagcttgttggtggggtaaaagcttaccaaggcaacgatgggtagctggtctgagaggatgatcagccacactgggactggaacacggcccagactcctacgggaggcagcagtggggaatattgggcaatgggcgcaagcctgacccagcaacgccgcgtgtgggatgaaggctttcgggtcgtaaaccactgtcaggagggaagaaatgggtgattcccaatacgggtcacccttgacggtacctccagaggaagcaccggctaactccgtgccagcagccgcggtaatacggagggtgcaagcgttattcggaatcactgggcgtaaagcgcgcgtaggcggcagggcaagtcaggtgtgaaagcccacggctcaaccgtggaactgcacttgaaactgtcttgctagagtatgggagagggtggcagaattcccggtgtaggagtgaaatccgtagatatcgggaggaataccagtggcgaaggcggccacctggaccataactgacgctgaggtgcgaaagcgtggggagcaaacaggattagataccctggtagtccacgccgtaaacgatggatgctaggtgttggggtcgtaggacttcagtgccgtagttaacgcgttaagcatcccgcctggggagtacggtcgcaaggctgaaactcaaagaaattgacgggggcccgcacaagcggtggagtatgtggtttaattcgatgcaacgcgaagaaccttacccaggcttgacatcccgggagcctccatgaaattggagggtgcccttcggggaacccggtgacaggtgctgcatggctgtcgtcagctcgtgccgtgaggtgttgggttaagtcccgcaacgagcgcaacccctatccttagttgccagcaagtgatgttgggcactctaaggagactgccgaggtgaactcggaggaaggtggggacgacgtcaagtcatcatggcccttacgcctggggctacacacgtactacaatggtgggcacagagggtagcaacatcgcgaggtagagctaatctcaaaaagcccatctcagttcggatcgcagtctgcaactcgactgcgtgaagtcggaatcgctagtaatcgcggatcagcatgccgcggtgaatacgttcccgggccttgtacacaccgcccgtcacaccacgaaagctggctctacccgaagtcagtgagctaacccgtatgggaagcagctgccgacggtagggctggtaattggggtgaagtcgtaacaaggtagccgtaggggaacctgcggctggatcacctccttt

SEQ ID NO: 1465 - DNA, 1552 bp, artificial sequence; identical to SEQ ID NO: 1464
  GCF_001888945.1_00713_Lactobacillus_delbrueckii

SEQ ID NO: 1466 - DNA, 1445 bp, artificial sequence
  GCF_001888945.1_00824_Lactobacillus_delbrueckii
gagcggcggacgggtgagtaatgcctgggaatatgccttgatgtgggggataaccattggaaacgatggctaataccgcataatgcctacgggccaaagagggggatcttcggacctctcgcgtcaagattagcccaggtgggattagctagttggtgaggtaatggctcaccaaggcgacgatccctagctggtctgagaggatgatcagccacactggaactgagacacggtccagactcctacgggaggcagcagtggggaatattgcacaatgggcgcaagcctgatgcagccatgccgcgtgtgtgaagaaggccttcgggttgtaaagcactttcagtcgtgaggaaggtagttgcgttaatagcgtaattatttgacgttagcgacagaagaagcaccggctaactccgtgccagcagccgcggtaatacggagggtgcgagcgttaatcggaattactgggcgtaaagcgcatgcaggtggtttgttaagtcagatgtgaaagcccggggctcaacctcggaattgcatttgaaactggcagactagagtactgtagaggggggtagaatttcaggtgtagcggtgaaatgcgtagagatctgaaggaataccggtggcgaaggcggccccctggacagatactgacactcagatgcgaaagcgtggggagcaaacaggattagataccctggtagtccacgccgtaaacgatgtctacttggaggttgtggccttgagccgtggctttcggagctaacgcgttaagtagaccgcctggggagtacggtcgcaagattaaaactcaaatgaattgacgggggcccgcacaagcggtggagcatgtggtttaattcgatgcaacgcgaagaaccttacctactcttgacatccagagaagccagcggagacgcaggtgtgccttcgggagctctgagacaggtgctgcatggctgtcgtcagctcgtgttgtgaaatgttgggttaagtcccgcaacgagcgcaacccttatccttgtttgccagcgagtaatgtcgggaactccagggagactgccggtgataaaccggaggaaggtggggacgacgtcaagtcatcatggcccttacgagtagggctacacacgtgctacaatggcgcatacagagggctgccaaccagcgatggtgagcgaatcccaaaaagtgcgtcgtagtccggattggagtctgcaactcgactccatgaagtcggaatcgctagtaatcgtggatcagaatgccacggtgaatacgttcccgggccttgtacacaccgcccgtcacaccatgggagtgggctgcaaaagaagtgggtagtttaacctttcgaggaggacgctcaccactttgtggttcatgactggggtgaagtcgtaacaaggtagcgctaggggaacctggcgctggatcacctcctt

SEQ ID NO: 1467 - DNA, 1510 bp, artificial sequence
  GCF_001888945.1_01347_Lactobacillus_delbrueckii
tatggagagtttgatcctggctcaggatgaacgctcaggagcttgctcctgtgacgcgagtggcggacgggtgagtaacacgtaggcaacctgcccatcagaccgggataaccacgggaaaccgtggctaataccggataaccctttcccacacaggtgggaaagttgaaaggcggcttcggctgtcactgatggatgggcctgcggtgcattagctagttggtggggtaacggcccaccaaggcgacgatgcgtagccgacctgagagggtgatcggccacactgggactgagacacggcccagactcctacgggaggcagcagtagggaatcttccgcaatggacgaaagtctgacggagcaacgccgcgtgagtgaagaagggtttcggctcgtaaaactctgttgtcagggaagaacgccgacgggagtaactgcccgtcgggtgacggtacctgaccagaaagccacggctaactacgtgccagcagccgcggtaatacgtaggtggcaagcgttatccggaattattgggcgtaaagcgcgcgtaggcggttcgttaagtctgatgtgaaagcccccggctcaaccggggagggtcattggaaactggcggacttgagtgcagaagaggagagtggaattccatgtgtagcggtgaaatgcgcagagatatggaggaacaccagtggcgaaggcggctctctggtctgcaactgacgctgaggtgcgaaagcgtggggatcaaacaggattagataccctggtagtccacgccgtaaacgatgagtgctaagtgttagggggtttccgccccttagtgctgcagctaacgcattaagcactccgcctggggagtacggccgcaaggttgaaactcaaaggaattgacggggacccgcacaagcggtggagcatgtggtttaattcgaagcaacgcgaagaaccttaccaaatcttgacatcctctgaccaccctggagacagggtttcccttcggggcagagtgacaggtggtgcatggttgtcgtcagctcgtgtcgtgagatgttgggttaagtcccgcaacgagcgcaacccttatcattagttgccagcattcagttgggcactctaatgagactgccggtgacaaaccggaggaaggtggggatgacgtcaaatcatcatgccccttatgatttgggctacacacgtgctacaatggacaggttacaaagggcagctaagccgcgaggccaagcgaatcccataaaactgttctcagttcggattggagtctgcaactcgactccatgaagctggaatcgctagtaatcgtggatcagaatgccacggtgaatacgttcccgggtcttgtacacaccgcccgtcacaccacgaaagtcggtaacacctgaagccggtgggccaacctcttggaggcagccgtcgaaggtgggaccgatgattggggtgaagtcgtaacaaggtagccgtatcggaaggtgcggctggatcacctccttt

SEQ ID NO: 1468 - DNA, 1328 bp, artificial sequence
  GCF_001888945.1_01472_Lactobacillus_delbrueckii
ctgtcactgatggatgggcctgcggcgcattagctggttggtggggtaacggcccaccaaggcgacgatgcgtagccgacctgagagggtgatcggccacactgggactgagacacggcccagactcctacgggaggcagcagtagggaatcttccgcaatggacgaaagtctgacggagcaacgccgcgtgagtgaagaagggtttcggctcgtaaaactctgttgtcagggaagaacgccgacgggagtaactgcccgtcgggtgacggtacctgaccagaaagccacggctaactacgtgccagcagccgcggtaatacgtaggtggcaagcgttatccggaattattgggcgtaaagcgcgcgtaggcggttcgttaagtctgatgtgaaagcccccggctcaaccggggagggtcattggaaactggcggacttgagtgcagaagaggagagtggaattccatgtgtagcggtgaaatgcgcagagatatggaggaacaccagtggcgaaggcggctctctggtctgcaactgacgctgaggtgcgaaagcgtggggatcaaacaggattagataccctggtagtccacgccgtaaacgatgagtgctaagtgttagggggtttccgccccttagtgctgcagctaacgcattaagcactccgcctggggagtacggccgcaaggttgaaactcaaaggaattgacggggacccgcacaagcggtggagcatgtggtttaattcgaagcaacgcgaagaaccttaccaaatcttgacatcctctgaccaccctggagacagggtttcccttcggggcagagtgacaggtggtgcatggttgtcgtcagctcgtgtcgtgagatgttgggttaagtcccgcaacgagcgcaacccttatcattagttgccagcattcagttgggcactctaatgagactgccggtgacaaaccggaggaaggtggggatgacgtcaaatcatcatgccccttatgatttgggctacacacgtgctacaatggacaggttacaaagggcagctaagccgcgaggccaagcgaatcccataaaactgttctcagttcggattggagtctgcaactcgactccatgaagctggaatcgctagtaatcgtggatcagaatgccacggtgaatacgttcccgggtcttgtacacaccgcccgtcacaccacgaaagtcggtaacacctgaagccggtgggccaacctcttggaggcagccgtcgaaggtgggaccgatgattggggtgaagtcgtaacaaggtagccgtatcggaaggtgcggctggatcacctccttt

SEQ ID NO: 1469 - DNA, 1548 bp, artificial sequence
  GCF_001888945.1_01558_Lactobacillus_delbrueckii
  misc_feature (142)..(142): n is a, c, g, or t
  misc_feature (180)..(180): n is a, c, g, or t
tatggagagtttgatcctggctcaggatgaacgctggcggcgtgcctaatacatgcaagtcgaacgcgcggatcaggagcttgctcctgtgacgcgagtggcggacgggtgagtaacacgtaggcaacctgcccatcagacngggataaccacgggaaaccgtggctaataccggataanccttttccacacaggtgggaaagttgaaaggcggcttcggctgtcactgatggatgggcctgcggcgcattagctggttggtggggtaacggcccaccaaggcgacgatgcgtagccgacctgagagggtgatcggccacactgggactgagacacggcccagactcctacgggaggcagcagtagggaatcttccgcaatggacgaaagtctgacggagcaacgccgcgtgagtgaagaagggtttcggctcgtaaaactctgttgtcagggaagaacgccgacgggagtaactgcccgtcgggtgacggtacctgaccagaaagccacggctaactacgtgccagcagccgcggtaatacgtaggtggcaagcgttatccggaattattgggcgtaaagcgcgcgtaggcggttcgttaagtctgatgtgaaagcccccggctcaaccggggagggtcattggaaactggcggacttgagtgcagaagaggagagtggaattccatgtgtagcggtgaaatgcgcagagatatggaggaacaccagtggcgaaggcggctctctggtctgcaactgacgctgaggtgcgaaagcgtggggatcaaacaggattagataccctggtagtccacgccgtaaacgatgagtgctaagtgttagggggtttccgccccttagtgctgcagctaacgcattaagcactccgcctggggagtacggccgcaaggttgaaactcaaaggaattgacggggacccgcacaagcggtggagcatgtggtttaattcgaagcaacgcgaagaaccttaccaaatcttgacatcctctgaccaccctggagacagggtttcccttcggggcagagtgacaggtggtgcatggttgtcgtcagctcgtgtcgtgagatgttgggttaagtcccgcaacgagcgcaacccttatcattagttgccagcattcagttgggcactctaatgagactgccggtgacaaaccggaggaaggtggggatgacgtcaaatcatcatgccccttatgatttgggctacacacgtgctacaatggacaggttacaaagggcagctaagccgcgaggccaagcgaatcccataaaactgttctcagttcggattggagtctgcaactcgactccatgaagctggaatcgctagtaatcgtggatcagaatgccacggtgaatacgttcccgggtcttgtacacaccgcccgtcacaccacgaaagtcggtaacacctgaagccggtgggccaacctcttggaggcagccgtcgaaggtgggaccgatgattggggtgaagtcgtaacaaggtagccgtatcggaaggtgcggctggatcacctccttt

SEQ ID NO: 1470 - DNA, 1553 bp, artificial sequence
  GCF_001888945.1_01611_Lactobacillus_delbrueckii
ttggagagtttgatcctggctcaggacgaacgctggcggcgtgcctaatacatgcaagtcgagcgaagtttttctggtgcttgcactagaaaaacttagcggcgaacgggtgagtaacacgtaaagaacctgcctcatagactgggacaactattggaaacgatagctaataccggataacagcattaactgcatggttgatgtttaaaagttggttttgctaacactatgagatggctttgcggtgcattagctagttggtggggtaaaggcctaccaaggcgacgatgcatagccgacctgagagggtgatcggccacactgggactgagacacggcccagactcctacgggaggcagcagtagggaatcttccgcaatgggcgaaagcctgacggagcaacgccgcgtgagtgaagaaggatttcggttcgtaaagctctgttgttagggaagaatgattgtgtagtaactatacacagtagagacggtacctaaccagaaagccacggctaactacgtgccagcagccgcggtaatacgtaggtggcaagcgttgtccggaattattgggcgtaaagcgcgcgcaggtggtttaataagtctgatgtgaaagcccacggctcaaccgtggagggtcattggaaactgttaaacttgagtgcaggagagaaaagtggaattcctagtgtagcggtgaaatgcgtagagattaggaggaacaccagtggcgaaggcggctttttggcctgtaactgacactgaggcgcgaaagcgtggggagcaaacaggattagataccctggtagtccacgccgtaaacgatgagtgctaagtgttggtctcataagagatcagtgctgcagctaacgcattaagcactccgcctggggagtacgaccgcaaggttgaaactcaaaggaattgacggggacccgcacaagcggtggagcatgtggtttaattcgaagcaacgcgaagaaccttaccaagtcttgacatactgtgaggacacaagagattgtgttgttctgacctttggttagacacagatacaggtggtgcatggttgtcgtcagctcgtgtcgtgagatgttgggttaagtcccgcaacgagcgcaacccttatatctagttgccagcagtaagatggggactctagatagactgccagtgataaactggaggaaggtggggatgacgtcaaatcatcatgccccttatgacttgggctacacacgtgctacaatggataggaacaaagagaagcgagctcgcgagagtaagcaaacctcacaaaactattctcagttcggattgtagtctgcaactcgactacatgaagctggaatcgctagtaatcgcgaatcagaatgtcgcggtgaatacgttcccgggtcttgtacacaccgcccgtcacaccacgagagtttgtaacacccgaagacggtggcctaaccttttaggagggagccggtcacggtgggacagatgattggggtgaagtcgtaacaaggtagccgtatcggaaggtgcggctggatcacctcctt

SEQ ID NO: 1471 - DNA, 1520 bp, artificial sequence
  GCF_001888945.1_01858_Lactobacillus_delbrueckii
tatgagagtttgatcctggctcaggatgaacgctggcggcgtgcttaacacatgcaagtcgaacgaagcacttcataaagcttgctttaagaagtgacttagtggcggacgggtgagtaacgcgtgggtaacctgccttacacagggggataacagttagaaatgactgctaataccgcataaaacagcagagtcgcatgactcaactgtcaaagatttatcggtgtaagatggacccgcgtctgattagcttgttggtggggtaacggcctaccaaggcgacgatcagtagccggcctgagagggtgaacggccacattgggactgagacacggcccaaactcctacgggaggcagcagtggggaatattggacaatgggcgaaagcctgatccagcgacgccgcgtgagcgatgaagtatttcggtatgtaaagctctatcagcagggaagaaaacgacggtacctgactaagaagccccggctaactacgtgccagcagccgcggtaatacgtagggggcaagcgttatccggatttactgggtgtaaagggagcgtagacggcatcacaagtcagaagtgaaaatccggggctcaaccccggaactgcttttgaaactgtggagctggagtgcaggagaggtaagcggaattcctagtgtagcggtgaaatgcgtagatattaggaggaacaccagtggcgaaggcggcttactggactgtaactgacgttgaggctcgaaagcgtggggagcaaacaggattagataccctggtagtccacgccgtaaacgatgaatactaggtgttgggtttcataagaagctcggtgccggcgcaaacgcattaagtattccacctggggagtacgttcgcaagaatgaaactcaaaggaattgacggggacccgcacaagcggtggagcatgtggtttaattcgaagcaacgcgaagaaccttaccaagtcttgacatcccgttgacctgttatgtaatgtaacatctcttcggagcaacggagacaggtggtgcatggttgtcgtcagctcgtgtcgtgagatgttgggttaagtcccgcaacgagcgcaacccttgtccttagtagccagcagtaagatgggcactctagggagactgccggggataactcggaggaaggtggggacgacgtcaaatcatcatgccccttatgacttgggctacacacgtgctacaatggcgtaaacaaagggaagcgaacctgtgaaggcaagcaaatcccaaaaataacgtctcagttcggattgtagtctgcaactcgactacatgaagctggaatcgctagtaatcgcagatcagaatgctgcggtgaatacgttcccgggtcttgtacacaccgcccgtcacaccatgggagtcgtaaatgcccgaagtcggtgacctaaccgtaaggaaggagccgccgaaggcaggtatgataactggggtgaagtcgtaacaaggtagccgtatcggaaggtgcggctggatcacctccttt

SEQ ID NO: 1472 - DNA, 1513 bp, artificial sequence
  GCF_002000885.1_00198_Lactobacillus_delbrueckii
tattgagagtttgatcctggctcaggacgaacgctggcggcgtgcctaacacatgcaagtcgagcgatgaagtttccttcgggaaacggattagcggcggacgggtgagtaacacgtgggtaacctgcctcatagaggggaatagcctcccgaaagggagattaataccgcataacattgcagtttcgcatgaaacagcaattaaaggagcaatccgctatgagatggacccgcggcgcattagctagttggtaaggtaatggcttaccaaggcgacgatgcgtagccgacctgagagggtgatcggccacattgggactgagacacggcccagactcctacgggaggcagcagtggggaatattgcacaatgggggaaaccctgatgcagcaacgccgcgtgagtgatgacggtcttcggattgtaaagctctgtctttggggacgataatgacggtacccaaggaggaagccacggctaactacgtgccagcagccgcggtaatacgtaggtggcgagcgttgtccggatttactgggcgtaaagggagcgtaggcggatttttaagtgggatgtgaaatacccgggctcaacctgggtgctgcattccaaactgggaatctagagtgcaggaggggagagtggaattcctagtgtagcggtgaaatgcgtagagattaggaagaacaccagtggcgaaggcgactctctggactgtaactgacgctgaggctcgaaagcgtggggagcgaacaggattagataccctggtagtccacgccgtaaacgatgaatactaggtgtaggggtttcaacacctctgtgccgccgctaacgcattaagtattccgcctggggagtacggtcgcaagattaaaactcaaaggaattgacgggggcccgcacaagtagcggagcatgtggtttaattcgaagcaacgcgaagaaccttacctagacttgacatcctctgcattacccttaatcggggaagttccttcgggaacagagtgacaggtggtgcatggttgtcgtcagctcgtgtcgtgagatgttgggttaagtcccgcaacgagcgcaacccctattgttagttgctaccattaagttgagcactctagcgagactgcctgggttaaccaggaggaaggtggggatgacgtcaaatcatcatgccccttatgtctagggctacacacgtgctacaatggcaagtacagagagatgcaataccgcgaggtggagctaaacttcaaaacttgtctcagttcggattgtaggctgaaactcgcctacatgaagctggagttactagtaatcgcgaatcagcatgtcgcggtgaatacgttcccgggccttgtacacaccgcccgtcacaccatgagagttggcaatacccaaagttcgtgagctaacgcgtaagcgaggcagcgacctaaggtagggtcagcgattggggtgaagtcgtaacaaggtagccgtaggagaacctgcggctggatcacctccttt

SEQ ID NO: 1473 - DNA, 1515 bp, artificial sequence
  GCF_002000885.1_00302_Lactobacillus_delbrueckii
tattgagagtttgatcctggctcaggacgaacgctggcggcgtgcctaacacatgcaagtcgagcgatgaagtttccttcgggaaacggattagcggcggacgggtgagtaacacgtgggtaacctgcctcatagaggggaatagcctcccgaaagggagattaataccgcataacattgcagtttcgcatgaaacagcaattaaaggagcaatccgctatgagatggacccgcggcgcattagctagttggtaaggtaatggcttaccaaggcgacgatgcgtagccgacctgagagggtgatcggccacattgggactgagacacggcccagactcctacgggaggcagcagtggggaatattgcacaatgggggaaaccctgatgcagcaacgccgcgtgagtgatgacggtcttcggattgtaaagctctgtctttggggacgataatgacggtacccaaggaggaagccacggctaactacgtgccagcagccgcggtaatacgtaggtggcgagcgttgtccggatttactgggcgtaaagggagcgtaggcggatttttaagtgggatgtgaaatacccgggctcaacctgggtgctgcattccaaactgggaatctagagtgcaggaggggagagtggaattcctagtgtagcggtgaaatgcgtagagattaggaagaacaccagtggcgaaggcgactctctggactgtaactgacgctgaggctcgaaagcgtggggagcgaacaggattagataccctggtagtccacgccgtaaacgatgaatactaggtgtaggggtttcaacacctctgtgccgccgctaacgcattaagtattccgcctggggagtacggtcgcaagattaaaaactcaaaggaattgacgggggcccgcacaagtagcggagcatgtggtttaattcgaagcaacgcgaagaaccttacctagacttgacatcctctgcattacccttaatcggggaagttccttcggggacagagtgacaggtggtgcatggttgtcgtcagctcgtgtcgtgagatgttgggttaagtcccgcaacgagcgcaacccctattgttagttgctaccattaagttgagcactctagcgagactgcctgggttaaccaggaggaaggtggggatgacgtcaaatcatcatgccccttatgtctagggctacacacgtgctacaatggcaagtacagagagatgcaataccgcgaggtggagctaaacttcaaaaacttgtctcagttcggattgtaggctgaaactcgcctacatgaagctggagttactagtaatcgcgaatcagcatgtcgcggtgaatacgttcccgggccttgtacacaccgcccgtcacaccatgagagttggcaatacccaaagttcgtgagctaacgcgtaagcgaggcagcgacctaaggtagggtcagcgattggggtgaagtcgtaacaaggtagccgtaggagaacctgcggctggatcacctccttt

SEQ ID NO: 1474 - DNA, 1513 bp, artificial sequence
  GCF_002000885.1_00998_Lactobacillus_delbrueckii
tattgagagtttgatcctggctcaggacgaacgctggcggcgtgcctaacacatgcaagtcgagcgatgaagtttccttcgggaaacggattagcggcggacgggtgagtaacacgtgggtaacctgcctcatagaggggaatagcctcccgaaagggagattaataccgcataacattgcagtttcgcatgaaacagcaattaaaggagcaatccgctatgagatggacccgcggcgcattagctagttggtaaggtaatggcttaccaaggcgacgatgcgtagccgacctgagagggtgatcggccacattgggactgagacacggcccagactcctacgggaggcagcagtggggaatattgcacaatgggggaaaccctgatgcagcaacgccgcgtgagtgatgacggtcttcggattgtaaagctctgtctttggggacgataatgacggtacccaaggaggaagccacggctaactacgtgccagcagccgcggtaatacgtaggtggcgagcgttgtccggatttactgggcgtaaagggagcgtaggcggatttttaagtgggatgtgaaatacccgggctcaacctgggtgctgcattccaaactgggaatctagagtgcaggaggggagagtggaattcctagtgtagcggtgaaatgcgtagagattaggaagaacaccagtggcgaaggcgactctctggactgtaactgacgctgaggctcgaaagcgtggggagcgaacaggattagataccctggtagtccacgccgtaaacgatgaatactaggtgtaggggtttcaacacctctgtgccgccgctaacgcattaagtattccgcctggggagtacggtcgcaagattaaaactcaaaggaattgacgggggcccgcacaagtagcggagcatgtggtttaattcgaagcaacgcgaagaaccttacctagacttgacatcctctgcattacccttaatcggggaagttccttcggggacagagtgacaggtggtgcatggttgtcgtcagctcgtgtcgtgagatgttgggttaagtcccgcaacgagcgcaacccctattgttagttgctaccattaagttgagcactctagcgagactgcctgggttaaccaggaggaaggtggggatgacgtcaaatcatcatgccccttatgtctagggctacacacgtgctacaatggcaagtacagagagatgcaataccgcgaggtggagctaaacttcaaaacttgtctcagttcggattgtaggctgaaactcgcctacatgaagctggagttactagtaatcgcgaatcagcatgtcgcggtgaatacgttcccgggccttgtacacaccgcccgtcacaccatgagagttggcaatacccaaagttcgtgagctaacgcgtaagcgaggcagcgacctaaggtagggtcagcgattggggtgaagtcgtaacaaggtagccgtaggagaacctgcggctggatcacctccttt

SEQ ID NO: 1475 - DNA, 1515 bp, artificial sequence
  GCF_002000885.1_01104_Lactobacillus_delbrueckii
tattgagagtttgatcctggctcaggacgaacgctggcggcgtgcctaacacatgcaagtcgagcgatgaagtttccttcgggaaacggattagcggcggacgggtgagtaacacgtgggtaacctgcctcatagaggggaatagcctcccgaaagggagattaataccgcataacattgcagtttcgcatgaaacagcaattaaaggagcaatccgctatgagatggacccgcggcgcattagctagttggtaaggtaatggcttaccaaggcgacgatgcgtagccgacctgagagggtgatcggccacattgggactgagacacggcccagactcctacgggaggcagcagtggggaatattgcacaatgggggaaaccctgatgcagcaacgccgcgtgagtgatgacggtcttcggattgtaaagctctgtctttggggacgataatgacggtacccaaggaggaagccacggctaactacgtgccagcagccgcggtaatacgtaggtggcgagcgttgtccggatttactgggcgtaaagggagcgtaggcggatttttaagtgggatgtgaaatacccgggctcaacctgggtgctgcattccaaactgggaatctagagtgcaggaggggagagtggaattcctagtgtagcggtgaaatgcgtagagattaggaagaacaccagtggcgaaggcgactctctggactgtaactgacgctgaggctcgaaagcgtggggagcgaacaggattagataccctggtagtccacgccgtaaacgatggatactaggtgtgggaggtatcaactccttccgtgccgccgctaacgcattaagtatcccgcctggggagtacggtcgcaagattaaaactcaaaggaattgacgggggcccgcacaagtagcggagcatgtggtttaattcgaagcaacgcgaagaaccttacctagacttgacatcctctgcattacccttaatcggggaagttccttcgggaacagagtgacaggtggtgcatggttgtcgtcagctcgtgtcgtgagatgttgggttaagtcccgcaacgagcgcaacccctattgttagttgctaccattaagttgagcactctagcgagactgcctgggttaaccaggaggaaggtggggatgacgtcaaatcatcatgccccttatgtctagggctacacacgtgctacaatggcaagtacagagagatgcaataccgcgaggtggagctaaacttcaaaacttgtctcagttcggattgtaggctgaaactcgcctacatgaagctggagttactagtaatcgcgaatcagcatgtcgcggtgaatacgttcccgggccttgtacacaccgcccgtcacaccatgagagttggcaatacccaaagttcgtgagctaacgcgtaagcgaggcagcgacctaaggtagggtcagcgattggggtgaagtcgtaacaaggtagccgtaggagaacctgcggctggatcacctccttt

SEQ ID NO: 1476 - DNA, 1513 bp, artificial sequence; identical to SEQ ID NO: 1472
  GCF_002000885.1_01118_Lactobacillus_delbrueckii

SEQ ID NO: 1477 - DNA, 1513 bp, artificial sequence
  GCF_002000885.1_01328_Lactobacillus_delbrueckii
tattgagagtttgatcctggctcaggacgaacgctggcggcgtgcctaacacatgcaagtcgagcgatgaagtttccttcgggaaacggattagcggcggacgggtgagtaacacgtgggtaacctgcctcatagaggggaatagcctcccgaaagggagattaataccgcataatattgcagtttcgcatgaaacagcaattaaaggagcaatccgctatgagatggacccgcggcgcattagctagttggtaaggtaatggcttaccaaggcgacgatgcgtagccgacctgagagggtgatcggccacattgggactgagacacggcccagactcctacgggaggcagcagtggggaatattgcacaatgggggaaaccctgatgcagcaacgccgcgtgagtgatgacggtcttcggattgtaaagctctgtctttggggacgataatgacggtacccaaggaggaagccacggctaactacgtgccagcagccgcggtaatacgtaggtggcgagcgttgtccggatttactgggcgtaaagggagcgtaggcggatttttaagtgggatgtgaaatacccgggctcaacctgggtgctgcattccaaactgggaatctagagtgcaggaggggagagtggaattcctagtgtagcggtgaaatgcgtagagattaggaagaacaccagtggcgaaggcgactctctggactgtaactgacgctgaggctcgaaagcgtggggagcgaacaggattagataccctggtagtccacgccgtaaacgatgaatactaggtgtaggggtttcaacacctctgtgccgccgctaacgcattaagtattccgcctggggagtacggtcgcaagattaaaactcaaaggaattgacgggggcccgcacaagtagcggagcatgtggtttaattcgaagcaacgcgaagaaccttacctagacttgacatcctctgcattacccttaatcggggaagttccttcgggaacagagtgacaggtggtgcatggttgtcgtcagctcgtgtcgtgagatgttgggttaagtcccgcaacgagcgcaacccctattgttagttgctaccattaagttgagcactctagcgagactgcctgggttaaccaggaggaaggtggggatgacgtcaaatcatcatgccccttatgtctagggctacacacgtgctacaatggcaagtacagagagatgcaataccgcgaggtggagctaaacttcaaaacttgtctcagttcggattgtaggctgaaactcgcctacatgaagctggagttactagtaatcgcgaatcagcatgtcgcggtgaatacgttcccgggccttgtacacaccgcccgtcacaccatgagagttggcaatacccaaagttcgtgagctaacgcgtaagcgaggcagcgacctaaggtagggtcagcgattggggtgaagtcgtaacaaggtagccgtaggagaacctgcggctggatcacctccttt

SEQ ID NO: 1478 - DNA, 1370 bp, artificial sequence
  GCF_002000885.1_01390_Lactobacillus_delbrueckii
atagcctcccgaaagggagattaataccgcataacattattttacggcatcgtagaataatcaaaggagcaatccgctttgagatggacccgcggcgcattagctagttggtgaggtaacggctcaccaaggcaacgatgcgtagccgacctgagagggtgatcggccacattggaactgagacacggtccagactcctacgggaggcagcagtggggaatattgcgcaatgggggaaaccctgacgcagcaacgccgcgtgagtgatgaaggttttcggatcgtaaaactctgtcattagggacgataatgacggtacctaatgaggaagccacggctaactacgtgccagcagccgcggtaatacgtaggtggcaagcgttgtccggatttactgggcgtaaagagtatgtaggtgggcatttaagtcagatgtgaaattcccgggcttaacctgggagctgcatttgatactgggtgtctagagtgcaggagaggaaagtggaattcctagtgtagcggtgaaatgcgtagagattaggaagaacaccagtggcgaaggcgactttctggactgtaactgacactgagatacgaaagcgtgggtagcaaacaggattagataccctggtagtccacgccgtaaacgatgaatactaggtgtcggggggtaccaccctcggtgccgcagcaaacgcattaagtattccgcctggggagtacggtcgcaagattaaaactcaaaggaattgacggggacccgcacaagcagcggagcatgtggtttaattcgaagcaacgcgaagaaccttacctagacttgacatctcctgaattactcgtaactgaggaagtcccttcggggacaggaagacaggtggtgcatggttgtcgtcagctcgtgtcgtgagatgttgggttaagtcccgcaacgagcgcaacccttattgttagttgctactattaagttaagcactctaacgagactgccgcggttaacgtggaggaaggtggggatgacgtcaaatcatcatgccccttatgtctagggctacacacgtgctacaatggctggtacaacgagcagcaatcccgcgagggggagcaaaacttgaaagccagtcccagttcggattgtaggctgaaactcgcctacatgaagttggagttgctagtaatcgcgaatcagcatgtcgcggtgaatacgttcccgggtcttgtacacaccgcccgtcacaccatgagagccggtaacacccgaagcccgtgaggtaaccgtaaggagccagcggtcgaaggtgggattggtgattggggtgaagtcgtaacaaggtagccgtaggagaacctgcggctggatcacctccttt

SEQ ID NO: 1479 - DNA, 1379 bp, artificial sequence
  GCF_002000885.1_01472_Lactobacillus_delbrueckii
gaggggaatagcctcccgaaagggagattaataccgcataacattgcagtttcgcatgaaacagcaattaaaggagcaatccgctatgagatggacccgcggcgcattagctagttggtaaggtaatggcttaccaaggcgacgatgcgtagccgacctgagagggtgatcggccacattgggactgagacacggcccagactcctacgggaggcagcagtggggaatattgcacaatgggggaaaccctgatgcagcaacgccgcgtgagtgatgacggtcttcggattgtaaagctctgtctttggggacgataatgacggtacccaaggaggaagccacggctaactacgtgccagcagccgcggtaatacgtaggtggcgagcgttgtccggatttactgggcgtaaagggagcgtaggcggatttttaagtgggatgtgaaatacccgggctcaacctgggtgctgcattccaaactgggaatctagagtgcaggaggggagagtggaattcctagtgtagcggtgaaatgcgtagagattaggaagaacaccagtggcgaaggcgactctctggactgtaactgacgctgaggctcgaaagcgtggggagcgaacaggattagataccctggtagtccacgccgtaaacgatgaatactaggtgtaggggtttcaacacctctgtgccgccgctaacgcattaagtattccgcctggggagtacggtcgcaagattaaaactcaaaggaattgacgggggcccgcacaagtagcggagcatgtggtttaattcgaagcaacgcgaagaaccttacctagacttgacatcctctgcattacccttaatcggggaagttccttcgggaacagagtgacaggtggtgcatggttgtcgtcagctcgtgtcgtgagatgttgggttaagtcccgcaacgagcgcaacccctattgttagttgctaccattaagttgagcactctagcgagactgcctgggttaaccaggaggaaggtggggatgacgtcaaatcatcatgccccttatgtctagggctacacacgtgctacaatggcaagtacagagagatgcaataccgcgaggtggagctaaacttcaaaacttgtctcagttcggattgtaggctgaaactcgcctacatgaagctggagttactagtaatcgcgaatcagcatgtcgcggtgaatacgttcccgggccttgtacacaccgcccgtcacaccatgagagttggcaatacccaaagttcgtgagctaacgcgtaagcgaggcagcgacctaaggtagggtcagcgattggggtgaagtcgtaacaaggtagccgtaggagaacctgcggctggatcacctccttt

SEQ ID NO: 1480 - DNA, 988 bp, artificial sequence
  GCF_002000885.1_01587_Lactobacillus_delbrueckii
attaagagtttgatcctggctcaggacgaacgctggcggcgtgcttaacacatgcaagtcgagcgatgaagctccttcgggagtggattagcggcggacgggtgagtaacacgtgggtaacctacctcaaagagggggatagcctcccgaaagggagattaataccgcataataatcggttttcacatggagactgatttaaaggagtaatccgctttgagatggacccgcggcgcattagctagttggtagggtaacggcctaccaaggcgacgatgcgtagccgacctgagagggtgatcggccacattggaactgagagacggtccagactcctacgggaggcagcagtggggaatattgcacaatgggcgaaagcctgatgcagcaacgccgcgtgagtgaagaaggttttcggattgtaaagctctgtctttggggacgataatgacggtacccaaggaggaagccacggctaactacgtgccagcagccgcggtaatacgtaggtggcgagcgttgtccggaattactgggcgtaaagagtgcgtaggcggatatttaagtgagatgtgaaatacccgggcttaacccgggcactgcatttcaaactggatatctagagtgcgggagaggagaatggaattcctagtgtagcggtgaaatgcgtagagattaggaagaacaccagtggcgaaggcgattctctggaccgtaactgacgctgaggcacgaaagcgtgggtagcaaacaggattagataccctggtagtccacgccgtaaacgatgagtactaggtgtaggaggtatcgaccccttctgtgccgcagtaaacacaataagtactccgcctgggaagtacgatcgcaagattaaaactcaaaggaattgacgggggcccgcacaagcagcggagcatgtggtttaattcgaagcaacgcgaagaaccttacctggacttgacataccctgaatatcttagagata

SEQ ID NO: 1481 - DNA, 1521 bp, artificial sequence
  GCF_002142575.1_00448_Lactobacillus_delbrueckii
acggagagtttgatcctggctcaggacgaacgctggcggcgtgcttaacacatgcaagtcgaacgatgaagcccttcggggtggattagtggcgaacgggtgagtaacacgtgggcaatctgccctgcactctgggacaagccctggaaacggggtctaataccggatacgaccgctgaccgcatggttggtggtggaaagctccggcggtgcaggatgagcccgcggcctatcagcttgttggtggggtgatggcctaccaaggcgacgacgggtagccggcctgagagggcgaccggccacactgggactgagacacggcccagactcctacgggaggcagcagtggggaatattgcacaatgggcgaaagcctgatgcagcgacgccgcgtgagggatgacggccttcgggttgtaaacctctttcagcagggaagaagcgaaagtgacggtacctgcagaagaagcgccggctaactacgtgccagcagccgcggtaatacgtagggcgcaagcgttgtcaggaattattgggcgtaaagagctcgtaggcggcttgttgcgtcggatgtgaaagcccggggcttaaccccgggtctgcattcgatacgggcaggctagagttcggtaggggagatcggaattcctggtgtagcggtgaaatgcgcagatatcaggaggaacaccggtggcgaaggcggatctctgggccgatactgacgctgaggagcgaaagcgtggggagcgaacaggattagataccctggtagtccacgccgtaaacgttgggaactaggtgtgggcgacattccacgtcgtccgtgccgcagctaacgcattaagttccccgcctggggagtacggccgcaaggctaaaactcaaaggaattgacgggggcccgcacaagcagcggagcatgtggcttaattcgacgcaacgcgaagaaccttaccaaggcttgacatacaccggaaacggccagagatggtcgcccccttgtggtcggtgtacaggtggtgcatggctgtcgtcagctcgtgtcgtgagatgttgggttaagtcccgcaacgagcgcaacccttgttctgtgttgccagcatgcccttcggggtgatggggactcacaggagactgccggggtcaactcggaggaaggtggggacgacgtcaagtcatcatgccccttatgtcttgggctgcacacgtgctacaatggccggtacaatgagctgcgataccgcgaggtggagcgaatctcaaaaagccggtctcagttcggattggggtctgcaactcgaccccatgaagttggagttgctagtaatcgcagatcagcattgctgcggtgaatacgttcccgggccttgtacacaccgcccgtcacgtcacgaaagtcggtaacacccgaagccggtggcccaacccttgtggagggagccgtcgaaggtgggactggcgattgggacgaagtcgtaacaaggtagccgtaccggaaggtgcggctggatcacctccttt

SEQ ID NO: 1482 - DNA, 1521 bp, artificial sequence
  GCF_002142575.1_00585_Lactobacillus_delbrueckii
acggagagtttgatcctggctcaggacgaacgctggcggcgtgcttaacacatgcaagtcgaacgatgaagcccttcggggtggattagtggcgaacgggtgagtaacacgtgggcaatctgccctgcactctgggacaagccctggaaacggggtctaataccggatacgaccgctgaccgcatggttggtggtggaaagctccggcggtgcaggatgagcccgcggcctatcagcttgttggtggggtgatggcctaccaaggcgacgacgggtagccggcctgagagggcgaccggccacactgggactgagacacggcccagactcctacgggaggcagcagtggggaatattgcacaatgggcgaaagcctgatgcagcgacgccgcgtgagggatgacggccttcgggttgtaaacctctttcagcagggaagaagcgaaagtgacggtacctgcagaagaagcgccggctaactacgtgccagcagccgcggtaatacgtagggcgcaagcgttgtccggaattattgggcgtaaagagctcgtaggcggcttgttgcgtcggatgtgaaagcccggggcttaaccccgggtctgcattcgatacgggcaggctagagttcggtaggggagatcggaattcctggtgtagcggtgaaatgcgcagatatcaggaggaacaccggtggcgaaggcggatctctgggccgatactgacgctgaggagcgaaagcgtggggagcgaacaggattagataccctggtagtccacgccgtaaacgttgggaactaggtgtgggcgacattccacgtcgtccgtgccgcagctaacgcattaagttccccgcctggggagtacggccgcaaggctaaaactcaaaggaattgacgggggcccgcacaagcagcggagcatgtggcttaattcgacgcaacgcgaagaaccttaccaaggcttgacatacaccggaaacggccagagatggtcgcccccttgtggtcggtgtacaggtggtgcatggctgtcgtcagctcgtgtcgtgagatgttgggttaagtcccgcaacgagcgcaacccttgttctgtgttgccagcatgcccttcggggtgatggggactcacaggagactgccggggtcaactcggaggaaggtggggacgacgtcaagtcatcatgccccttatgtcttgggctgcacacgtgctacaatggccggtacaatgagctgcgataccgcgaggtggagcgaatctcaaaaagccggtctcagttcggattggggtctgcaactcgaccccatgaagttggagttgctagtaatcgcagatcagcattgctgcggtgaatacgttcccgggccttgtacacaccgcccgtcacgtcacgaaagtcggtaacacccgaagccggtggcccaacccttgtggagggagccgtcgaaggtgggactggcgattgggacgaagtcgtaacaaggtagccgtaccggaaggtgcggctggatcacctccttt

SEQ ID NO: 1483 - DNA, 1521 bp, artificial sequence; identical to SEQ ID NO: 1482
  GCF_002142575.1_00683_Lactobacillus_delbrueckii

SEQ ID NO: 1484 - DNA, 1507 bp, artificial sequence
  GCF_002142575.1_00735_Lactobacillus_delbrueckii
atggagagtttgatcctggctcaggacgaacgctggcggcgtgcctaacacatgcaagtcgtacgcggtggcttgccaccgagtggcgaacgggtgcgtaacacgtgaggaacccaccccgacgtgggggataacaccgggaaaccggtgctaataccgcatgtgctcccctgaccgcatggtcgagggagcaaagccttcgggcgcgacgggacggcctcgcggcctatcagcttgttggtggggtaacggcccaccaaggcgacgacgggtagctggtctgagaggacgatcagccacactgggactgagacacggcccagactcctacgggaggcagcagtggggaatattgcgcaatgggcgaaagcctgacgcagcaacgccgcgtggaggacgaaggccttcgggttgtaaactcctttcagcagggacgaaactgacggtacctgcagaagaagccccggctaactacgtgccagcagccgcggtaagacgtagggggcgagcgttgtccggatttactgggcgtaaagagctcgtaggcggcttggcaagtcggatgtgaaatcaccaggctcaacctggtgtcgccatccgatactgccatggcttgagtccggtagaggatcgtggaattcctggtgtagcggtgaaatgcgcagatatcaggaggaacaccaatggcgaaggcagcgatctgggccggtactgacgctgaggagcgaaagcgtggggagcgaacaggattagataccctggtagtccacgccctaaacgttgggcactaggtgtggggcctcattcgacgggctccgtgccgacgctaacgcattaagtgccccgcctggggagtacggccgcaaggctaaaactcaaaggaattgacgggggcccgcacaagcggcggagcatgcggcttaattcgatgcaacgcgaagaacctcacctgggcttgacatggagggaaaagccgcagagatgcggtgtccttcggggcccttcacaggtggtgcatggctgtcgtcagctcgtgtcgtgagatgttgggttaagtcccgcaacgagcgcaacccttgccctatgttgccagcgggtcatgccggggactcgtaggggactgccggagttaattcggaggaaggtggggacgacgtcaagtcatcatgccccttacgtccagggctgcacgcatgctacaatggccggtacaaagggtcgccaacccgcgagggggagccaatcccaaaaaaccggtctcagttcggatcgcagtctgcaactcgactgcgtgaagtcggagtcgctagtaatcccggatcagcacgccggggtgaatacgttcccgggccttgtacacaccgcccgtcacaccacgaaagtcggcaacacccgaagccggtggcccaacccgcaagggagggagccgtcgaaggtggggtcggcgattggggtgaagtcgtaacaaggtagccgtaccggaaggtgcggctggatcacctccttt

SEQ ID NO: 1485 - DNA, 1507 bp, artificial sequence; identical to SEQ ID NO: 1484
  GCF_002142575.1_00973_Lactobacillus_delbrueckii

SEQ ID NO: 1486 - DNA, 1526 bp, artificial sequence
  GCF_002142575.1_00994_Lactobacillus_delbrueckii
tattgagagtttgatcctggctcaggacgaacgctggcggcgcgcctaacacatgcaagtcgagcgatgaacctcttcggatcccttcggggtgaagaagagcggattagcggcggacgggtgagtaacgcgtgaggaacctgcctctcacaacgggatagcctcgggaaactgggattaataccgtatgagaccacagtaacgcctgttacagtggttaaagtcacagcggtgagagatggcctcgcgtctgattagctagttggtggggtaacggcctaccaaggctgcgatcagtaaccggcctgagagggtgaacggtcacattggaactgagacacggtccaaactcctacgggaggcagcagtggggaatcttgcacaatgggggcaaccctgatgcagcgacgccgcgtgagcgatgaaggctttcgagtcgtaaagctctgtcctatgggaagataatgacggtaccataggaggaagccccggctaactacgtgccagcagccgcggtaatacgtagggggcgagcgttgtccggaattactgggcgtaaagggttcgcaggcggctcggcaagtccgatgtaaaaggcgaaggcttaaccttcgcaagcatcggaaactgtcgagcttgagtgaaggagaggcaagtggaattcctagtgtagcggtggaatgcgtagatattaggaggaataccggtggcgaaggcgacttgctggacttcaactgacgctgaggaacgaaagcgtgggtagcaaacaggattagataccctggtagtccacgctgtaaacgatgagtgctaggtgtcgggggtcaaacctcggtgccgtcgttaacacaataagcactccgcctggggagtacgtgcgcaagcatgaaactcaaaggaattgacggggacccgcacaagcagcggagcatgtggtttaattcgaagcaacgcgaagaaccttaccgggacttgaaatattgtcgccaattttagagataaaatgttttcttcggaaacggcaatacaggtggtgcatggttgtcgtcagctcgtgtcgtgagatgttgggttaagtcccgcaacgagcgcaacccttactttcagttgccagcgcattatggcgggaactctggaaggactgccgatgataaatcggaggaaggtggggatgacgtcaaatcatcatgccctttatgtcccgggctacacacgtgctacaatggtcggtacagagggcagcgagacagcgatgttaagcgaatctcaaaaagccgatcccagttcggattgcaggctgcaactcgcctgcatgaagtcggagttgctagtaatcgcggatcagaatgccgcggtgaatgcgttcccgggtcttgtacacaccgcccgtcacaccatgggagttggcaatacccgaagccagcgagccaaccgtaaggaggcagctgtcgaaggtagggttaatgactggggtgaagtcgtaacaaggtagccgtatcggaaggtgcggctggatcacctccttt

SEQ ID NO: 1487 - DNA, 1526 bp, artificial sequence
  GCF_002142575.1_01100_Lactobacillus_delbrueckii
tattgagagtttgatcctggctcaggacgaacgctggcggcgcgcctaacacatgcaagtcgagcgatgaacctcttcggatcccttcggggtgaagaagagcggattagcggcggacgggtgagtaacgcgtgaggaacctgcctctcacaacgggatagcctcgggaaaccgggattaataccgtatgagaccacagtaacgcctgttacagtggttaaagtcacagcggtgagagatggcctcgcgtctgattagctagttggtggggtaacggcctaccaaggctgcgatcagtaaccggcctgagagggtgaacggtcacattggaactgagacacggtccaaactcctacgggaggcagcagtggggaatcttgcacaatgggggcaaccctgatgcagcgacgccgcgtgagcgatgaaggctttcgagtcgtaaagctctgtcctatgggaagataatgacggtaccataggaggaagccccggctaactacgtgccagcagccgcggtaatacgtagggggcgagcgttgtccggaattactgggcgtaaagggttcgcaggcggctcggcaagtccgatgtaaaaggcgaaggcttaaccttcgtaagcatcggaaactgtcgagcttgagtgaaggagaggcaagtggaattcctagtgtagcggtggaatgcgtagatattaggaggaataccggtggcgaaggcgacttgctggacttcaactgacgctgaggaacgaaagcgtgggtagcaaacaggattagataccctggtagtccacgctgtaaacgatgagtgctaggtgtcgggggtcaaacctcggtgccgtcgttaacacaataagcactccgcctggggagtacgtgcgcaagcatgaaactcaaaggaattgacggggacccgcacaagcagcggagcatgtggtttaattcgaagcaacgcgaagaaccttaccgggacttgaaatattgtcgccaattttagagataaaatgttttcttcggaaacggcaatacaggtggtgcatggttgtcgtcagctcgtgtcgtgagatgttgggttaagtcccgcaacgagcgcaacccttactttcagttgccagcgcattatggcgggaactctggaaggactgccgatgataaatcggaggaaggtggggatgacgtcaaatcatcatgccctttatgtcccgggctacacacgtgctacaatggtcggtacagagggcagcgagacagcgatgttaagcgaatctcaaaaagccgatcccagttcggattgcaggctgcaactcgcctgcatgaagtcggagttgctagtaatcgcggatcagaatgccgcggtgaatgcgttcccgggtcttgtacacaccgcccgtcacaccatgggagttggcaatacccgaagccagcgagccaaccgcaaggaggcagctgtcgaaggtagggttaatgactggggtgaagtcgtaacaaggtagccgtatcggaaggtgcggctggatcacctccttt

SEQ ID NO: 1488 - DNA, 1526 bp, artificial sequence; identical to SEQ ID NO: 1487
  GCF_002142575.1_01790_Lactobacillus_delbrueckii

SEQ ID NO: 1489 - DNA, 1163 bp, artificial sequence
  GCF_002142575.1_01890_Lactobacillus_delbrueckii
attagcggcggacgggtgagtaacacgtgagtaacctgccttagacattgggatagcctcgggaaaccgggattaataccaaatgaaatcacatatgcacatgcataaatgatcaaagctccggcggtctaagatggactcgcgtcccattagctagttggtgaggtaacggcccaccaaggcgacgatgggtagccggcctgagagggtgaacggccacattggaactgagaaacggtccaaactcctacgggaggcagcagtggggaatattgcacaatggagggaactctgatgcagcgacgccgcgtgaacgaagaaggctttcgagtcgtaaagttcttttatatgggaagataatgacggtaccataagaaaaagccccggctaactacgtgccagcagccgcggtaatacgtagggggctagcgttgtccggaatcactgggcgtaaagggttcgcaggcggaaatgcaagtcaggtgtaaaaggcagtagcttaactactgtaagcatttgaaactgcatatcttgagaagagtagaggtaagtggaatttttagtgtagcggtgaaatgcgtagatattaaaaagaataccggtggcgaaggcgacttactgggctcattctgacgctgaggaacgaaagcgtgggtagcaaacaggattagataccctggtagtccacgctgtaaacgatgagtgctaggtatcggaataattcggtgccgcagttaacacattaagcactccgcctggggagtacgtgcgcaagcatgaaactcaaaggaattgacggggacccgcacaagcagcggagcatgtggtttaattcgaagcaacgcgaagaaccttaccagggcttgacatactgaggaccggtatagagatataccctcttcttcggaagcctcaatacaggtggtgcatggttgtcgtcagctcgtgtcgtgagatgttcagttaagtctggcaacgagcgcaacccctatctttagttaccagcatttcggatggggactctaaagagactgccgatgataaatcggaggaaggtggggatgacgtcaaatcatcatgccctatatgccctgggctacacacgtgctacaatggaagatacaaagggaagcgaaatagtgatattaagcaaacctcaaaaa

SEQ ID NO: 1490 - DNA, 1536 bp, artificial sequence
  GCF_002847905.1_00505_Lactobacillus_delbrueckii
atggagagtttgatcctggctcaggatgaacgctggcggcgtgcctaatacatgcaagtcgaacgaagtgaagaggagcttgctccttggaacttagtggcgaacgggtgagtaatacataagcaacctgcctcgatgcctgggataacagagggaaacttctgctaataccggatacgttaatctaagacatcttagattaattaaagatgggatacatcacaacgagatgggcttatggcgcattagttagttggtaaggtaacggcttaccaagacgatgatgcgtagccgacctgagagggtgaccggccacactgggactgagacacggcccagactcctacgggaggcagcagtagggaattttcggcaatgggggaaaccctgaccgagcaacgccgcgtgagtgaagacggccttcgggttgtaaagctctgttgtaagggaagaacgataggaagagggaatgcttcttatatgacggtaccttaccagaaagccacggctaactacgtgccagcagccgcggtaatacgtaggtggcaagcgttatccggaattattgggcgtaaagggagcgcaggcggtttatcaagtttatggttaaagttcggggcttaaccccgtgatgccatagaaactggtagactagagtgcaggagaggttagtggaattccatgtgtagcggtaaaatgcgtagatatatggaggaacaccagtggcgaaggcggctaactggcctgtaactgacgctgaggctcgaaagcgtggggagcaaataggattagataccctagtagtccacgccgtaaacgatggatactaagtgttggagaaattcagtgctgtagttaacgcaataagtatcccgcctggggagtatgcgcgcaagcgtaaaactcaaaggaattgacgggggcccgcacaagcggtggagtatgtggtttaattcgaagcaacgcgaagaaccttaccaggtcttgacataccgcgcaaaagcacagagatgtgtaatagttatggcggatacaggtggtgcatggttgtcgtcagctcgtgtcgtgagatgttgggttaagtcccgcaacgagcgcaacccttgtctttagttaccagcattaagttggggactctaaagagactgccggtgataaaccggaggaaggtggggatgacgtcaaatcatcatgccccttatgatctgggctacacacgtactacaatggcgtatacagagggcagcgaagcagcgatgcggagcgaatctcagaaagtacgtctcagttcggattggagtctgcaactcgactccatgaagtcggaatcgctagtaatcgcggatcagaatgccgcggtgaatacgttctcgggccttgtacacaccgcccgtcaaaccatgagagttggtaatacccgaagccggtggcctaacctagtttactaggagggagccgtcgaaggtaggatcgatgattggggttaagtcgtaacaaggtatccctaccggaaggtggggatggatcacctccttt

SEQ ID NO: 1491 - DNA, 1538 bp, artificial sequence
  GCF_003034905.1_01977_Lactobacillus_delbrueckii
ttgaagagtttgatcatggctcagattgaacgctggcggcaggcctaacacatgcaagtcgagcggtaacacagaggagcttgctccttgggtgacgagcggcggacgggtgagtaatgcctggggatctgcccgatagagggggataactacgggaaactgtagctaataccgcataacgtctacggaccaaagtgggggctcttcggacctcatgctatcggatgaacccaggtgggattagctagttggtgaggtaatggctcaccaaggcgacgatctctaactggtttgagagaatgaccagtcacactggaactgagacacggtccagactcctacgggaggcagcagtggggaatattgcacaatgggcgcaagcctgatgcagccatgccgcgtgtgtgaagaaggccttcgggttgtaaagcactttcagcggggaggaagggtcactagttaatacctggtggcattgacgttactcgcagaagaagcaccggctaactccgtgccagcagccgcggtaatacggagggtgcaagcgttaatcggaattactgggcgtaaagcgcacgcaggcggtttgttaagtcagatgtgaaatccccgagctcaacttgggaactgcatttgaaactggcaagctagagtcttgtagaggggggtagaattccaggtgtagcggtgaaatgcgtagagatctggaggaataccggtggcgaaggcggccccctggacaaagactgacgctcaggtgcgaaagcgtggggagcaaacaggattagataccctggtagtccacgctgtaaacgatgtcgatttggaggttgtgcccttgaggcgtggcttccggagctaacgcgttaaatcgaccgcctggggagtacggccgcaaggttaaaactcaaatgaattgacgggggcccgcacaagcggtggagcatgtggtttaattcgatgcaacgcgaagaaccttacctactcttgacatccacagaagcctgcagagatgcgggtgtgccttcgggaactgtgagacaggtgctgcatggctgtcgtcagctcgtgttgtgaaatgttgggttaagtcccgcaacgagcgcaacccttatcctttgttgccagcgattcggtcgggaactcaaaggagactgccggtgataaaccggaggaaggtggggatgacgtcaagtcatcatggcccttacgagtagggctacacacgtgctacaatggcatatacaaagggcggcaagctagcgatagtgagcgaatcccataaagtatgtcgtagtccggattggagtctgcaactcgactccatgaagtcggaatcgctagtaatcgcggatcagaatgccgcggtgaatacgttcccgggccttgtacacaccgcccgtcacaccatgggagtgggttgcaaaagaagtaggtagcttaaccttcgggagggcgcttaccactttgtgattcatgactggggtgaagtcgtaacaaggtaaccgtaggggaacctgcggttggatcacctcctt

SEQ ID NO: 1492 - DNA, 1409 bp, artificial sequence
  GCF_004123065.1_00575_Lactobacillus_delbrueckii
acagcggcggacgggtgcgtaacgcgtaggaacgtgcccctcggaggcggatagccgcgggaaactgcgggtaaaccgccatacgctcgggagaggaaaggccgaaaggcgccgagggagcggcctgcgtcccatcaggtagttggtggggtaatggcccaccaagccgacgacgggtagccggtctgagaggatggccggccacaagggcactgagacacgggccctactcctacgggaggcagcagtgggggatcttggacaatgggcgaaagcctgatccagcgacgccgcgtggaggaagaagcccttcggggtgtaaactccttttgtcggggaaaaaggtctgatggtacccgacgaataagccccggctaactacgtgccagcagccgcggtaatacgtagggggcgagcgttacccggaattactgggcgtaaagggtgcgtaggcggccccgtgtgtccggtgtaaaagcccacggctcaaccgtggatatgcgctggaaactgcggggcttgggtgcggcagaggcagacggaactgctggtgtaggggtgaaatccgtagatatcagcaggaacgccggtggagaagtcggtctgctgggccgtaaccgacgctgaggcacgaaagctaggggagcgaaccggattagatacccgggtagtcctagccgtaaacgatgctcactaggtgtggggcgtaaagctccgtgctgaagctaacgcgttaagtgagccgcctggggagtacgcccgcaagggtgaaactcaaaggaattgacgggggcccgcacaagcggtggagcgtgtggtttaattggaagctaagccaagaaccttaccagggcttgacatgctggtggtaccgagccgaaaggtgagggaccctgccgtttggtagggagccagcacaggtggtgcacggtcgtcgtcagctcgtgccgtgaggtgttgggttaagtcccgcaacgagcgcaacccctgcccttagttgccagcgcgtaaggcgggcactctaaggggactgccggcgacgagccggaggaaggaggggatgacgtcagatactcgtgccccttatgccctgggcgacacacgcgctacaatggggtggacagcgggacgcgagccagcaatggtgagcaaatcccttaaaccaccccccagttcagattgtgggctgcaacccgcccacatgaagccggaatcgctagtaatcgcggatcagccatgccgcggtgaatacgttcccgggccttgtacacaccgcccgtcaagccacccgagctgcgggcacccgaagacggtgacccttcggggcgccgttgagggtgaacgtggtgaggggggctaagtcgtaacaaggtaggtgtaccggaaggtgcgcctggatcacctccttt

SEQ ID NO: 1493 - DNA, 1488 bp, artificial sequence
  GCF_004211505.1_00031_Lactobacillus_delbrueckii
atggagagtttgatcctggctcaggatgaacgctggcggtctgcttaacacatgcaagtcgaacgggactcttcggagttcagtggcggacgggtgagtaacgcgtgagaatctgccttcaggtcggggacaaccactggaaacggtggctaataccggatatgccgcaacgtgaaagatttatcgcctgaagaggagctcgcgtctgattagctagttggtggggtaaaagctcaccaaggcgacgatcagtagctggtctgagaggatgatcagccacactgggactgagacacggcccagactcctacgggaggcagcagtggggaattttccgcaatgggcgaaagcctgacggagcaagaccgcgtgagggaggaaggctcttgggttgtaaacctcttttctcagggaagaacacaatgacggtacctgaggaatcagcctcggctaactccgtgccagcagccgcggtaatacggaggaggcaagcgttatccggaattattgggcgtaaagcgtccgcaggtggcacttcaagtctgtcgtcaaagactggggcttaaccctggaaaggcggtggaaactgaagcgctagagtgtggtaggggtagagggaattcccggtgtagcggtgaaatgcgtagagatcgggaagaacatcggtggcgaaagcgctctactggaccacaactgacactcagggacgaaagctaggggagcgaatgggattagataccccagtagtcctagccgtaaacgatggatactaggtgtggctcgtatcgacccgagccgtgccgtagctaacgcgttaagtatcccgcctggggagtacgctcgcaagagtgaaactcaaaggaattgacgggggcccgcacaagcggtggagtatgtggtttaattcgatgcaacgcgaagaaccttaccagggcttgacatgtccggaatcccagggaaacttgggagtgccttcgggagccggaacacaggtggtgcatggctgtcgtcagctcgtgtcgtgagatgttgggttaagtcccgcaacgagcgcaaccctcgtttttagttgccatcattaagttgggcactctagagagactgccagtgacaaactggaggaaggtggggatgacgtcaagtcagcatgccccttacgtcctgggctacacacgtactacaatgcgacggacaaagggcagcgagcgagcgatcgtcagctaatcccataaaccgtggctcagttcagatcgcaggctgcaactcgcctgcgtgaaggaggaatcgctagtaattgcaggtcagcatactgcagtgaattcgttcccgggccttgtacacaccgcccgtcacaccatgggagctggttttgcccgaagtcgttaccctaaccgcttgcggagggggacgccgaaggcagggctggtgactggggtgaagtcgtaacaaggtagccgtaccggaaggtgtggctggatcacctccttt

SEQ ID NO: 1494 - DNA, 1489 bp, artificial sequence
  GCF_004211735.1_00812_Lactobacillus_delbrueckii
atggagagtttgatcctggctcaggatgaacgctggcggtctgcttaacacatgcaagtcgaacgggactcttcggagttcagtggcggacgggtgagtaacgcgtgagaatctgccttcaggtcggggacaaccactggaaacggtggctaataccggatatgccgcaacgtgaaagatttatcgcctgaagaggagctcgcgtctgattagctagttggtggggtaaaagctcaccaaggcgacgatcagtagctggtctgagaggatgatcagccacactgggactgagacacggcccagactcctacgggaggcagcagtggggaattttccgcaatgggcgaaagcctgacggagcaagaccgcgtgagggaggaaggctcttgggttgtaaacctcttttctcagggaagaacacaatgacggtacctgaggaatcagcctcggctaactccgtgccagcagccgcggtaatacggaggaggcaagcgttatccggaattattgggcgtaaagcgtccgcaggtggcacttcaagtctgtcgtcaaagactggggcttaaccctggaaaggcggtggaaactgaagcgctagagtgtggtagggggtagagggaattcccggtgtagcggtgaaatgcgtagagatcgggaagaacatcggtggcgaaagcgctctactggaccacaactgacactcagggacgaaagctaggggagcgaatgggattagataccccagtagtcctagccgtaaacgatggatactaggtgtggctcgtatcgacccgagccgtgccgtagctaacgcgttaagtatcccgcctggggagtacgctcgcaagagtgaaactcaaaggaattgacgggggcccgcacaagcggtggagtatgtggtttaattcgatgcaacgcgaagaaccttaccagggcttgacatgtccggaatcccagggaaacttgggagtgccttcgggagccggaacacaggtggtgcatggctgtcgtcagctcgtgtcgtgagatgttgggttaagtcccgcaacgagcgcaaccctcgtttttagttgccatcattaagttgggcactctagagagactgccagtgacaaactggaggaaggtggggatgacgtcaagtcagcatgccccttacgtcctgggctacacacgtactacaatgcgacggacaaagggcagcgagcgagcgatcgtcagctaatcccataaaccgtggctcagttcagatcgcaggctgcaactcgcctgcgtgaaggaggaatcgctagtaattgcaggtcagcatactgcagtgaattcgttcccgggccttgtacacaccgcccgtcacaccatgggagctggttttgcccgaagtcgttaccctaaccgcttgcggagggggacgccgaaggcagggctggtgactggggtgaagtcgtaacaaggtagccgtaccggaaggtgtggctggatcacctccttt

SEQ ID NO: 1495 - DNA, 1534 bp, artificial sequence
  GCF_005864055.1_01220_Lactobacillus_delbrueckii
  misc_feature (82)..(82): n is a, c, g, or t
  misc_feature (997)..(997): n is a, c, g, or t
tgaagagtttgatcatggctcagattgaacgctggcggcaggcctaacacatgcaagtcgagcggcagcacgggtacttgtncctggtggcgagcggcggacgggtgagtaatgcctaggaatctgcctggtagtgggggataacgctcggaaacggacgctaataccgcatacgtcctacgggagaaagcaggggaccttcgggccttgcgctatcagatgagcctaggtcggattagctagttggtgaggtaatggctcaccaaggcgacgatccgtaactggtctgagaggatgatcagtcacactggaactgagacacggtccagactcctacgggaggcagcagtggggaatattggacaatgggcgaaagcctgatccagccatgccgcgtgtgtgaagaaggtcttcggattgtaaagcactttaagttgggaggaagggcattaacctaatacgttggtgtcttgacgttaccgacagaataagcaccggctaactctgtgccagcagccgcggtaatacagagggtgcaagcgttaatcggaattactgggcgtaaagcgcgcgtaggtggtttgttaagttggatgtgaaatccccgggctcaacctgggaactgcattcaaaactgacaagctagagtatggtagagggtggtggaatttcctgtgtagcggtgaaatgcgtagatataggaaggaacaccagtggcgaaggcgaccacctggactgatactgacactgaggtgcgaaagcgtggggagcaaacaggattagataccctggtagtccacgccgtaaacgatgtcaactagccgttgggagccttgagctcttagtggcgcagctaacgcattaagttgaccgcctggggagtacggccgcaaggttaaaactcaaatgaattgacgggggcccgcacaagcggtggagcatgtggtttaattcgaagcaacgcgaagaaccttaccaggccttgacatccaatganctttccagagatggattggtgccttcgggaacattgagacaggtgctgcatggctgtcgtcagctcgtgtcgtgagatgttgggttaagtcccgtaacgagcgcaacccttgtccttagttaccagcacgtaatggtgggcactctaaggagactgccggtgacaaaccggaggaaggtggggatgacgtcaagtcatcatggcccttacggcctgggctacacacgtgctacaatggtcggtacagagggttgccaagccgcgaggtggagctaatcccagaaaaccgatcgtagtccggatcgcagtctgcaactcgactgcgtgaagtcggaatcgctagtaatcgcgaatcagaatgtcgcggtgaatacgttcccgggccttgtacacaccgcccgtcacaccatgggagtgggttgcaccagaagtagctagtctaaccttcgggaggacggttaccacggtgtgattcatgactggggtgaagtcgtaacaaggtagccgtaggggaacctgcggctggatcacctcctt

SEQ ID NO: 1496 - DNA, 1527 bp, artificial sequence
  GCF_005864125.1_01906_Lactobacillus_delbrueckii
  misc_feature (177)..(177): n is a, c, g, or t
  misc_feature (999)..(999): n is a, c, g, or t
  misc_feature (1007)..(1009): n is a, c, g, or t
  misc_feature (1032)..(1032): n is a, c, g, or t
  misc_feature (1436)..(1436): n is a, c, g, or t
tgaagagtttgatcctggctcagattgaacgctggcggcatgctttacacatgcaagtcgaacggtaacagggagcttgctccgctgacgagtggcgaacgggtgagtaatatatcggaacgtacccaagagtgggggataacgtagcgaaagttacgctaataccgcatacgatcnaaggatgaaagcaggggaccgcaaggccttgtgctcctggagcggccgatatctgattagctagttggtagggtaaaggcctaccaaggcatcgatcagtagctggtctgagaggacgaccagccacactggaactgagacacggtccagactcctacgggaggcagcagtggggaattttggacaatgggcgcaagcctgatccagcaatgccgcgtgagtgaagaaggccttcgggttgtaaagctcttttgtcagggaagaaacgggagtggctaatatctgcttctaatgacggtacctgaagaataagcaccggctaactacgtgccagcagccgcggtaatacgtagggtgcaagcgttaatcggaattactgggcgtaaagcgtgcgcaggcggttttgtaagtctgtcgtgaaatccccgggctcaacctgggaatggcgatggagactgcaaggctagaatctggcagaggggggtagaattccacgtgtagcagtgaaatgcgtagagatgtggaggaacaccgatggcgaaggcagccccctgggtcaagattgacgctcatgcacgaaagcgtggggagcaaacaggattagataccctggtagtccacgccctaaacgatgtctactagttgtcgggtcttaattgacttggtaacgcagctaacgcgtgaagtagaccgcctggggagtacggtcgcaagattaaaactcaaaggaattgacggggacccgcacaagcggtggatgatgtggattaattcgatgcaacgcgaaaaaccttacctacccttgacatggaaggaatcctngagagatnnnggagtgcccgaaagggaaccttnacacaggtgctgcatggctgtcgtcagctcgtgtcgtgagatgttgggttaagtcccgcaacgagcgcaacccttgtcattagttgctacgaaagggcactctaatgagactgccggtgacaaaccggaggaaggtggggatgacgtcaagtcctcatggcccttatgggtagggcttcacacgtcatacaatggtacatacagagggccgccaacccgcgagggggagctaatcccagaaagtgtatcgtagtccggattgtagtctgcaactcgactgcatgaagttggaatcgctagtaatcgcggatcagcatgtcgcggtgaatacgttcccgggtcttgtacacaccgcccgtcacaccatgggagcgggttttaccagaagtaggtagcttaaccgnaaggagggcgcttaccacggtaggattcgtgactggggtgaagtcgtaacaaggtagccgtatcggaaggtgcggctggatcacctccttt

SEQ ID NO: 1497 - DNA, 1532 bp, artificial sequence
  GCF_900322585.1_00039_Lactobacillus_delbrueckii
acgaagagtttgatcctggcttagaactaacgctggcagtgcgtcttaagcatgcaagtcaaacgggatgtagcaatacatctagtggcgaacgggtgagtaacgcgtggatgatctacctatgagatggggataactactagaaatagtagctaataccgaataaggtcaattaatttgttaattgatgaaaggaagcctttaaagcttcgcttgtagatgagtctgcgtcttattagttagttggtggggtaaatgcctaccaaggcgatgataagtaaccggcctgagagggtgaacggtcacactggaactgagatacggtccagactcctacgggaggcagcagctaagaatcttccgcaatgggcgaaagcctgacggagcgacactgcgtgaatgaagaaggtcgaaagattgtaaaattcttttataaatgaggaataagctttgtaggaaatgacaaggtgatgacgttaatttatgaataagccccggctaattacgtgccagcagccgcggtaatacgtaaggggcgagcgttgttcgggattattgggcgtaaagggtgagtaggcggatatataagtctatgcataaaataccacagctcaactgtggaactatgttggaaactatatgtctagagtctgatagaggaagttagaattcctggtgtaagggtggaatctgttgatatcaggaagaataccggaggcgaaggcgaacttctgggtcaagactgacgctgagtcacgaaagcgtagggagcaaacaggattagataccctggtagtctacgctgtaaacgatgcacacttggtgttaactaaaagttagtaccgaagctaacgtgttaagtgtgccgcctggggagtatgctcgcaagagtgaaactcaaaggaattgacgggggcccgcacaagcggtggagcatgtggtttaattcgatgatacgcgaggaaccttaccagggcttgacatatataggatatagttagagataattattccccgtttggggcctatatacaggtgctgcatggttgtcgtcagctcgtgctgtgaggtgttgggttaagtcccgcaacgagcgcaacccttgttatctgttaccagcatgtaatgatggggactcagataagactgccggtgataagtcggaggaaggtgaggatgacgtcaaatcatcatggcccttatgtcctgggctacacacgtgctacaatggcctgtacaaagcgaagcgaaacagtgatgtgaagcaaaacgcacaaagcaggtctcagtccggattgaagtctgaaactcgacttcatgaagttggaatcgctagtaatcgtatatcagaatgatacggtgaatacgttctcgggccttgtacacaccgcccgtcacaccacccgagttgaggatacccgaagctattattctaacccgtaagggaggaaggtatttaaggtatgtttagtgaggggggtgaagtcgtaacaaggtagccgtactggaaagtgcggctggatcacctcctt

SEQ ID NO: 1498 - DNA, 1152 bp, artificial sequence
  GCF_900322585.1_00768_Lactobacillus_delbrueckii
tgaaaatcttttataatggtcaagagacttatagggcaatactataaggatgagaaattctaaaggttgtaaaatccttttataaataaggaataagctttttaggaaatgacaaggtggtgacgttaatttatgaataagccctggctaattacgtgctagcagctgtggtaatgctcagggggcgagcgttgtttgggattatttggtgtaaagggtgagtaggcggatatataagtctatgcataaaatgccacagttcaactgtggaactatgttggaaactatatgtctagagttttatagaggaagttaaaattcctggtgtaagggtgggattcgttgatatcagaaagaatatcggaggtgaatgctaacttcttggttaatactgatgctaagtcacgaaagtgtagggagcaagcatgattaggtaccctagtagtctacgctgtaaacgatgcatacttggtgttaactaaaagttaatactgaagctaacgtgttaagtgtgtcgtctgggaggtatgcttgtaagagtgaaactcaaaggaattgacggaggccttagtataagcggtggagcatgtggtttaattcgatgatacgcgaggaaccttgtcagaagctgatatatctaggatatagttagagataattattttttgtttggatctgtatacaggtattgtatgaatgtctttaatttgttttgtattaaatctttcaaccgttgcaatcctttttatatactgcccatatgtaataatgggaactcaggtaagattactggtggcaaattggatgagtgtagggatagtatcaaattatcggggctcttatgttttgggttacatgcatgctacaacggcctgtacaaaatcgagtcgaaatagtggatataagtaaaactcacaaatcgggtctcagtccggattgaaatttgaagcttgacttcatgaattttaaattatcaacaagtatatattaaaatgatatagcgaatacgttttagagttttgtatacaccacatgtcgcataatttcagttgaatggatacttaaatctattgttttaaccggtaagaaataaaggtgcttaaggtatgttagtgagagtagtgaagttgtaataaactagccgactggaaa

SEQ ID NO: 1499 - DNA, 1378 bp, artificial sequence
  GCF_900322585.1_00874_Lactobacillus_delbrueckii
agggggataacagttagaaatgactgctaataccgcataagaccacggtaccgcatggtacagtggtaaaaactccggtggtatgagatggacccgcgtctgattaggtagttggtggggtaacggcctaccaagccgacgatcagtagccgacctgagagggtgaccggccacattgggactgagacacggcccagactcctacgggaggcagcagtggggaatattgcacaatggaggaaactctgatgcagcgacgccgcgtgaaggatgaagtatttcggtatgtaaacttctatcagcagggaagaaaatgacggtacctgactaagaagccccggctaactacgtgccagcagccgcggtaatacgtagggggcaagcgttatccggatttactgggtgtaaagggagcgtagacggcacggcaagccagatgtgaaagcccggggctcaaccccgggactgcatttggaactgctgagctagagtgtcggagaggcaagtggaattcctagtgtagcggtgaaatgcgtagatattaggaggaacaccagtggcgaaggcggcttgctggacgatgactgacgttgaggctcgaaagcgtggggagcaaacaggattagataccctggtagtccacgccgtaaacgatgactgctaggtgtcgggtggcaaagccattcggtgccgcagctaacgcaataagcagtccacctggggagtacgttcgcaagaatgaaactcaaaggaattgacggggacccgcacaagcggtggagcatgtggtttaattcgaagcaacgcgaagaaccttacctgatcttgacatcccgatgaccgcttcgtaatggaagcttttcttcggaacatcggtgacaggtggtgcatggttgtcgtcagctcgtgtcgtgagatgttgggttaagtcccgcaacgagcgcaacccctatcttcagtagccagcaggttaagctgggcactctggagagactgccagggataacctggaggaaggtggggatgacgtcaaatcatcatgccccttatgaccagggctacacacgtgctacaatggcgtaaacaaagagaagcgaactcgcgagggtaagcaaatctcaaaaataacgtctcagttcggattgtagtctgcaactcgactacatgaagctggaatcgctagtaatcgcagatcagaatgctgcggtgaatacgttcccgggtcttgtacacaccgcccgtcacaccatgggagtcagtaacgcccgaagtcagtgacccaaccgtaaggagggagctgccgaaggtgggaccgataactggggtgaagtcgtaacaaggtagccgtatcggaaggtgcggctggatcacctccttt

SEQ ID NO: 1500 - DNA, 1071 bp, artificial sequence
  GCF_900322585.1_01498_Lactobacillus_delbrueckii
tgaagagtttgatcatggctcagattgaacgctggcggcaggcttaacacatgcaagtcgaacgaggttagaaagcttgcttttgatacctagtggcggacgggtgagtaatgcttaggaatctgcctagtagtgggggataacttggggaaactcaagctaataccgcatacgacctacgggtgaaagggggcgcaagctctcgctattagatgagcctaagtcggattagctagttggtggggtaaaggcctaccaaggcgacgatctgtagctggtctgagaggatgatcagccacactgggactgagacacggcccagactcctacgggaggcagcagtggggaatattggacaatgggcgaaagcctgatccagccatgccgcgtgtgtgaagaaggccttttggttgtaaagcactttaagtggggaggaaaagttaatggttaatacccattagccctgacgttacccacagaataagcaccggctaactctgtgccagcagccgcggtaatacagagggtgcaagcgttaatcggaattactgggcgtaaagcgcgcgtaggtggttacttaagtcagatgtgaaagccccgggcttaacctgggaactgcatctgatactgggtaactagagtaggtgagaggggagtagaattccaggtgtagcggtgaaatgcgtagagatctggaggaataccgatggcgaaggcagctccctggcatcatactgacactgaggtgcgaaagcgtgggtagcaaacaggattagataccctggtagtccacgccgtaaacgatgtctaccagtcgttgggtcttttaaagacttagtgacgcagttaacgcaataagtagaccgcctggggagtacggccgcaaggttaaaactcaaatgaattgacgggggcccgcacaagcggtggagcatgtggtttaattcgatgcaacgcgaagaaccttacctggtcttgacatagtaggaatcctgcagagatgcgggagtgccttcgggaatctacatacaggtgctgcatggctgtcgtcagctcgtgtcgtgagatgtt

SEQ ID NO: 1501 - DNA, 1440 bp, artificial sequence
  GCF_900322585.1_01627_Lactobacillus_delbrueckii
tggagagtttgatcctggctcagaacaaacgctggcggcgtgcttaacacatgcaagtcgaacgagaaattccctgcttgcagggaagagtaaagtggcgcacgggtgagtaacgcgtgggtaacctacctttgaattcggaatagcccgtcgaaaggtggattaataccggatacggtttaaggatcttcggatttttaaattaaaggtgacctcttcatgaaagttgccgttcatagatgggcccgcgtaccattagcttgttggtggggtaatggcctaccaaggcgacgatggttagctggtctgagaggatgatcagccacactggaactggaacacggtccagactcctacgggaggcagcagtgaggaattttgcgcaatgggggaaaccctgacgcagcaacgccgcgtgagcgaagaaggccttcgggtcgtaaagctctgtcaagtgggaaaaaaatcttttgatgaatagttaaaagacttgatggtaccactggaggaagcaccggctaactccgtgccagcagccgcggtaatacggagggtgcaagcgttgttcggaattactgggcgtaaagagcgtgtaggcggtttgacaagtcagatgtgaaagccccgagctcaacccgggaagtgcatttgaaactgtctcactagagtatgggagaggagattggaattcctggtgtagaggtgaaattcgtagatatcaggaggaacacccgtggcgaaggcgattctctggaccaatactgacgctgagacgcgaaagcgtggggagcaaacaggattagataccctggtagtccacgccgtaaacgatgagaactaggtgtagtgggtattgacccctgctgtgccgaagttaacgcattaagttctccgcctggggagtacggccgcaaggctaaaactcaaaggaattgacgggggcccgcacaagcggtggagcatgtggtttaattcgacgcaacgcgaagaaccttacctgggtttgacatcctttgaccgtctgtgaaagcagatttttccggctttgccggaacagagtgacaggtgctgcatggctgtcgtcagctcgtgtcgtgagatgttgggttaagtcccgcaacgagcgtaacccttgtctttagttgccattattaagttaggcactctaaagagactgcctcggttaacggggaggaaggtggggatgacgtcaagtcctcatggcctttatatccagggctacacacgtgctacaatgggctgtacaaagggttgctatcccgcgagggggcgctaatcccaaaaagcagttctcagttcggattgaagtctgcaactcgacttcatgaaggtggaatcgctagtaatcgtggatcagcatgccacggtgaatacgttcccgggccttgtacacaccgcccgtcacaccacgaaagtcga

SEQ ID NO: 1502 - DNA, 1524 bp, artificial sequence
  GCF_900322585.1_01719_Lactobacillus_delbrueckii
tgaagagtttgatcatggctcagattgaacgctggcggcaggcttaacacatgcaagtcgaacgaggttagaaagcttgcttttgatacctagtggcggacgggtgagtaatgcttaggaatctgcctagtagtgggggataacttggggaaactcaagctaataccgcatacgacctacgggtgaaagggggcgcaagctctcgctattagatgagcctaagtcggattagctagttggtggggtaaaggcctaccaaggcgacgatctgtagctggtctgagaggatgatcagccacactgggactgagacacggcccagactcctacgggaggcagcagtggggaatattggacaatgggcgaaagcctgatccagccatgccgcgtgtgtgaagaaggccttttggttgtaaagcactttaagtggggaggaaaagttaatggttaatacccattagccctgacgttacccacagaataagcaccggctaactctgtgccagcagccgcggtaatacagagggtgcaagcgttaatcggaattactgggcgtaaagcgcgcgtaggtggttacttaagtcagatgtgaaagccccgggcttaacctgggaactgcatctgatactgggtaactagagtaggtgagaggggagtagaattccaggtgtagcggtgaaatgcgtagagatctggaggaataccgatggcgaaggcagctccctggcatcatactgacactgaggtgcgaaagcgtgggtagcaaacaggattagataccctggtagtccacgccgtaaacgatgtctaccagtcgttgggtcttttaaagacttagtgacgcagttaacgcaataagtagaccgcctggggagtacggccgcaaggttaaaactcaaatgaattgacgggggcccgcacaagcggtggagcatgtggtttaattcgatgcaacgcgaagaaccttacctggtcttgacatagtaggaatcctgcagagatgcgggagtgccttcgggaatctacatacaggtgctgcatggctgtcgtcagctcgtgtcgtgagatgttgggttaagtcccgcaacgagcgcaacccttttccttagttaccagcacctcgggtgggaactctaaggatactgccagtgacaaactggaggaaggcggggacgacgtcaagtcatcatggcccttacgaccagggctacacacgtgctacaatggtaggtacaaagggttgctacacagcgatgtgatgccaatctcaaaaagcctatcgtagtccggattggagtctgcaactcgactccatgaagtcggaatcgctagtaatcgcagatcagaatgctgcggtgaatacgttcccgggccttgtacacaccgcccgtcacaccatgggagttgatctcaccagaagtgggtagcctaacgcaagagggcgctcaccacggtggggtcgatgactggggtgaagtcgtaacaaggtagccgtaggggaacctgcggctggatcacctcctt

SEQ ID NO: 1503 - DNA, 1520 bp, artificial sequence
  GCF_900322585.1_01782_Lactobacillus_delbrueckii
gcctaatacatgcaagtcgaacgcaatcttttaacaatgagtgcttgcactcagcgtttaaagtgcgagtggcgaacgggtgagtaacacgtgggcaatctgcccaaaagtgggggataacacttggaaacaggtgctaataccgcatcaaccggctgaccgcatggtcggccgggcaaagacggcgtcagctgtcgcttttggatgagcccgcggcgtattaactagttggtaaggtaacggcttaccaaggtgatgatacgtagccgaactgagaggttgatcggccacattgggactgagacacggcccaaactcctacgggaggcagcagtagggaatcttccacaatggacgcaagtctgatggagcaacgccgcgtgtatgaagaaggtcttcggatcgtaaaatactgttgtcagagaagaacacgtgatagagtaactgctatggcgctgacggtatctgaccagcaagtcacggctaactacgtgccagcagccgcggtaatacgtaggtggcaagcgttgtccggatttattgggcgtaaagggaacgcaggcggtcttttaagtctgatgtgaaagccttcggcttaaccggagaagtgcattggaaactggaagacttgagtgcagaagaggagagtggaactccatgtgtagcggtgaaatgcgtagatatatggaagaacaccagtggcgaaagcggctctctggtctgtaactgacgctgaggttcgaaagcgtggggagcgaacaggattagataccctggtagtccacgctgtaaacgatgaatgctaggtgttggagggtttccgcccttcggtgccgcagctaacgcactaagcattccgcctggggagtacgatcgcaagattgaaactcaaaggaattgacgggggcccgcacaagcggtggagcatgtggtttaattcgaagcaacgcgaagaaccttaccaggtcttgacatcttttgaccatctgagagatcagaatttcccttcggggacaaaatgacaggtggtgcatggctgtcgtcagctcgtgtcgtgagatgttgggttaagtcccgcaacgagcgcaacccttattgtcagttgccagcattcagttgggcactctggcgagactgccggtgacaaaccggaggaaggtggggatgacgtcaagtcatcatgccccttatgacctgggctacacacgtgctacaatggacgatacaacgagtcgcgagaccgcgaggtttagctaatctctgaaagtcgttctcagttcggatcgtaggctgcaactcgcctacgtgaagtcggaatcgctagtaatcgcggatcagcatgccgcggtgaatacgttcccgggccttgtacacaccgcccgtcacaccatgagagtttgtaacacccaaagccggtgcggtaaccattttggagccagccgtctaaggtgggacagatgattggggtgaagtcgtaacaaggtagccgtaggagaacctgcggctggatcacctccttt

SEQ ID NO: 1504 - DNA, 1459 bp, artificial sequence
  GCF_900322585.1_02016_Lactobacillus_delbrueckii
tgacaaagagtggcgaacgggtgagtaacacgtgggtaacctacctcttagcaggggataacatttggaaacaagtgctaataccgtataacactaacaaccgcatggttgttagttgaaagatggttctgctatcactaagagatggacccgcggtgcattagctagttggtaaggtaatggcttaccaaggcgatgatgcgtagccgagttgagagactgatcggccacaatgggactgagacacggcccatactcctacgggaggcagcagtagggaatcttccacaatgggcgcaagcctgatggagcaacgccgcgtgtgtgatgaagggtttcggctcgtaaaacactgttataagagaagaacgacattgagagtaactgttcagtgtgtgacggtatcttatcagaaaggaacggctaaatacgtgccagcagccgcggtaatacgtatgttccaagcgttatccggatttattgggcgtaaagcgagcgcagacggttatttaagtctgaagtgaaagccctcagctcaactgaggaagggctttggaaactggataacttgagtgcagtagaggaaagtggaactccatgtgtagcggtgaaatgcgtagatatatggaagaacaccggtggcgaaagcggctttctggactgtaactgacgttgaggctcgaaagtgtgggtagcaaacaggattagataccctggtagtccacaccgtaaacgatgagtgctagatgttcgagggtttccgcccttgagtgtcgcagctaacgcattaagcactccgcctggggagtacgaccgcaaggttgaaactcaaaggaattgacggggacccgcacaagcggtggagcatgtggtttaattcgaagcaacgcgaagaaccttaccaggtcttgacatcccttgctaatcctagaaataggatgttcccttcggggacaaggtgacaggtggtgcatggttgtcgtcagctcgtgtcgtgagatgttgggttaagtcccgcaacgagcgcaacccttattattagttgccagcattcagttgggcactctagtgagactgccggtgacaaaccggaggaaggtggggatgacgtcaaatcatcatgccccttatgacctgggctacacacgtgctacaatggcatatacaacgagtcgctaacccgcgagggtacgctaatctcttaaagtatgtctcagttcggattgtaggctgcaactcgcctacatgaagtcggaatcgctagtaatcgcggatcagcacgccgcggtgaatacgttcccgggtcttgtacacaccgcccgtcacaccatgagagtttgtaacacccaaagccggtgcggtaaccttttaggagccaaccgtctaaggtgggacagatgattagggtgaagtcgtaacaaggtagccgtaggagaacctgcggctggatcacctcctt

SEQ ID NO: 1505 - DNA, 1533 bp, artificial sequence
  GCF_900322585.1_02036_Lactobacillus_delbrueckii
tgaagagtttgatcctggctcagattgaacgctagcgggatgctttacacatgcaagtcgaacggcagcacagaggaacttgttccttgggtggcgagtggcggacgggtgagtaatgtatcggaacgtgcccagtagtgggggataactacgcgaaagcgtggctaataccgcatattctctacggaggaaagggggggatcatttgacctctcgctattggagcggccgatattagattagctagttggtggggtaacggcctaccaaggcagtgatctatagctggtttgagaggacgaccagccacactgggactgagacacggcccagactcctacgggaggcagcagtggggaattttcgacaatggggggaaccctgatcgagccatcccgcgtgtgggacgaaggccttcgggttgtaaaccacttttctcaacgaagaaaagtcttaggctaataccttaagatgctgacggtagttgaggaataagcaccggctaactatgtgccagcagccgcggtaatacatagggtgcaagcgttaatcggaattactgggcgtaaagggtgcgcaggcggcttggaaagaacggtgtgaaatcccggggctcaacctcggaactgcactattaactatcaagctagagtatgtcagaggggggtggaattccgcgtgtagcagtgaaatgcgtagatatgcggaggaacaccaatggcgaaggcagccccctgggataatactgacgctcaggcacgaaagcgtgggtagcaaacaggattagataccctggtagtccacgccctaaacgatgtcaactagctgttgggccggttacggcttagtagcgcagctaacgcgtgaagttgaccgcctggggactacggtcgcaagactaaaactcaaaggaattgacggggacccgcacaagcggtggatgatgtggattaattcgatgcaacgcgaaaaaccttacctacccttgacatgcctggaagctttaagagattaaagtgtgctcgcaagagaaccggtgcacaggtgctgcatggctgtcgtcagctcgtgtcgtgagatgttgggttaagtcccgcaacgagcgcaacccttgtcattagttgctacgtaagagcactctagtgagactgccggtgacaaaccggaggaaggtggggatgacgtcaagtcctcatggcccttatgggtagggcttcacacgtcatacaatggtcgggacagagggttgccaagccgcgaggtggagctaatctcttaaacccgatcgtagtccggattgcaggctgcaactcgcctgcatgaagtcggaatcgctagtaatcgcagatcagaatgctgcggtgaatacgttcccgggtcttgtacacaccgcccgtcacaccatgggagtgggttttaccagaagtagttagtctaaccgcaagggggacgattaccacggtaggattcatgactggggtgaagtcgtaacaaggtagccgtaccggaaggtgcggctggatcacctccttt

SEQ ID NO: 1506 - DNA, 1489 bp, artificial sequence
  GCF_000006865.1_00602_Lactococcus_lactis
attccggttgatcctgccggaggccactgctatgggggtccgactaagccatgcgagtcatggggcgcgctctgcgcgcaccggcggacggctcagtaacacgtcggtaacctaccctcgggagggggataaccccgggaaactggggctaatcccccataggcctgaggtactggaaggtcctcaggccgaaaggggcttttgcccgcccgaggatgggccggcggccgattaggtagttggtggggtaacggcccaccaagccgaagatcggtacgggccatgagagtgggagcccggagatggacactgagacacgggtccaggccctacggggcgcagcaggcgcgaaacctccgcaatgcgggaaaccgcgacggggggacccccagtgccgtggcatcgccacggcttttccggagtgtaaaaagctccgggaataagggctgggcaaggccggtggcagccgccgcggtaataccggcggcccaagtggtggccgctattattgggcctaaagcgtccgtagccgggcccgtaagtccctggcgaaatcccacggctcaaccgtggggcttgctggggatactgcgggccttgggaccgggagaggccgggggtacccctggggtaggggtgaaatcctgtaatcccagggggaccgccagtggcgaaggcgcccggctggaacgggtccgacggtgagggacgaaggccaggggagcgaaccggattagatacccgggtagtcctggctgtaaaggatgcgggctaggtgtcgggcgagcttcgagctcgcccggtgccgaagggaagccgttaagcccgccgcctggggagtacggccgcaaggctgaaacttaaaggaattggcgggggagcactacaaggggtggagcgtgcggtttaattggattcaacgccgggaacctcaccgggggcgacggcaggatgaaggccaggctgaaggtcttgccggacgcgccgagaggaggtgcatggccgccgtcagctcgtaccgtgaggcgtccacttaagtgtggtaacgagcgagacccgcgcccccagttgccagtcctccccgctggggaggaggcactctggggggaccgccggcgataagccggaggaaggagcgggcgacggtaggtcagtatgccccgaaacccccgggctacacgcgcgctacaatgggcgggacaatgggatccgaccccgaaaggggaagggaatcccctaaacccgccctcagttcggatcgcgggctgcaactcgcccgcgtgaagctggaatccctagtacccgcgtgtcatcatcgcgcggcgaatacgtccctgctccttgcacacaccgcccgtcactccacccgagcggggtccgggtgaggcctggtctcccttcggggaggccgggtcgagcctgggctccgtgaggggggagaagtcgtaacaaggtagccgtaggggaacctacggctcgatcacctcct

SEQ ID NO: 1507 - DNA, 1475 bp, artificial sequence
  GCF_000006865.1_02059_Lactococcus_lactis
ttctgtttgatcctggcagatgctactgctattgggattcgattaagccatgcaagtcgaacgagtttaggctcgtggcgtacggctcagtaacacgtggataacctacccttaggactgggataaccctgggaaactggggataatactggataggcaattattcctgtaatggttttttgtttaaatgttttttcgcctaaggatgggtctgcggccgattaggtagttggttaggtaatggcttaccaagcctttgatcggtacgggttgtgagagcaagagcccggagatggaacctgagacaaggttccaggccctacggggtgcagcaggcgcgaaacctccgcaatgtgagaaatcgcgacggggggatcccaagtgccattcttaacgggatggcttttcattagtgtaaagagcttttggaataagagctgggcaagaccggtgccagccgccgcggtaacaccggcagctctagtggtagcagtttttattgggcctaaagcgtccgtagccggtttaataagtctctggtgaaatcctgcagcttaactgtgggaattgctggagatactattagacttgagatcgggagaggttagaggtactcccagggtagaggtgaaattctgtaatcctgggaggaccgcctgttgcgaaggcgtctgactggaacgattctgacggtgagggacgaaagctaggggcgcgaaccggattagatacccgggtagtcctagctgtaaacgatgcggacttggtgttggggtggctttgagctgtcccagtgccgaagggaagctgttaagtccgccgcctgggaagtacggtcgcaagactgaaacttaaaggaattggcgggggagcaccacaacgcgtggagcctgcggtttaattggattcaacgccggacatctcaccagaggcgacagctgtatgatagccaggttgatgactttgcttgactagctgagaggaggtgcatggccgccgtcagctcgtaccgtgaggcgtcctgttaagtcaggcaacgagcgagacccacgctcttagttaccagcggatccttttttggatgccgggcacactaaggggaccgcctatgataaataggaggaaggagtggacgacggtaggtccgtatgccccgaatcctctgggcaacacgcgggctacaatggctgagacaatgggttccgacgccgaaaggcggaggtaatcctctaaacttagtcgtagttcggattgaggactgtaactcgttctcatgaagctggaatgcgtagtaatcgcgtgtcacaatcgcgcggtgaatacgtccctgctccttgcacacaccgcccgtcacgccacccaaaaagggattggatgaggatgtaatgttttgttatattcgaatctagtttttttaaggagggcgaagtcgtaacaaggtagccgtaggggaacctgcggctggatcacctcct

SEQ ID NO: 1508 - DNA, 1471 bp, artificial sequence
  GCF_000006865.1_02319_Lactococcus_lactis
ttccggttgatcctgccggaggccattgctatcggagtccgatttagccatgctagttgcacgagtttagactcgtagcatatagctcagtaacacgtggccaaactaccctacagaccgcaataacctcgggaaactgaggccaatagcggatataactctcagactggagtgtcgagagttagaaacgttccggcgctgtaggatgtggctgcggccgattaggtagatggtggggtaacggcccaccatgccgataatcggtacaggttgtgagagcaagagcctggagacggtatctgagacaagataccgggccctacggggcgcagcaggcgcgaaacctttacactgcacgacagtgcgatagggggactccgagtgtgagggcatatagccctcgcttttctgtaccgtaaggtggtacaggaacaaggactgggcaagaccggtgccagccgccgcggtaataccggcagtccaagtgatggccgatattattgggcctaaagcgtccgtagcttgctgtgtaagtccattgggaaatcgaccagctcaactggtcggcgtccggtggaaactacacagcttggggccgagagactcaacgggtacgtccggggtaggagtgaaatcctgtaatcctggacggaccaccaatggggaaaccacgttgagagaccggacccgacagtgagggacgaaagccagggtctcgaaccggattagatacccgggtagtcctggctgtaaacaatgctcgctaggtatgtcacgcgccatgagcacgtgatgtgccgtagtgaagacgataagcgagccgcctgggaagtacgtccgcaaggatgaaacttaaaggaattggcgggggagcaccacaaccggaggagcctgcggtttaattggactcaacgccggaaatctcaccggtcccgacagtagtaatgacagtcaggttgacgactttactcgacgctactgagaggaggtgcatggccgccgtcagctcgtaccgtgaggcgtcctgttaagtcaggcaacgagcgagacccacacttctagttgccagcaacacccttgtggtggttgggtacactaggaggactgccgctgctaaagcggaggaaggaatgggcaacggtaggtcagtatgccccgaatggaccgggcaacacgcgggctacaatggctctgacagtgggatgcgacgccgagaggcgaagctaatctccaaacggagtcgtagttcggattgcgggctgaaacccgcccgcatgaagctggattcggtagtaatcgcgtgtcagaagcgcgcggtgaatacgtccctgctccttgcacacaccgcccgtcaaagcacccgagtggggtccggatgaggccgtcatgcgacggtcgaatctgggctccgcaagggggcttaagtcgtaacaaggtagccgtagaggaatctgcggctggatcacctcct

SEQ ID NO: 1509 - DNA, 1471 bp, artificial sequence
  GCF_000006865.1_02358_Lactococcus_lactis
ttccggttgatcctgccggaggccattgctatcggagtccgatttagccatgctagttgcacgagttcagactcgtagcatatagctcagtaacacgtggccaaactaccctacagaccgcaataacctcgggaaactgaggccaatagcggatataactctcagactggagtgtcgagagttagaaacgttccggcgctgtaggatgtggctgcggccgattaggtagatggtggggtaacggcccaccatgccgataatcggtacaggttgtgagagcaagagcctggagacggtatctgagacaagataccgggccctacggggcgcagcaggcgcgaaacctttacactgcacgacagtgcgatagggggactccgagtgtgagggcatatagccctcgcttttctgtaccgtaaggtggtacaggaacaaggactgggcaagaccggtgccagccgccgcggtaataccggcagtccaagtgatggccgatattattgggcctaaagcgtccgtagcttgctgtgtaagtccattgggaaatcgaccagctcaactggtcggcgtccggtggaaactacacagcttggggccgagagactcaacgggtacgtccggggtaggagtgaaatcctgtaatcctggacggaccaccaatggggaaaccacgttgagagaccggacccgacagtgagggacgaaagccagggtctcgaaccggattagatacccgggtagtcctggctgtaaacaatgctcgctaggtatgtcacgcgccatgagcacgtgatgtgccgtagtgaagacgataagcgagccgcctgggaagtacgtccgcaaggatgaaacttaaaggaattggcgggggagcaccacaaccggaggagcctgcggtttaattggactcaacgccggaaatctcaccggtcccgacagtagtaatgacagtcaggttgacgactttactcgacgctactgagaggaggtgcatggccgccgtcagctcgtaccgtgaggcgtcctgttaagtcaggcaacgagcgagacccacacttctagttgccagcaacacccttgtggtggttgggtacactaggaggactgccgctgctaaagcggaggaaggaatgggcaacggtaggtcagtatgccccgaatggaccgggcaacacgcgggctacaatggctatgacagtgggatgcgacgccgagaggcgaagctaatctccaaacgtagtcgtagttcggattgcgggctgaaacccgcccgcatgaagctggattcggtagtaatcgcgtgtcagaagcgcgcggtgaatacgtccctgctccttgcacacaccgcccgtcaaagcacccgagtggggtccggatgaggccgtcatgcgacggtcgaatctgggctccgcaagggggcttaagtcgtaacaaggtagccgtagaggaatctgcggctggatcacctcct

SEQ ID NO: 1510 - DNA, 1472 bp, artificial sequence
  GCF_000006865.1_02444_Lactococcus_lactis
attccggttgatcctgccggaggccattgctatcggagtccgatttagccatgctagtcgcacgggcttagacccgtggcatatagctcagtaacacgtggccaaactaccctacagaccgcgataacctcgggaaactgaggccaatagcggatataactctcaggctggagtgccgagagttagaaacgttccggcgctgtaggatgtggctgcggccgattaggtagatggtggggtaacggcccaccatgccgataatcggtacgggttgtgagagcaagaacccggagacggtatctgagacaagataccgggccctacggggcgcagcaggcgcgaaacctttacactgcacgacagtgcgatagggggactccgagtgcgagggcatatagccctcgcttttctgtaccgtaaggtggtacaggaacaaggactgggcaagaccggtgccagccgccgcggtaataccggcagtccaagtgatggccgatattattgggcctaaagcgtccgtagccggccggacaagtccgttgggaaatcgacgcgctcaacgcgtcggcgtccagcggaaactgtccggcttggggccggaagacctggggggtacgtccggggtaggagtgaaatcccgtaatcctggacggaccaccaatggggaaaccacctcaggaagacggacccgacggtgagggacgaaagctagggtctcgaaccggattagatacccgggtagtcctagctgtaaacgatgctcgctaggtgtgccgtaggctacgagcctgcgctgcgccctagggaagccgagaagcgagccgcctgggaagtacgtctgcaaggatgaaacttaaaggaattggcgggggagcaccacaaccggaggagcctgcggtttaattggactcaacgccggaaatctcaccggtcccgacagtagtaatgacggtcaggttgacgactttacccgacgctactgagaggaggtgcatggccgccgtcagctcgtaccgtgaggcgtcctgttaagtcaggcaacgagcgagacccgcacttctagttgccagcaatacccttgaggtagttgggtacactaggaggactgccgctgctaaagcggaggaaggaacgggcaacggtaggtcagtatgccccgaatggaccgggcaacacgcgggctacaatggctctgacagtgggatgcaacgccgagaggcgacgctaatctccaaacggagtcgtagttcggattgcgggctgaaacccgcccgcatgaagctggattcggtagtaatcgcgtgtcagaagcgcgcggtgaatacgtccctgctccttgcacacaccgcccgtcaaagcacccgagtggggtccggatgaggccgtcatgcgacggtcgaatctgggctccgcaagggggcttaagtcgtaacaaggtagccgtagaggaatctgtggctggatcacctcct

SEQ ID NO: 1511 - DNA, 1467 bp, artificial sequence
  GCF_000006865.1_02464_Lactococcus_lactis
attccggttgatcccgccggaggccactgctattgggattcgactaagccatgcgagtctatggtttcggccatggcggacggctcattaacacgtggttaacataccctcaggtgggggataaccttgggaaactgaggataataccccatagaaaaagcagtctggaacgattctttttcgaaagcatatgcgcctgaggattggactgcgctcgattaggtagttggtggggtaatggcctaccaagcctacgatcggtacgggccttgagagaggaagcccggagatggggactgagacacggccccaggccctacggggcgcagcaggcgcgaaacctccgcaatgcacgaaagtgcgacggggggatcccaagtgctcatgcacagcatgggcttttatcaagtgtaaacagcttgaggaataagggctgggcaagttcggtgccagcagccgcggtaacaccgacggcccgagtggtggccacttttattgggcctaaagcgtccgtagccggtccagtaagtccttgtttaaatcctgcggcttaaccgcaggactggcagggatactgctggacttgggaccgggagaggacaagggtacttcaggggtagcggtgaaatgtgttgatccttgaaggaccacctatggcgaaggcacttgtctggaacgggtccgacggtgagggacgaaagccaggggcgcgaaccggattagatacccgggtagtcctggccgtaaactttgcgaactaggtgttaggtgggccccgtgcccatctagtgccgaagggaagccgttaagttcgccgcctggggagtacggtcgcaagactgaaacttaaaggaattggcgggggagcaccacaacgggtggagcctgcggtttaattggattcaacgccgggcatctcaccaggagcgacagcatgatgacggccaggttgacgaccttgcctgaagcgctgagaggtggtgcatggccatcgtcagctcgtaccgcgaggcgtcctgttaagtcaggtaacgagcgagacccgtgccctatgttgctactttttcctccgggagaaaggcactcataggggaccgctggcgctaagtcagaggaaggagcgggcaacgataggtccgcatgccccgaatctcctgggctacacgcgggctacaatggctaggacaatgggccgcaaccctgaaaagggacgcaaatctcctaaacctagtcgtagttcggatcgtgggctgtaactcgcccacgtgaagctggaatccgtagtaatcgcagttcataatactgcggtgaatgtgtccctgctccttgcacacaccgcccgtcacaccacccgagttgggttgaagtgaggccttggcctttggctagggtcgaacttgggctcagcgaggggggtgaagtcgtaacaaggtagccgtaggggaacctgcggctggatcacctcct

SEQ ID NO: 1512 - DNA, 1480 bp, artificial sequence
  GCF_000009425.1_00536_Lactococcus_lactis
atccgtttgatcctggcggaggccactgctattgggtttcgattaagccatgcaagtcgaacgaatccttcggggttcgtggcatacggctcagtaacacgtggataacctacccttaggactgggataaccccgggaaactggggataataccggatatgtagggttgcctggaatggtaccctattgaaatgttccgacgcctaaggatggatctgcggcagattaggtagttggcggggtaaatgcccaccaagccagtaatctgtacgggttgtgagagcaagagcccggagatggaacctgagacaaggttccaggccctacggggcgcagcaggcgcgaaacctccgcaatgcacgaaagtgcgacgggggaaacccaagtgccactcttaacggggtggcttttcttaagtgtaaaaagcttttggaataagagctgggcaagaccggtgccagccgccgcggtaacaccggcagctcaagtggtggccatttttattgggcctaaagcgttcgtagccggcttgataagtctctggtgaaatcccacagcttaactgtgggaattgctggagatactattaggcttgaggccgggagaggctggaggtactcccagggtaggggtgaaatcctataatcctgggaggaccacctgtggcgaaggcgtccagctggaacggacctgacggtgagtaacgaaagccaggggcgcgaaccggattagatacccgggtagtcctggccgtaaacgatgtggacttggtgttgggatggctccgagctgccccagtgccgaagggaagctgttaagtccaccgcctgggaagtacggtcgcaagactgaaacttaaaggaattggcgggggagcaccacaacgcgtggagcctgcggtttaattggattcaacgccggacatctcaccaggggcgacagcagaatgatagccaggttgatgaccttgcttgacaagctgagaggaggtgcatggccgccgtcagctcgtaccgtgaggcgtcctgttaagtcaggcaacgagcgagacccacgcccttagttaccagcggatccttcgggatgccgggcacactaaggggaccgccagtgataaactggaggaaggagtggacgacggtaggtccgtatgccccgaatcccctgggctacacgcgggctacaatggttaggacaatgggttccgacactgaaaagtgaaggtaatctcctaaacctggccttagttcggattgagggctgtaactcgccctcatgaagctggaatgcgtagtaatcgcgtgtcataaccgcgcggtgaatacgtccctgctccttgcacacaccgcccgtcacgccacccaaaaagggtttggatgaggccctagtcttcattggttagggtcgaatctgggttctttgaggagggcgaagtcgtaacaaggtagccgtaggggaacctgcggctggatcacctcct

SEQ ID NO: 1513 - DNA, 1480 bp, artificial sequence; identical to SEQ ID NO: 1512
  GCF_000009425.1_02237_Lactococcus_lactis

SEQ ID NO: 1514 - DNA, 1480 bp, artificial sequence; identical to SEQ ID NO: 1512
  GCF_000009425.1_02502_Lactococcus_lactis

SEQ ID NO: 1515 - DNA, 1434 bp, artificial sequence
  GCF_000009425.1_02546_Lactococcus_lactis
ccgatttagccatgctagttgcacgagttcagactcgtggcgaatagctccgtaacacgtggccaaactaccctacggagaggcataacctcgggaaactgaggctaatacctcataacgttcccacgctggaatgccgggaactggaaacgctccggcgccgtaggatgtggctgcggccgattaggtagacggtggggtaacggcccaccgtgccgataatcggtacgggttgtgagagcaagagcccggagacggaatctgagacaagattccgggccctacggggcgcagcaggcgcgaaacctttacactgcgcgaccgcgcgataaggggaccccgagtgcgagggcatacagtcctcgcttttgagaaccgtaaggtggttctcgaataagggctgggcaagaccggtgccagccgccgcggtaataccggcagcccaagtgatggccgatcttattgggcctaaagcgtccgtagctggccacgtcggttcgtcgggaaatccatccgctcaacggatgggcgtccggcgaataccacgtggcttgggaccggaagacccagagggtacgtccggggtaggagtgaaatcccgtaatcccggacggaccgccgatggcgaaagcactctgggaggacggctccgacagtgagggacgaaagctagggtctcgaaccggattagatacccgggtagtcctagccgtaaacgatgcctgttaggtgtggcacccgctacgagcgggtgctgtgccgtagggaagccgctaaacaggccgcctgggaagtacgtccgcaaggatgaaacttaaaggaattggcgggggagcactacaaccggaggagcctgcggtttaattggactcaacgccggacatctcaccagcaccgacagtagcgatgatcatcaggttgatgacctccatgctgagctactgagaggaggtgcatggccgccgtcagctcgtaccgtgaggcgtcctgttaagtcaggcaacgagcgagacccgcactcttaattgccagcatgacccccgggtcgatgggtacattaggaggactgccgtggccaacacggaggaaggaacgggcaacggtaggtcagtatgccccgaatgtgctgggctacacgcgggctacaatggccaggacaatgggttccaacgccgaaaggtgcaggtaatctcagaaacctggtcgtagttcggattgagggctgaaactcgccctcatgaagctggattcggtagtagtcgcctttcagcagagggcggcgaatacgtccctgctccttgcacacaccgcccgtcaaagcacccgagtggggtccggatgaggccaggattccctggtcgaatctgggctccgcaagggggcttaagtcgtaacaaggtagccgtaggggaatctgcggctggatcacctcct

SEQ ID NO: 1516 - DNA, 1472 bp, artificial sequence
  GCF_000009425.1_02636_Lactococcus_lactis
attccggttgatcctgccggaggccattgctatcggagtccgatttagccatgctagtcgcacgagttcagactcgtggcatatagctcagtaacacgtggccaaactaccctacagaccgcgataacctcgggaaactgaggccaatagcggatatcactctcagactggagtgtcgagagtgagaaacgttccggcgctgtaggatgtggctgcggccgattaggtagatggtggggtaacggcccaccatgccgataatcggtacgggttgtgagagcaagaacccggagacggtatctgagacaagataccgggccctacggggcgcagcaggcgcgaaacctttacactgcacgacagtgcgatagggggactccgagtgtgagggcatatagccctcgcttttctgtaccgtaaggtggtacaggaacaaggactgggcaagaccggtgccagccgccgcggtaataccggcagtccaagtgatggccgatattattgggcctaaagcgtccgtagccggccggacaagtccgttgggaaatcgacgcgctcaacgcgtcggcgtccagcggaaactgtccggcttggggccggaagacctgaggggtacgtccggggtaggagtgaaatcctgtaatcctggacggaccaccaatggggaaaccacctcaggaagacggacccgacggtgagggacgaaagctagggtctcgaaccggattagatacccgggtagtcctagctgtaaacgatgctcgctaggtgtgccgtaggctacgagcctgcgctgcgccctagggaagccgagaagcgagccgcctgggaagtacgtctgcaaggatgaaacttaaaggaattggcgggggagcaccacaaccggaggagcctgcggtttaattggactcaacgccggacatctcaccggtcccgacagtagtaatgacggtcaggttgacgactttacccgacgctactgagaggaggtgcatggccgccgtcagctcgtaccgtgaggcgtcctgttaagtcaggcaacgagcgagacccgcacttctagttgccagcaatacccttgaggtagttgggtacactaggaggactgccgctgctaaagcggaggaaggaacgggcaacggtaggtcagtatgccccgaatggaccgggcaacacgcgggctacaatggctctgacagtgggatgcaacgccgagaggcgaagctaatctccaaacggagtcgtagttcggattgcgggctgaaacccgcccgcatgaagctggattcggtagtaatcgcgtgtcagaagcgcgcggtgaatacgtccctgctccttgcacacaccgcccgtcaaagcacccgagtggggtccggatgaggccgtcatgcgacggtcgaatctgggctccgcaagggggcttaagtcgtaacaaggtagccgtagaggaatctgtggctggatcacctcct

SEQ ID NO: 1517 - DNA, 1472 bp, artificial sequence
  GCF_000009425.1_02662_Lactococcus_lactis
attccggttgatcctgccggaggccattgctatcggagtccgatttagccatgctagtcgcacgagttcagactcgtggcatatagctcagtaacacgtggccaaactaccctacagaccgcgataacctcgggaaactgaggccaatagcggatatcactctcagactggagtgtcgagagtgagaaacgttccggcgctgtaggatgtggctgcggccgattaggtagatggtggggtaacggcccaccatgccgataatcggtacaggttgtgagagcaagagcctggagacggtatctgagacaagataccgggccctacggggcgcagcaggcgcgaaacctttacactgcacgacagtgcgatagggggactccgagtgtgagggcatatagccctcgcttttctgtaccgtaaggtggtacaggaacaaggactgggcaagaccggtgccagccgccgcggtaataccggcagtccaagtgatggccgatattattgggcctaaagcgtccgtagcttgctgtgtaagtccattgggaaatcgaccagctcaactggtcggcgtccggtggaaactacacagcttggggccgagagactcaacgggtacgtccggggtaggagtgaaatcctgtaatcctggacggaccaccaatggggaaaccacgttgagagaccggacccgacagtgagggacgaaagccagggtctcgaaccggattagatacccgggtagtcctggctgtaaacaatgctcgctaggtatgtcacgcgccatgagcacgtgatgtgccgtagtgaagacgataagcgagccgcctgggaagtacgtccgcaaggatgaaacttaaaggaattggcgggggagcaccacaaccggaggagcctgcggtttaattggactcaacgccggacatctcaccggtcccgacagtagtaatgacggtcaggttgacgactttacccgacgctactgagaggaggtgcatggccgccgtcagctcgtaccgtgaggcgtcctgttaagtcaggcaacgagcgagacccacacttctagttgccagcaacacccctgcggtggttgggtacactaggaggactgccattgctaaaatggaggaaggaatgggcaacggtaggtcagtatgccccgaatggaccgggcaacacgcgggctacaatggctctgacagtgggatgcaacgccgagaggcgaagctaatctccaaacggagtcgtagttcggattgcgggctgaaacccgcccgcatgaagctggattcggtagtaatcgcgtgtcagaagcgcgcggtgaatacgtccctgctccttgcacacaccgcccgtcaaagcacccgagtggggtccggatgaggccgtcatgcgacggtcgaatctgggctccgcaagggggcttaagtcgtaacaaggtagccgtagaggaatctgcggctggatcacctcct

SEQ ID NO: 1518 - DNA, 1465 bp, artificial sequence
  GCF_000025045.1_00549_Lactococcus_lactis
ttgagagtttgatcctggctcagaacgaacgctggcggcaggcctaacacatgcaagtcgagcgagatcttcggatctagcggcggacgggtgagtaacgcgtgggaacgtaccctttgcttcggaatagcctcgggaaactgggagtaataccgaatgtgccctacgggggaaagatttatcggcaaaggatcggcccgcgttggattaggtagttggtgaggtaatggctcaccaagccgacgatccatagctggtttgagaggatgatcagccacactgggactgagacacggcccagactcctacgggaggcagcagtggggaatcttagacaatgggggaaaccctgatctagccatgccgcgtgagcgatgaaggccttagggttgtaaagctctttcagctgggaagataatgacggtaccagcagaagaagccccggctaactccgtgccagcagccgcggtaatacggagggggctagcgttgttcggaattactgggcgtaaagcgcacgtaggcggattagtcagtcagaggtgaaatcccagggctcaaccctggaactgcctttgatactgctagtcttgaggtcgagagaggtgagtggaattccgagtgtagaggtgaaattcgtagatattcggaggaacaccagtggcgaaggcggctcactggctcgatactgacgctgaggtgcgaaagcgtggggagcaaacaggattagataccctggtagtccacgccgtaaacgatgaatgccagtcgtcgggttgcatgcaattcggtgacacacctaacggattaagcattccgcctggggagtacggtcgcaagattaaaactcaaaggaattgacgggggcccgcacaagcggtggagcatgtggtttaattcgaagcaacgcgcagaaccttaccaacccttgacatcgggatcgcggtttccagagatggattccttcagttcggctggatcccagacaggtgctgcatggctgtcgtcagctcgtgtcgtgagatgttcggttaagtccggcaacgagcgcaacccacgtctttagttgccagcattcagttgggcactctaaagaaactgccgatgataagtcggaggaaggtgtggatgacgtcaagtcctcatggcccttacgggttgggctacacacgtgctacaatggcgatgacaatgggccaatcccaaaaaatcgtctcagttcggattggggtctgcaactcgaccccatgaagtcggaatcgctagtaatcgcgtaacagcatgacgcggtgaatacgttcccgggccttgtacacaccgcccgtcacaccatgggaattgggtctaccctaagatggtgcgccaacctggtaacaggaggcagccagccacggtaggctcagtgactggggtgaagtcgtaacaaggtagccgtaggggaacctgcggctggatcacctccttt

SEQ ID NO: 1519 - DNA, 1522 bp, artificial sequence
  GCF_000025045.1_02148_Lactococcus_lactis
atgaagagtttgatcctggctcaggatgaacgctagcggcaggcctaacacatgcaagtcgaggggtaaagaagtgcttgcacttttgagaccggcgcacgggtgagtaacgcgtatggaatctgccttgtacaggggaatagcccagggaaacttggattaatgccccatggtatcatagtccggcattggattttgattaaagatttatcggtacaagatgatcatgcgtcccattagcttgatggtaaggtaacggcttaccatggctacgatgggtaggggccctgagagggggatcccccacactggtactgagacacggaccagactcctacgggaggcagcagtgaggaatattggacaatgggcgagagcctgatccagccatgccgcgtgcaggaagaccgccctatgggtcgtaaactgcttttacagaggaagaaacaccccgacgtgtcggggcttgacggtactctgggaataaggatcggctaactccgtgccagcagccgcggtaatacggaggatccgagcgttatccggaatcattgggtttaaagggtccgtaggcgggcgattaagtcagtggtgaaagtctgcagctcaactgtagaattgccattgatactggttgtcttgaatggttgtgaagtggctagaatatgtggtgtagcggtgaaatgcttagatatcacatagaataccgattgcgaaggcaggtcactaacaacgcattgacgctgatggacgaaagcgtggggagcgaacaggattagataccctggtagtccacgccgtaaacgatggatactagctgtccggaccacgttggtggtctgggtggcccagcgaaagtgataagtatcccacctggggagtacgttcgcaagaatgaaactcaaaggaattgacgggggcccgcacaagcggtggagcatgtggtttaattcgatgatacgcgaggaaccttaccagggcttaaatgtagtctgacaggggtggaaacatccccttcttcggacagattacaaggtgctgcatggttgtcgtcagctcgtgccgtgaggtgtcaggttaagtcctataacgagcgcaacccctgtcgttagttgccagcatgtaaagatgggaactctaacgagactgccggtgcaaaccgtgaggaaggtggggatgacgtcaaatcatcacggcccttacgtcctgggccacacacgtgctacaatggcaggtacaatgggcagccactgcgcaagcaggcgcgaatccacaaaacctgtctcagttcggatcggggtctgcaactcgaccccgtgaagctggaatcgctagtaatcggatatcagccatgatccggtgaatacgttcccgggccttgtacacaccgcccgtcaagccatggaagctggaagcacctgaagtccgtcaccgcgaggagcggcctagggtgaagctggtaactggggctaagtcgtaacaaggtagccgtaccggaaggtgcggctggaacacctccttt

SEQ ID NO: 1520 - DNA, 1522 bp, artificial sequence; identical to SEQ ID NO: 1519
  GCF_000025045.1_02438_Lactococcus_lactis

SEQ ID NO: 1521 - DNA, 1549 bp, artificial sequence
  GCF_000025045.1_02479_Lactococcus_lactis
ttgaagagtttgatcatggctcagattgaacgctggcggcaggcctaacacatgcaagtcgagcggaaacgagttatctgaaccttcggggaacgataacggcgtcgagcggcggacgggtgagtaatgcctaggaaattgccttgatgtgggggataaccattggaaacgatggctaataccgcataatgcctacgggccaaagagggggaccttcgggcctctcgcgtcaagatatgcctaggtgggattagctagttggtgaggtaatggctcaccaaggcgacgatccctagctggtctgagaggatgatcagccacactggaactgagacacggtccagactcctacgggaggcagcagtggggaatattgcacaatgggcgaaagcctgatgcagccatgccgcgtgtatgaagaaggccttcgggttgtaaagtactttcagttgtgaggaagggggtgtcgttaatagcggcatctcttgacgttagcaacagaagaagcaccggctaactccgtgccagcagccgcggtaatacggagggtgcgagcgttaatcggaattactgggcgtaaagcgcatgcaggtggttcattaagtcagatgtgaaagcccggggctcaacctcggaactgcatttgaaactggtgaactagagtactgtagaggggggtagaatttcaggtgtagcggtgaaatgcgtagagatctgaaggaataccagtggcgaaggcggccccctggacagatactgacactcagatgcgaaagcgtggggagcaaacaggattagataccctggtagtccacgccgtaaacgatgtctacttggaggttgtggccttgagccgtggctttcggagctaacgcgttaagtagaccgcctggggagtacggtcgcaagattaaaactcaaatgaattgacgggggcccgcacaagcggtggagcatgtggtttaattcgatgcaacgcgaagaaccttacctactcttgacatccagagaagccagcggagacgcaggtgtgccttcgggagctctgagacaggtgctgcatggctgtcgtcagctcgtgttgtgaaatgttgggttaagtcccgcaacgagcgcaacccttatccttgtttgccagcgagtaatgtcgggaactccagggagactgccggtgataaaccggaggaaggtggggacgacgtcaagtcatcatggcccttacgagtagggctacacacgtgctacaatggcgcatacagagggctgcaaacttgcgagagtgagcgaatcccaaaaagtgcgtcgtagtccggattggagtctgcaactcgactccatgaagtcggaatcgctagtaatcgtagatcagaatgctacggtgaatacgttcccgggccttgtacacaccgcccgtcacaccatgggagtgggctgcaaaagaagtgggtagtttaaccttcgggaggacgctcaccactttgtggttcatgactggggtgaagtcgtaacaaggtagccctaggggaacctggggctggatcacctcctt

SEQ ID NO: 1522 - DNA, 1550 bp, artificial sequence
  GCF_000025045.1_02579_Lactococcus_lactis
ttgaagagtttgatcatggctcagattgaacgctggcggcaggcctaacacatgcaagtcgagcggaaacgagttatctgaaccttcggggaacgataacggcgtcgagcggcggacgggtgagtaatgcctaggaaattgccttgatgtggggataaccattggaaacgatggctaataccgcataatgcctacgggccaaagagggggaccttcgggcctctcgcgtcaagatatgcctaggtgggattagctagttggtgaggtaatggctcaccaaggcgacgatccctagctggtctgagaggatgatcagccacactggaactgagacacggtccagactcctacgggaggcagcagtggggaatattgcacaatgggcgaaagcctgatgcagccatgccgcgtgtatgaagaaggccttcgggttgtaaagtactttcagttgtgaggaagggggtgtcgttaatagcggcatctcttgacgttagcaacagaagaagcaccggctaactccgtgccagcagccgcggtaatacggagggtgcgagcgttaatcggaattactgggcgtaaagcgcatgcaggtggttcattaagtcagatgtgaaagcccggggctcaacctcggaactgcatttgaaactggtgaactagagtactgtagaggggggtagaatttcaggtgtagcggtgaaatgcgtagagatctgaaggaataccagtggcgaaggcggccccctggacagatactgacactcagatgcgaaagcgtggggagcaaacaggattagataccctggtagtccacgccgtaaacgatgtctacttggaggttgtggccttgagccgtggctttcggagctaacgcgttaagtagaccgcctggggagtacggtcgcaagattaaaactcaaatgaattgacgggggcccgcacaagcggtggagcatgtggtttaattcgatgcaacgcgaagaaccttacctactcttgacatccagagaagccagcggagacgcaggtgtgccttcgggaactctgagacaggtgctgcatggctgtcgtcagctcgtgttgtgaaatgttgggttaagtcccgcaacgagcgcaacccttatccttgtttgccagcgagtaatgtcgggaactccagggagactgccggtgataaaccggaggaaggtggggacgacgtcaagtcatcatggcccttacgagtagggctacacacgtgctacaatggcgcatacagagggcggcgaacttgcgagagtgagcgaatcccaaaaagtgcgtcgtagtccggattggagtctgcaactcgactccatgaagtcggaatcgctagtaatcgtagatcagaatgctacggtgaatacgttcccgggccttgtacacaccgcccgtcacaccatgggagtgggctgcaaaagaagtgggtagtttaacctttcggggaggacgctcaccactttgtggttcatgactggggtgaagtcgtaacaaggtagccctaggggaacctggggctggatcacctcctt

SEQ ID NO: 1523 - DNA, 1547 bp, artificial sequence
  GCF_000025045.1_02599_Lactococcus_lactis
ttgaagagtttgatcatggctcagattgaacgctggcggcaggcctaacacatgcaagtcgagcggaaacgagttatctgaaccttcgggaacgataacggcgtcgagcggcggacgggtgagtaatgcctaggaaattgccttgatgtgggggataaccattggaaacgatggctaataccgcataatgcctacgggccaaagaggggaccttcgggcctctcgcgtcaagatatgcctaggtgggattagctagttggtgaggtaatggctcaccaaggcgacgatccctagctggtctgagaggatgatcagccacactggaactgagacacggtccagactcctacgggaggcagcagtggggaatattgcacaatgggcgaaagcctgatgcagccatgccgcgtgtatgaagaaggccttcgggttgtaaagtactttcagttgtgaggaagggggtgtcgttaatagcggcatctcttgacgttagcaacagaagaagcaccggctaactccgtgccagcagccgcggtaatacggagggtgcgagcgttaatcggaattactgggcgtaaagcgcatgcaggtggttcattaagtcagatgtgaaagcccggggctcaacctcggaactgcatttgaaactggtgaactagagtactgtagagggggtagaatttcaggtgtagcggtgaaatgcgtagagatctgaaggaataccagtggcgaaggcggccccctggacagatactgacactcagatgcgaaagcgtggggagcaaacaggattagataccctggtagtccacgccgtaaacgatgtctacttggaggttgtggccttgagccgtggctttcggagctaacgcgttaagtagaccgcctggggagtacggtcgcaagattaaaactcaaatgaattgacgggggcccgcacaagcggtggagcatgtggtttaattcgatgcaacgcgaagaaccttacctactcttgacatccagagaagccagcggagacgcaggtgtgccttcgggagctctgagacaggtgctgcatggctgtcgtcagctcgtgttgtgaaatgttgggttaagtcccgcaacgagcgcaacccttatccttgtttgccagcgagtaatgtcgggaactccagggagactgccggtgataaaccggaggaaggtggggacgacgtcaagtcatcatggcccttacgagtagggctacacacgtgctacaatggcgcatacagagggcagcaagccagcgatggtaagcgaatcccaaaaagtgcgtcgtagtccggattggagtctgcaactcgactccatgaagtcggaatcgctagtaatcgtagatcagaatgctacggtgaatacgttcccgggccttgtacacaccgcccgtcacaccatgggagtgggctgcaaaagaagtgggtagtttaacctttcgggaggacgctcaccactttgtggttcatgactggggtgaagtcgtaacaaggtagccctaggggaacctggggctggatcacctcctt

SEQ ID NO: 1524 - DNA, 1525 bp, artificial sequence
  GCF_000312685.1_00575_Lactococcus_lactis
atgaagagtttgatcctggctcaggatgaacgctagctacaggcttaacacatgcaagtcgaggggcatcaggaagaaagcttgctttctttgctggcgaccggcgcacgggtgagtaacacgtatccaacctgccctttactcggggatagcctttcgaaagaaagattaatacccgatgggataatcattccgcatggtctgattattaaaggattccggtaaaggatggggatgcgttccattaggttgttggtgaggtaacggctcaccaagccttcgatggataggggttctgagaggaaggtcccccacattggaactgagacacggtccaaactcctacgggaggcagcagtgaggaatattggtcaatgggcgcgagcctgaaccagccaagtagcgtgaaggatgactgccctatgggttgtaaacttcttttatattagaataaagtgcagtatgtatactgttttgtatgtataatatgaataaggatcggctaactccgtgccagcagccgcggtaatacggaggatccgagcgttatccggatttattgggtttaaagggagcgtaggtggactggtaagtcagttgtgaaagtttgcggctcaaccgtaaaattgcagttgatactgtcagtcttgagtacagtagaggtgggcggaattcgtggtgtagcggtgaaatgcttagatatcacgaagaactccgattgcgaaggcagctcactggactgcaactgacactgatgctcgaaagtgtgggtatcaaacaggattagataccctggtagtccacacagtaaacgatgaatactcgctgtttgcgatatacagtaagcggccaagcgaaagcattaagtattccacctggggagtacgccggcaacggtgaaactcaaaggaattgacgggggcccgcacaagcggaggaacatgtggtttaattcgatgatacgcgaggaaccttacccgggcttaaattgcagtggaatgatgtggaaacatgtcagtgagcaatcaccactgtgaaggtgctgcatggttgtcgtcagctcgtgccgtgaggtgtcggcttaagtgccataacgagcgcaacccttatcttcagttactaacaggttatgctgaggactctggagagactgccgtcgtaagatgtgaggaaggtggggatgacgtcaaatcagcacggcccttacgtccggggctacacacgtgttacaatggggggtacagaaggcagctacctggtgacaggatgctaatcccaaaagcctctctcagttcggatcgaagtctgcaacccgacttcgtgaagctggattcgctagtaatcgcgcatcagccacggcgcggtgaatacgttcccgggccttgtacacaccgcccgtcaagccatgggagccgggggtacctgaagtacgtaaccgcaaggagcgtcctagggtaaaactggtgactggggctaagtcgtaacaaggtagccgtaccggaaggtgcggctggaacacctcctt

SEQ ID NO: 1525 - DNA, 1016 bp, artificial sequence
  GCF_000312685.1_01979_Lactococcus_lactis
atgaagagtttgatcctggctcaggatgaacgctagctacaggcttaacacatgcaagtcgaggggcatcaggaagaaagcttgctttctttgctggcgaccggcgcacgggtgagtaacacgtatccaacctgccctttactcggggatagcctttcgaaagaaagattaatacccgataggataatcattccgcatggtttcattattaaaggattccggtaaaggatggggatgcgttccattaggttgttggtgaggtaacggcccaccaagccttcgatggataggggttctgagaggaaggtcccccacattggaactgagacacggtccaaactcctacgggaggcagcagtgaggaatattggtcaatgggcgcgagcctgaaccagccaagtagcgtgaaggatgactgccctatgggttgtaaacttcttttatattagaataaagtgcagtatgtatactgttttgtatgtataatatgaataaggatcggctaactccgtgccagcagccgcggtaatacggaggatccgagcgttatccggatttattgggtttaaagggagcgtaggtggactggtaagtcagttgtgaaagtttgcggctcaaccgtaaaattgcagttgatactgtcagtcttgagtacagtagaggtgggcggaattcgtggtgtagcggtgaaatgcttagatatcacgaagaactccgattgcgaaggcagctcactggactgcaactgacactgatgctcgaaagtgtgggtatcaaacaggattagataccctggtagtccacacagtaaacgatgaatactcgctgtttgcgatatacagtaagcggccaagcgaaagcattaagtattccacctggggagtacgccggcaacggtgaaactcaaaggaattgacgggggcccgcacaagcggaggaacatgtggtttaattcgatgatacgcgaggaaccttacccgggcttaaattgcagtggaatgatgtggaaacatgtc

SEQ ID NO: 1526 - DNA, 1016 bp, artificial sequence
  GCF_000312685.1_02234_Lactococcus_lactis
atgaagagtttgatcctggctcaggatgaacgctagctacaggcttaacacatgcaagtcgaggggcatcaggaagaaagcttgctttctttgctggcgaccggcgcacgggtgagtaacacgtatccaacctgccctttactcggggatagcctttcgaaagaaagattaatacccgatagtataatcattccgcatggtctgattattaaaggattccggtaaaggatggggatgcgttccattaggttgttggtgaggtaacggctcaccaagccttcgatggataggggttctgagaggaaggtcccccacattggaactgagacacggtccaaactcctacgggaggcagcagtgaggaatattggtcaatgggcgcgagcctgaaccagccaagtagcgtgaaggatgactgccctatgggttgtaaacttcttttatattagaataaagtgcagtatgtatactgttttgtatgtataatatgaataaggatcggctaactccgtgccagcagccgcggtaatacggaggatccgagcgttatccggatttattgggtttaaagggagcgtaggtggactggtaagtcagttgtgaaagtttgcggctcaaccgtaaaattgcagttgatactgtcagtcttgagtacagtagaggtgggcggaattcgtggtgtagcggtgaaatgcttagatatcacgaagaactccgattgcgaaggcagctcactggactgcaactgacactgatgctcgaaagtgtgggtatcaaacaggattagataccctggtagtccacacagtaaacgatgaatactcgctgtttgcgatatacagtaagcggccaagcgaaagcattaagtattccacctggggagtacgccggcaacggtgaaactcaaaggaattgacgggggcccgcacaagcggaggaacatgtggtttaattcgatgatacgcgaggaaccttacccgggcttaaattgcagtggaatgatgtggaaacatgtc

SEQ ID NO: 1527 - DNA, 1525 bp, artificial sequence
  GCF_000312685.1_02279_Lactococcus_lactis
atgaagagtttgatcctggctcaggatgaacgctagctacaggcttaacacatgcaagtcgaggggcagcatttcagtttgcttgcaaactggagatggcgaccggcgcacgggtgagtaacacgtatccaacctgccgataactcggggatagcctttcgaaagaaagattaatacccgatagtataatagaaccgcatggttttattattaaagaatttcggttatcgatggggatgcgttccattaggcagttggtgaggtaacggctcaccaaaccttcgatggataggggttctgagaggaaggtcccccacattggaactgagacacggtccaaactcctacgggaggcagcagtgaggaatattggtcaatggacgagagtctgaaccagccaagtagcgtgaaggatgactgccctatgggttgtaaacttcttttatatgggaataaagttttccacgtgtggaattttgtatgtaccatatgaataaggatcggctaactccgtgccagcagccgcggtaatacggaggatccgagcgttatccggatttattgggtttaaagggagcgtaggtggacagttaagtcagttgtgaaagtttgcggctcaaccgtaaaattgcagttgatactggctgtcttgagtacagtagaggtgggcggaattcgtggtgtagcggtgaaatgcttagatatcacgaagaactccgattgcgaaggcagctcactggactgcaactgacactgatgctcgaaagtgtgggtatcaaacaggattagataccctggtagtccacacagtaaacgatgaatactcgctgtttgcgatatacagtaagcggccaagcgaaagcattaagtattccacctggggagtacgccggcaacggtgaaactcaaaggaattgacgggggcccgcacaagcggaggaacatgtggtttaattcgatgatacgcgaggaaccttacccgggcttaaattgcaaatgaataatctggaaacaggttagccgcaaggcatttgtgaaggtgctgcatggttgtcgtcagctcgtgccgtgaggtgtcggcttaagtgccataacgagcgcaacccttatctttagttactaacaggttatgctgaggactctagagagactgccgtcgtaagatgtgaggaaggtggggatgacgtcaaatcagcacggcccttacgtccggggctacacacgtgttacaatggggggtacagaaggcagctacctggtgacaggatgctaatcccaaaagcctctctcagttcggatcgaagtctgcaacccgacttcgtgaagctggattcgctagtaatcgcgcatcagccatggcgcggtgaatacgttcccgggccttgtacacaccgcccgtcaagccatgaaagccgggggtacctgaagtacgtaaccgcaaggagcgtcctagggtaaaactggtaattggggctaagtcgtaacaaggtagccgtaccggaaggtgcggctggaacacctcctt

SEQ ID NO: 1528 - DNA, 1419 bp, artificial sequence
  GCF_000312685.1_02358_Lactococcus_lactis
cgcacgggtgagtaacacgtatccaacctgccgataactcggggatagcctttcgaaagaaagattaatacccgatggcataattagaccgcatggtttgattattaaagaatttcggttatcgatggggatgcgttccattaggcagttggtgaggtaacggctcaccaaaccttcgatggataggggttctgagaggaaggtcccccacattggaactgagacacggtccaaactcctacgggaggcagcagtgaggaatattggtcaatggacgagagtctgaaccagccaagtagcgtgaaggatgactgccctatgggttgtaaacttcttttatatgggaataaagttttccacgtgtggaattttgtatgtaccatatgaataaggatcggctaactccgtgccagcagccgcggtaatacggaggatccgagcgttatccggatttattgggtttaaagggagcgtaggtggacagttaagtcagttgtgaaagtttgcggctcaaccgtaaaattgcagttgatactggctgtcttgagtacagtagaggtgggcggaattcgtggtgtagcggtgaaatgcttagatatcacgaagaactccgattgcgaaggcagctcactggactgcaactgacactgatgctcgaaagtgtgggtatcaaacaggattagataccctggtagtccacacagtaaacgatgaatactcgctgtttgcgatatacagtaagcggccaagcgaaagcattaagtattccacctggggagtacgccggcaacggtgaaactcaaaggaattgacgggggcccgcacaagcggaggaacatgtggtttaattcgatgatacgcgaggaaccttacccgggcttaaattgcaaatgaataatctggaaacaggttagccgcaaggcatttgtgaaggtgctgcatggttgtcgtcagctcgtgccgtgaggtgtcggcttaagtgccataacgagcgcaacccttatctttagttactaacaggttatgctgaggactctagagagactgccgtcgtaagatgtgaggaaggtggggatgacgtcaaatcagcacggcccttacgtccggggctacacacgtgttacaatggggggtacagaaggcagctacctggtgacaggatgctaatcccaaaagcctctctcagttcggatcgaagtctgcaacccgacttcgtgaagctggattcgctagtaatcgcgcatcagccatggcgcggtgaatacgttcccgggccttgtacacaccgcccgtcaagccatgaaagccgggggtacctgaagtacgtaaccgcaaggagcgtcctagggtaaaactggtaattggggctaagtcgtaacaaggtagccgtaccggaaggtgcggctggaacacctcctt

SEQ ID NO: 1529 - DNA, 1525 bp, artificial sequence
  GCF_000312685.1_02384_Lactococcus_lactis
atgaagagtttgatcctggctcaggatgaacgctagctacaggcttaacacatgcaagtcgaggggcatcaggaagaaagcttgctttctttgctggcgaccggcgcacgggtgagtaacacgtatccaacctgccctttactcggggatagcctttcgaaagaaagattaatacccgatagcataatgattccgcatggtttcattattaaaggattccggtaaaggatggggatgcgttccattaggttgttggtgaggtaacggctcaccaagccttcgatggataggggttctgagaggaaggtcccccacattggaactgagacacggtccaaactcctacgggaggcagcagtgaggaatattggtcaatgggcggtagcctgaaccagccaagtagcgtgaaggatgaaggctctatgggtcgtaaacttcttttatataagaataaagtgcagtatgtatactgttttgtatgtattatatgaataaggatcggctaactccgtgccagcagccgcggtaatacggaggatccgagcgttatccggatttattgggtttaaagggagcgtaggtggactggtaagtcagttgtgaaagtttgcggctcaaccgtaaaattgcagttgatactgtcagtcttgagtacagtagaggtgggcggaattcgtggtgtagcggtgaaatgcttagatatcacgaagaactccgattgcgaaggcagctcactggactgcaactgacactgatgctcgaaagtgtgggtatcaaacaggattagataccctggtagtccacacagtaaacgatgaatactcgctgtttgcgatatacagtaagcggccaagcgaaagcattaagtattccacctggggagtacgccggcaacggtgaaactcaaaggaattgacgggggcccgcacaagcggaggaacatgtggtttaattcgatgatacgcgaggaaccttacccgggcttaaattgcagtggaatgatgtggaaacatgtcagtgagcaatcaccgctgtgaaggtgctgcatggttgtcgtcagctcgtgccgtgaggtgtcggcttaagtgccataacgagcgcaacccttatcttcagttactaacaggtcatgctgaggactctggagagactgccgtcgtaagatgtgaggaaggtggggatgacgtcaaatcagcacggcccttacgtccggggctacacacgtgttacaatggggggtacagaaggcagctagcgggtgaccgtatgctaatcccaaaagcctctctcagttcggatcgaagtctgcaacccgacttcgtgaagctggattcgctagtaatcgcgcatcagccacggcgcggtgaatacgttcccgggccttgtacacaccgcccgtcaagccatgggagccgggggtacctgaagtacgtaaccgcaaggatcgtcctagggtaaaactggtgactggggctaagtcgtaacaaggtagccgtaccggaaggtgcggctggaacacctcctt

SEQ ID NO: 1530 - DNA, 1539 bp, artificial sequence
  GCF_000344575.1_00465_Lactococcus_lactis
ttgaagagtttgatcatggctcagattgaacgctggcggcaggcctaacacatgcaagtcgagcggcagcgggaagtagtttactactttgccggcgagcggcggacgggtgagtaatgtctgggaaactgcctgatggagggggataactactggaaacggtagctaataccgcatgacctcgcaagagcaaagtgggggaccttcgggcctcacgccatcggatgtgcccagatgggattagctagtaggtggggtaatggctcacctaggcgacgatccctagctggtctgagaggatgaccagccacactggaactgagacacggtccagactcctacgggaggcagcagtggggaatattgcacaatgggcgcaagcctgatgcagccatgccgcgtgtgtgaagaaggccttcgggttgtaaagcactttcagcgaggaggaaggcagtcgtgttaatagcacggttgattgacgttactcgcagaagaagcaccggctaactccgtgccagcagccgcggtaatacggagggtgcaagcgttaatcggaattactgggcgtaaagcgcacgcaggcggtttgttaagtcagatgtgaaatccccgcgcttaacgtgggaactgcatttgaaactggcaagctagagtcttgtagaggggggtagaattccaggtgtagcggtgaaatgcgtagagatctggaggaataccggtggcgaaggcggccccctggacaaagactgacgctcaggtgcgaaagcgtggggagcaaacaggattagataccctggtagtccacgctgtaaacgatgtcgacttggaggttgtgcccttgaggcgtggcttccggagctaacgcgttaagtcgaccgcctggggagtacggccgcaaggttaaaactcaaatgaattgacgggggcccgcacaagcggtggagcatgtggtttaattcgatgcaacgcgaagaaccttacctactcttgacatccacagaacttagcagagatgcttcggtgccttcgggaactgtgagacaggtgctgcatggctgtcgtcagctcgtgttgtgaaatgttgggttaagtcccgcaacgagcgcaacccttatcctttgttgccagcacgtaatggtgggaactcaagggagactgccggtgacaaaccggaggaaggtggggatgacgtcaagtcatcatggcccttacgagtagggctacacacgtgctacaatggcagatacaaagtgaagcgaactcgcgagagcaagcggaccacataaagtctgtcgtagtccggattggagtctgcaactcgactccatgaagtcggaatcgctagtaatcgtagatcagaatgctacggtgaatacgttcccgggccttgtacacaccgcccgtcacaccatgggagtgggttgcaaaagaagtaggtagcttaaccttcgggagggcgcttaccactttgtgattcatgactggggtgaagtcgtaacaaggtaaccgtaggggaacctgcggttggatcacctcctt

SEQ ID NO: 1531 - DNA, 1539 bp, artificial sequence
  GCF_000344575.1_02017_Lactococcus_lactis
ttgaagagtttgatcatggctcagattgaacgctggcggcaggcctaacacatgcaagtcgagcggcagcgggaagtagtttactactttgccggcgagcggcggacgggtgagtaatgtctggggatctgcctgatggagggggataactactggaaacggtagctaataccgcatgacctcgcaagagcaaagtgggggaccttagggcctcacgccatcggatgaacccagatgggattagctagtaggtggggtaatggctcacctaggcgacgatccctagctggtctgagaggatgaccagccacactggaactgagacacggtccagactcctacgggaggcagcagtggggaatattgcacaatgggcgcaagcctgatgcagccatgccgcgtgtgtgaagaaggccttcgggttgtaaagcactttcagcgaggaggaaggggttgagtttaatacgctcaatcattgacgttactcgcagaagaagcaccggctaactccgtgccagcagccgcggtaatacggagggtgcaagcgttaatcggaattactgggcgtaaagcgcacgcaggcggtttgttaagtcagatgtgaaatccccgcgcttaacgtgggaactgcatttgaaactggcaagctagagtcttgtagaggggggtagaattccaggtgtagcggtgaaatgcgtagagatctggaggaataccggtggcgaaggcggccccctggacaaagactgacgctcaggtgcgaaagcgtggggagcaaacaggattagataccctggtagtccacgctgtaaacgatgtcgacttggaggttgtgcccttgaggcgtggcttccggagctaacgcgttaagtcgaccgcctggggagtacggccgcaaggttaaaactcaaatgaattgacgggggcccgcacaagcggtggagcatgtggtttaattcgatgcaacgcgaagaaccttacctactcttgacatccacagaatttggcagagatgctaaagtgccttcgggaactgtgagacaggtgctgcatggctgtcgtcagctcgtgttgtgaaatgttgggttaagtcccgcaacgagcgcaacccttatcctttgttgccagcacgtaatggtgggaactcaagggagactgccggtgacaaaccggaggaaggtggggatgacgtcaagtcatcatggcccttacgagtagggctacacacgtgctacaatggcagatacaaagtgaagcgaactcgcgagagccagcggaccacataaagtctgtcgtagtccggattggagtctgcaactcgactccatgaagtcggaatcgctagtaatcgtagatcagaatgctacggtgaatacgttcccgggccttgtacacaccgcccgtcacaccatgggagtgggttgcaaaagaagtaggtagcttaaccttcgggagggcgcttaccactttgtgattcatgactggggtgaagtcgtaacaaggtaaccgtaggggaacctgcggttggatcacctcctt

SEQ ID NO: 1532 - DNA, 1539 bp, artificial sequence; identical to SEQ ID NO: 1531
  GCF_000344575.1_02235_Lactococcus_lactis

SEQ ID NO: 1533 - DNA, 1539 bp, artificial sequence
  GCF_000344575.1_02270_Lactococcus_lactis
ttgaagagtttgatcatggctcagattgaacgctggcggcaggcctaacacatgcaagtcgagcggcagcgggaagtagtttactactttgccggcgagcggcggacgggtgagtaatgtctggggatctgcctgatggagggggataactactggaaacggtggctaataccgcatgacctcgcaagagcaaagtgggggaccttagggcctcacgccatcggatgaacccagatgggattagctagtaggtggggtaatggctcacctaggcgacgatccctagctggtctgagaggatgaccagccacactggaactgagacacggtccagactcctacgggaggcagcagtggggaatattgcacaatgggcgcaagcctgatgcagccatgccgcgtgtgtgaagaaggccttcgggttgtaaagcactttcagcgaggaggaaggggttgagtttaatacgctcaatcattgacgttactcgcagaagaagcaccggctaactccgtgccagcagccgcggtaatacggagggtgcaagcgttaatcggaattactgggcgtaaagcgcacgcaggcggtttgttaagtcagatgtgaaatccccgcgcttaacgtgggaactgcatttgaaactggcaagctagagtcttgtagaggggggtagaattccaggtgtagcggtgaaatgcgtagagatctggaggaataccggtggcgaaggcggccccctggacaaagactgacgctcaggtgcgaaagcgtggggagcaaacaggattagataccctggtagtccacgctgtaaacgatgtcgacttggaggttgtgcccttgaggcgtggcttccggagctaacgcgttaagtcgaccgcctggggagtacggccgcaaggttaaaactcaaatgaattgacgggggcccgcacaagcggtggagcatgtggtttaattcgatgcaacgcgaagaaccttacctactcttgacatccacagaatttggcagagatgctaaagtgccttcgggaactgtgagacaggtgctgcatggctgtcgtcagctcgtgttgtgaaatgttgggttaagtcccgcaacgagcgcaacccttatcctttgttgccagcacgtaatggtgggaactcaagggagactgccggtgacaaaccggaggaaggtggggatgacgtcaagtcatcatggcccttacgagtagggctacacacgtgctacaatggcagatacaaagtgaagcgaactcgcgagagccagcggaccacataaagtctgtcgtagtccggattggagtctgcaactcgactccatgaagtcggaatcgctagtaatcgtagatcagaatgctacggtgaatacgttcccgggccttgtacacaccgcccgtcacaccatgggagtgggttgcaaaagaagtaggtagcttaaccttcgggagggcgcttaccactttgtgattcatgactggggtgaagtcgtaacaaggtaaccgtaggggaacctgcggttggatcacctcctt

SEQ ID NO: 1534 - DNA, 1539 bp, artificial sequence
  GCF_000344575.1_02349_Lactococcus_lactis
ttgaagagtttgatcatggctcagattgaacgctggcggcaggcctaacacatgcaagtcgagcggcagcgggaagtagtttactactttgccggcgagcggcggacgggtgagtaatgtctggggatctgcctgatggagggggataactactggaaacggtagctaataccgcatgacctcgcaagagcaaagtgggggaccttagggcctcacgccatcggatgaacccagatgggattagctagtaggtggggtaatggctcacctaggcgacgatccctagctggtctgagaggatgaccagccacactggaactgagacacggtccagactcctacgggaggcagcagtggggaatattgcacaatgggcgcaagcctgatgcagccatgccgcgtgtgtgaagaaggccttcgggttgtaaagcactttcagcgaggaggaaggggttgagtttaatacgctcaatcattgacgttactcgcagaagaagcaccggctaactccgtgccagcagccgcggtaatacggagggtgcaagcgttaatcggaattactgggcgtaaagcgcacgcaggcggtttgttaagtcagatgtgaaatccccgcgcttaacgtgggaactgcatttgaaactggcaagctagagtcttgtagaggggggtagaattccaggtgtagcggtgaaatgcgtagagatctggaggaataccggtggcgaaggcggccccctggacaaagactgacgctcaggtgcgaaagcgtggggagcaaacaggattagataccctggtagtccacgctgtaaacgatgtcgacttggaggttgtgcccttgaggcgtggcttccggagctaacgcgttaagtcgaccgcctggggagtacggccgcaaggttaaaactcaaatgaattgacgggggcccgcacaagcggtggagcatgtggtttaattcgatgcaacgcgaagaaccttacatactcttgacatccacagaatttggcagagatgctaaagtgccttcgggaactgtgagacaggtgctgcatggctgtcgtcagctcgtgttgtgaaatgttgggttaagtcccgcaacgagcgcaacccttatcctttgttgccagcacgtaatggtgggaactcaagggagactgccggtgacaaaccggaggaaggtggggatgacgtcaagtcatcatggcccttacgagtagggctacacacgtgctacaatggcagatacaaagtgaagcgaactcgcgagagccagcggaccacataaagtctgtcgtagtccggattggagtctgcaactcgactccatgaagtcggaatcgctagtaatcgtagatcagaatgctacggtgaatacgttcccgggccttgtacacaccgcccgtcacaccatgggagtgggttgcaaaagaagtaggtagcttaaccttcgggagggcgcttaccactttgtgattcatgactggggtgaagtcgtaacaaggtaaccgtaggggaacctgcggttggatcacctcctt

SEQ ID NO: 1535 - DNA, 1539 bp, artificial sequence; identical to SEQ ID NO: 1531
  GCF_000344575.1_02369_Lactococcus_lactis

SEQ ID NO: 1536 - DNA, 1540 bp, artificial sequence
  GCF_000348965.1_02309_Lactococcus_lactis
ttgaagagtttgatcatggctcagattgaacgctggcggcaggcttaacacatgcaagtcgagcggtagcagggagaaagcttgctttctccgctgacgagcggcggacgggtgagtaatgtctggggatctgcctgatggagggggataactactggaaacggtagctaataccgcataacgtcgcaagaccaaagtgggggaccttcgggcctcatgccatcagatgaacccagatgggattagctagtaggtgaggtaatggctcacctaggcgacgatccctagctggtctgagaggatgaccagccacactggaactgagacacggtccagactcctacgggaggcagcagtggggaatattgcacaatgggcgcaagcctgatgcagccatgccgcgtgtatgaagaaggccttcgggttgtaaagtactttcagtagggaggaaggtgtacgtgttaatagcacgtgcaattgacgttacctacagaagaagcaccggctaactccgtgccagcagccgcggtaatacggagggtgcaagcgttaatcggaattactgggcgtaaagcgcacgcaggcggtttgttaagttggatgtgaaatccccgggcttaacctgggaactgcatccaagactggcaagctagagtctcgtagagggaggtagaattccaggtgtagcggtgaaatgcgtagagatctggaggaataccggtggcgaaggcggcctcctggacgaagactgacgctcaggtgcgaaagcgtggggagcaaacaggattagataccctggtagtccacgctgtaaacgatgtcgatttggaggttgtgcccttgaggcgtggcttccgaagctaacgcgttaaatcgaccgcctggggagtacggccgcaaggttaaaactcaaatgaattgacgggggcccgcacaagcggtggagcatgtggtttaattcgatgcaacgcgaagaaccttacctactcttgacatccagcgaatcctgtagagatacgggagtgccttcgggaacgctgagacaggtgctgcatggctgtcgtcagctcgtgttgtgaaatgttgggttaagtcccgcaacgagcgcaacccttatcctttgttgccagcggttaggccgggaactcaaaggagactgccagtgataaactggaggaaggtggggatgacgtcaagtcatcatggcccttacgagtagggctacacacgtgctacaatggcgtatacaaagagaagcgacctcgcgagagcaagcggacctcataaagtacgtcgtagtccggattggagtctgcaactcgactccatgaagtcggaatcgctagtaatcgtggatcagaatgccacggtgaatacgttcccgggccttgtacacaccgcccgtcacaccatgggagtgggttgcaaaagaagtaggtagcttaaccttcgggagggcgcttaccactttgtgattcatgactggggtgaagtcgtaacaaggtaaccgtaggggaacctgcggttggatcacctcctt

SEQ ID NO: 1537 - DNA, 1538 bp, artificial sequence
  GCF_000348965.1_02329_Lactococcus_lactis
ttgaagagtttgatcatggctcagattgaacgctggcggcaggcttaacacatgcaagtcgagcggtagcgggaggaagcttgcttcctcgccgacgagcggcggacgggtgagtaatgtctggggatctgcctgatggagggggataactactggaaacggtagctaataccgcataacgtcgcaagaccaaagtgggggaccttcgggcctcatgccatcagatgaacccagatgggattagctagtaggtgaggtaatggctcacctaggcgacgatccctagctggtctgagaggatgaccagccacactggaactgagacacggtccagactcctacgggaggcagcagtggggaatattgcacaatgggcgcaagcctgatgcagccatgccgcgtgtatgaagaaggccttcgggttgtaaagtactttcagtagggaggaaggtgtgcgtgttaatagcacgtgcaattgacgttacctacagaagaagcaccggctaactccgtgccagcagccgcggtaatacggagggtgcaagcgttaatcggaattactgggcgtaaagcgcacgcaggcggtttgttaagttggatgtgaaatccccgggcttaacctgggaactgcatccaagactggcaagctagagtctcgtagagggaggtagaattccaggtgtagcggtgaaatgcgtagagatctggaggaataccggtggcgaaggcggcctcctggacgaagactgacgctcaggtgcgaaagcgtggggagcaaacaggattagataccctggtagtccacgctgtaaacgatgtcgatttggaggttgtgcccttgaggcgtggcttccgaagctaacgcgttaaatcgaccgcctggggagtacggccgcaaggttaaaactcaaatgaattgacgggggcccgcacaagcggtggagcatgtggtttaattcgatgcaacgcgaagaaccttacctactcttgacatccagcgaatcctgtagagatacgggagtgccttcgggaacgctgagacaggtgctgcatggctgtcgtcagctcgtgttgtgaaatgttgggttaagtcccgcaacgagcgcaacccttatcctttgttgccagcggttcggccgggaactcaaaggagactgccagtgataaactggaggaaggtggggatgacgtcaagtcatcatggcccttacgagtagggctacacacgtgctacaatggcgtatacaaagagaagcgacctcgcgagagcaagcggacctcataaagtacgtcgtagtccggattggagtctgcaactcgactccatgaagtcggaatcgctagtaatcgtggatcagaatgccacggtgaatacgttcccgggccttgtacacaccgcccgtcacaccatgggagtgggttgcaaaagaagtaggtagcttaaccttcgggagggcgcttaccactttgtgattcatgactggggtgaagtcgtaacaaggtaaccgtaggggaacctgcggttggatcacctcctt

SEQ ID NO: 1538 - DNA, 1509 bp, artificial sequence
  GCF_000442845.1_00279_Lactococcus_lactis
ttcgagagtttgatcctggctcaggatgaacgctggctgtgtgcctaatacatgcatgtcgagcgaagtacttgtacttagcggcgaatgggtgagtaacacgtactcaacgtacccttcagattggcatagcggttggaaacaaccgataattccaaatactcgtttttatcgcatgataattacgtaaaagacgcctttaaagcgtcgctggaggagcggggtgcgcaacattagctagttggtgaggtaacggcccaccaaggcaatgatgtttagcggggttgagagactgaaccgccacactgggactgagatacggcccagactcctacgggaggcagcagtagggaatattccacaatggacgaaagtctgatggagcgacacagcgtgcaggatgaaggccctatgggttgtaaactgctgtggtaagggaataaaaaacagtgtaggaaatgccactgtattgaatgtaccttattagaaagcaacggctaactatgtgccagcagccgcggtaatacataggttgcaagcgttatccggaattattgggcgtaaagcgtctgtaggttgtttgttaagtctggcgttaaattttggggctcaaccccaaaccgcgttggatactggcaaactagagttatgtagaggttagcggaattccttgtgaagcggtgaaatgcgtagatataaggaagaacaccaacatggcgaaggcagctaactggacatatactgacactgagagacgaaagcgtggggagcaaacaggattagataccctggtagtccacgccctaaacgttgatcattagctgatggggaactcatcggcgcagctaacgcattaaatgatccgcctgagtagtacgttcgcaagaataaaacttaaaggaattgacggggacccgtacaagcggtggagcatgtggtttaatttgaagatacgcgtagaaccttacccactcttgacatcttctgcaaagctatagagatatagtggaggttaacagaatgacagatggtgcatggttgtcgtcagctcgtgtcgtgagatgttcggttaagtcctgcaacgagcgcaacccctgtccttagttactaacatttagttgagcactctaaggagactgcctgagtaatcgggaggaaggtggggacgacgtcaaatcatcatgcctcttacgagtggggcaacacacgtgctacaatggccagtacaaagtgaagcaacctggtgacagtgagcaaaccacaaaaaactggtctcagttcggattggagtctgcaactcgactccatgaagtcggaatcgctagtaatcgtagatcagctacgctacggtgaatacgttctcgggtcttgtacacaccgcccgtcaaaccatgggagctggtaatgcccgaagtcggtttattaacaaactgcctaaggcaggactggtgactggggttaagtcgtacaaggtatccctacgagaacgtggggaaggattacctcctt

SEQ ID NO: 1539 - DNA, 1552 bp, artificial sequence
  GCF_000468955.1_00499_Lactococcus_lactis
  misc_feature (182)..(182): n is a, c, g, or t
  misc_feature (598)..(598): n is a, c, g, or t
tatgagagtttgatcctggctcaggacgaacgctggcggcgtgcctaatacatgcaagtcgaacgcacgaagttgaagagcttgctctttaaccaagtgagtggcggacgggtgagtaacacgtgggtaacctgcccattagagggggataacattcggaaacggatgctaataccgcatantttcaggaatcgcatgattcttgaaggaaaggtggcttcggctaccactaatggatggacccgcggcgtattagctagttggtgaggtaatggctcaccaaggcaatgatacgtagccgacctgagagggtgatcggccacactgggactgagacacggcccagactcctacgggaggcagcagtagggaatcttccgcaatggacgaaagtctgacggagcaacgccgcgtgagtgaagaaggttttcggatcgtaaaactctgttgttaaagaagaacaaggatgagagtaactgctcatcccctgacggtatttaaccagaaagccacggctaactacgtgccagcagccgcggtaatacgtaggtggcaagcgttgtccggatttattgggcgtaaagcgagcgcaggcggntctttaagtctgatgtgaaagcccccggctcaaccggggagggtcattggaaactggagaacttgagtgcagaagaggagagtggaattccacgtgtagcggtgaaatgcgtagatatgtggaggaacaccagtggcgaaggcgactctctggtctgtaactgacgctgaggctcgaaagcgtggggagcaaacaggattagataccctggtagtccacgccgtaaacgatgagtgccaagtgttggagggtttccgcccttcagtgctgcagctaacgcattaagcactccgcctggggagtacggccgcaaggctgaaactcaaaggaattgacggggacccgcacaagcggtggagcatgtggtttaattcgaagcaacgcgaagaaccttaccaggtcttgacatcctttgaccactctagagatagagctttcccttcggggacaaagtgacaggtggtgcatggttgtcgtcagctcgtgtcgtgagatgttgggttaagtcccgcaacgagcgcaacccttattactagttgccagcatttagttgggcactctagtgagactgccggtgacaaaccggaggaaggtggggatgacgtcaaatcatcatgccccttatgacctgggctacacacgtgctacaatggatggtacaacgagttgcgaggtcgcgaggccaagctaatctcttaaagccattctcagttcggattgtaggctgcaactcgcctacatgaagccggaatcgctagtaatcgcggatcagaacgccgcggtgaatacgttcccgggtcttgtacacaccgcccgtcacaccacgagagtttgtaacacccgaagccggtgaggtaaccttttaggagccagccgtctaaggtgggatagataattggggtgaagtcgtaacaaggtagccgtatcggaaggtgcggctggatcacctccttt

SEQ ID NO: 1540 - DNA, 1036 bp, artificial sequence
  GCF_000468955.1_01985_Lactococcus_lactis
ggctaactacgtgccagcagccgcggtaatacgtaggtggcaagcgttgtccggaattattgggcgtaaagcgcgcgcaggcggtctcttaagtctgatgtgaaagcccccggctcaaccggggagggtcattggaaactgggagacttgaggacagaagaggagagtggaattccaagtgtagcggtgaaatgcgtagatatttggaggaacaccagtggcgaaggcggctctctggtctgttactgacgctgaggcgcgaaagcgtggggagcaaacaggattagataccctggtagtccacgccgtaaacgatgagtgctaagtgttagggggtttccgccccttagtgctgcagttaacgcattaagcactccgcctggggagtacgaccgcaaggttgaaactcaaaggaattgacgggggcccgcacaagcggtggagcatgtggtttaattcgaagcaacgcgaagaaccttaccaggtcttgacatcctttgaccattctggagacagaactttcccttcggggacaaagtgacaggtggtgcatggttgtcgtcagctcgtgtcgtgagatgttgggttaagtcccgcaacgagcgcaacccttgattttagttgccagcatttagttgggcactctaaagtgactgccggtgtaagccggaggaaggtggggatgacgtcaaatcatcatgccccttatgacctgggctacacacgtgctacaatggataatacaaagggtcgcgaagccgcgaggtggagccaatcccataaaattattctcagttcggattgcaggctgcaactcgcctgcatgaagccggaatcgctagtaatcgtagatcagcatgctacggtgaatacgttcccgggccttgtacacaccgcccgtcacaccacgagagtttgtaacacccaaagccggtttggtaaccttcgggagctagccgtctaaggtgggatagataattggggtgaagtcgtaacaaggtagccgtatcggaaggtgcggctggatcacctcctt

SEQ ID NO: 1541 - DNA, 1545 bp, artificial sequence
  GCF_000468955.1_02214_Lactococcus_lactis
aacgagagtttgatcctggctcaggacgaacgctggcggcgtgcctaatacatgcaagtcgaacgaacggataaagagcttgctcttttgaagttagtggcggacgggtgagtaacacgtgggtaacctgcctcacagctggggataacatcgagaaatcgatgctaataccgaatgtgctgaacatcataagatgttcaagtgaaagacggtttcggctgtcactgtgagatggacccgcgctggattagctagttggtaaggtaatggcttaccaaggcgacgatccatagccgacctgagagggtgatcggccacattgggactgagacacggcccaaactcctacgggaggcagcagtagggaatcttcggcaatggacgaaagtctgaccgagcaacgccgcgtgagcgaagaaggccttcgggtcgtaaagctctgttgttagagaagaacatgggtgagagtaactgttcaccccttgacggtatctaaccagaaagccacggctaactacgtgccagcagccgcggtaatacgtaggtggcaagcgttgtccggaattattgggcgtaaagcgcgcgcaggcggtctcttaagtctgatgtgaaagcccccggctcaaccggggagggtcattggaaactgggagacttgaggacagaagaggagagtggaattccaagtgtagcggtgaaatgcgtagatatttggaggaacaccagtggcgaaggcggctctctggtctgttactgacgctgaggcgcgaaagcgtggggagcaaacaggattagataccctggtagtccacgccgtaaacgatgagtgctaagtgttagggggtttccgccccttagtgctgcagttaacgcattaagcactccgcctggggagtacgaccgcaaggttgaaactcaaaggaattgacgggggcccgcacaagcggtggagcatgtggtttaattcgaagcaacgcgaagaaccttaccaggtcttgacatcctttgaccattctggagacagaactttcccttcggggacaaagtgacaggtggtgcatggttgtcgtcagctcgtgtcgtgagatgttgggttaagtcccgcaacgagcgcaacccttgattttagttgccagcatttagttgggcactctaaagtgactgccggtgtaagccggaggaaggtggggatgacgtcaaatcatcatgccccttatgacctgggctacacacgtgctacaatggataatacaaagggtcgcgaagccgcgaggtggagccaatcccataaaattattctcagttcggattgcaggctgcaactcgcctgcatgaagccggaatcgctagtaatcgtagatcagcatgctacggtgaatacgttcccgggccttgtacacaccgcccgtcacaccacgagagtttgtaacacccaaagccggtttggtaaccttcgggagctagccgtctaaggtgggatagataattggggtgaagtcgtaacaaggtagccgtatcggaaggtgcggctggatcacctccttt

SEQ ID NO: 1542 - DNA, 1545 bp, artificial sequence; identical to SEQ ID NO: 1541
  GCF_000468955.1_02256_Lactococcus_lactis

SEQ ID NO: 1543 - DNA, 1545 bp, artificial sequence; identical to SEQ ID NO: 1541
  GCF_000468955.1_02341_Lactococcus_lactis

SEQ ID NO: 1544 - DNA, 1545 bp, artificial sequence; identical to SEQ ID NO: 1541
  GCF_000468955.1_02366_Lactococcus_lactis

SEQ ID NO: 1545 - DNA, 1531 bp, artificial sequence
  GCF_000493355.1_00555_Lactococcus_lactis
tgaagagtttgatcatggctcagattgaacgctggcggcaggcctaacacatgcaagtcgagcggcagcgggaccttcgggttgccggcgagcggcggacgggtgagtaatgcctaggaatctgcctgttagtgggggataacgcggggaaactcgcgctaataccgcatacgtcctacgggagaaagtgggggaccctcgggcctcacgctaacagatgagcctaggtcggattagctagttggtggggtaaaggcccaccaaggcgacgatccgtaactggtctgagaggatgatcagtcacactggaactgagacacggtccagactcctacgggaggcagcagtggggaatattggacaatgggcgaaagcctgatccagccatgccgcgtgtgtgaagaaggtcttcggattgtaaagcactttaagttgggaggaagggcgctcggtgaatacccaagcgtcttgacgttaccgacagaataagcaccggctaacttcgtgccagcagccgcggtaatacgaagggtgcaagcgttaatcggaattactgggcgtaaagcgcgcgtaggtggttcggcaagttggatgtgaaagccccgggctcaacctgggaaccgcatccaaaactactgggctagagtacggtagagggtggtggaatttcctgtgtagcggtgaaatgcgtagatataggaaggaacaccagtggcgaaggcgaccacctggaccgatactgacactgaggtgcgaaagcgtggggagcaaacaggattagataccctggtagtccacgccgtaaacgatgtcgactagccgttgggctccttgagagcttagtggcgcagctaacgcattaagtcgaccgcctggggagtacggccgcaaggttaaaactcaaatgaattgacgggggcccgcacaagcggtggagcatgtggtttaattcgaagcaacgcgaagaaccttacctggccttgacatcctgcgaactttcaagagattgatgggtgccttcgggagcgcagagacaggtgctgcatggctgtcgtcagctcgtgtcgtgagatgttgggttaagtcccgtaacgagcgcaacccttgtccttagttaccagcgattcggtcgggcactctaaggagactgccggtgacaaaccggaggaaggtggggatgacgtcaagtcatcatggcccttacggccagggctacacacgtgctacaatggtcggtacaaagggttgccaagtcgcgaggcggagctaatcccagaaaaccgatcgtagtccggatcgcagtctgcaactcgactgcgtgaagtcggaatcgctagtaatcgcgaatcagaatgtcgcggtgaatacgttcccgggccttgtacacaccgcccgtcacaccatgggagtgggttgctccagaagtagctagtctaaccctcgggaggacggttaccacggagtgattcatgactggggtgaagtcgtaacaaggtagccgtaggggaacctgcggctggatcacctcctt

SEQ ID NO: 1546 - DNA, 1524 bp, artificial sequence
  GCF_000759595.1_01725_Lactococcus_lactis
tatggagagtttgatcctggctcaggatgaacgctggcggcgtgcttaacacatgcaagtcgaacgatgaagccctgcttgcagggtggattagtggcgaacgggtgagtaacacgtgagtaacctgcccccgactttgggataagcccgggaaactgggtctaataccggatatgactgcggaacgcatgttttgttgttgaaagatttatcggtgggggatggactcgcggcctatcagcttgttggtgaggtaatggctcaccaaggcgacgacgggtagccggcctgagagggtgaccggccacactgggactgagacacggcccagactcctacgggaggcagcagtggggaatattgcacaatgggcgcaagcctgatgcagcgacgccgcgtgagggatgacggccttcgggttgtaaacctctttcagtagggaagaagcgagagtgacggtacctgcagaagaagcgccggctaactacgtgccagcagccgcggtaatacgtagggcgcaagcgttatccggatttattgggcgtaaagagctcgtaggcggtttgtcgcgtctgccgtgaaagtccgaggctcaacctcggatctgcggtgggtacgggcagactagagtgatgtaggggagactggaattcctggtgtagcggtgaaatgcgcagatatcaggaggaacaccgatggcgaaggcaggtctctgggcatttactgacgctgaggagcgaaagcatggggagcgaacaggattagataccctggtagtccatgccgtaaacgttgggcactaggtgtgggggacattccacgttttccgcgccgtagctaacgcattaagtgccccgcctggggagtacggccgcaaggctaaaactcaaaggaattgacgggggcccgcacaagcggcggagcatgcggattaattcgatgcaacgcgaagaaccttaccaaggcttgacatgtgccagaccggatcagagatggtctttcccttcggggctggttcacaggtggtgcatggttgtcgtcagctcgtgtcgtgagatgttgggttaagtcccgcaacgagcgcaaccctcgttccatgttgccagcacgtagtggtggggactcatgggagactgccggggtcaactcggaggaaggtggggatgacgtcaaatcatcatgccccttatgtcttgggcttcacgcatgctacaatggccggtacaatgggttgcgatactgtgaggtggagctaatccctaaaagccggtctcagttcggattggggtctgcaactcgaccccatgaagtcggagtcgctagtaatcgcagatcagcaacgctgcggtgaatacgttcccgggccttgtacacaccgcccgtcaagtcacgaaagttggtaacacccgaagccgatggcctaaccaccttgtgtggggggagtcgtcgaaggtgggactggcgattgggactaagtcgtaacaaggtagccgtaccggaaggtgcggctggatcacctccttt

SEQ ID NO: 1547 - DNA, 1534 bp, artificial sequence
  GCF_001017475.1_00300_Lactococcus_lactis
tgaagagtttgatcctggctcagattgaacgctggcggaatgctttacacatgcaagtcgagcggcagcgcgggggcaaccctggcggcgagcggcgaacgggtgagtaatgcatcggaacgtacccatttgtgggggataactatccgaaaggatagctaataccgcataagtcctgagggagaaagcaggggatcgcaagaccttgcgcgaatggagcggccgatgccggattagctagttggtagggtaaaggcctaccaaggcgacgatccgtagctggtctgagaggatgatcagccacactggaactgagacacggtccagactcctacgggaggcagcagtggggaattttggacaatgggggcaaccctgatccagccattccgcgtgagtgaagaaggccttcgggttgtaaagctctttcggcaggaacgaaacggtttgggttaataccctgagctaatgacggtacctgaagaagaagcaccggctaactacgtgccagcagccgcggtaatacgtagggtgcgagcgttaatcggaattactgggcgtaaagcgtgcgcaggcggttctataagacagatgtgaaatccccgggcttaacctgggaactgcgtttgtgactgtaggactcgagtgtggcagaggggggtggaattccacgtgtagcagtgaaatgcgtagagatgtggaggaacaccgatggcgaaggcagccccctgggtcaacactgacgctcatgcacgaaagcgtgggtagcaaacaggattagataccctggtagtccacgccctaaacgatgcgaactaggtgttggggaaggagactttcttagtaccgcagctaacgcgtgaagttcgccgcctggggagtacggtcgcaagattaaaactcaaaggaattgacggggacccgcacaagcggtggatgatgtggattaattcgatgcaacgcgaaaaaccttacctacccttgacatgccaggaacttggtagagataccttggtgcccgaaagggagcctggacacaggtgctgcatggctgtcgtcagctcgtgtcgtgagatgttgggttaagtcccgcaacgagcgcaacccttgtcattagttgccatcatttagttgggcactctaatgagactgccggtgacaaaccggaggaaggtggggatgacgtcaagtcctcatggcccttatgggtagggcttcacacgtcatacaatggtcggtacagagggttgccaagccgcgaggtggagccaatcccagaaagccgatcgtagtccggatcggagtctgcaactcgactccgtgaagtcggaatcgctagtaatcgtggatcagcatgccacggtgaatacgttcccgggtcttgtacacaccgcccgtcacaccatgggagtgggtttcaccagaagtaggtagcctaaccgcaaggggggcgcttaccacggtgggattcatgactggggtgaagtcgtaacaaggtagccgtaggggaacctgcggctggatcacctccttt

SEQ ID NO: 1548 - DNA, 1534 bp, artificial sequence; identical to SEQ ID NO: 1547
  GCF_001017475.1_02686_Lactococcus_lactis

SEQ ID NO: 1549 - DNA, 1533 bp, artificial sequence
  GCF_001456455.1_00862_Lactococcus_lactis
tgaagagtttgatcatggctcagattgaacgctggcggcaggcttaacacatgcaagtcgagcgggggaaggtagcttgctacctaacctagcggcggacgggtgagtaatgcttaggaatctgcctattagtgggggacaacattccgaaaggaatgctaataccgcatacgtcctacgggagaaagcaggggatcttcggaccttgcgctaatagatgagcctaagtcggattagctagttggtggggtaaaggcctaccaaggcgacgatctgtagcgggtctgagaggatgatccgccacactgggactgagacacggcccagactcctacgggaggcagcagtggggaatattggacaatgggcggaagcctgatccagccatgccgcgtgtgtgaagaaggccttttggttgtaaagcactttaagcgaggaggaggctactctagataatacctagagatagtggacgttactcgcagaataagcaccggctaactctgtgccagcagccgcggtaatacagagggtgcgagcgttaatcggatttactgggcgtaaagcgtgcgtaggcggctgattaagtcggatgtgaaatccctgagcttaacttaggaattgcattcgatactggtcagctagagtatgggagaggatggtagaattccaggtgtagcggtgaaatgcgtagagatctggaggaataccgatggcgaaggcagccatctggcctaatactgacgctgaggtacgaaagcatggggagcaaacaggattagataccctggtagtccatgccgtaaacgatgtctactagccgttggggcctttgaggctttagtggcgcagctaacgcgataagtagaccgcctggggagtacggtcgcaagactaaaactcaaatgaattgacgggggcccgcacaagcggtggagcatgtggtttaattcgatgcaacgcgaagaaccttacctggtcttgacatagtaagaactttccagagatggattggtgccttcgggaacttacatacaggtgctgcatggctgtcgtcagctcgtgtcgtgagatgttgggttaagtcccgcaacgagcgcaacccttttccttatttgccagcgggttaagccgggaactttaaggatactgccagtgacaaactggaggaaggcggggacgacgtcaagtcatcatggcccttacgaccagggctacacacgtgctacaatggtcggtacaaagggttgctacctagcgataggatgctaatctcaaaaagccgatcgtagtccggattggagtctgcaactcgactccatgaagtcggaatcgctagtaatcgcggatcagaatgccgcggtgaatacgttcccgggccttgtacacaccgcccgtcacaccatgggagtttgttgcaccagaagtaggtagtctaaccgcaaggaggacgcttaccacggtgtggccgatgactggggtgaagtcgtaacaaggtagccgtaggggaacctgcggctggatcacctcctt

SEQ ID NO: 1550 - DNA, 1533 bp, artificial sequence
  GCF_001456615.1_01963_Lactococcus_lactis
tgaagagtttgatcatggctcagattgaacgctggcggcaggcttaacacatgcaagtcgagcggggaagtgtagcttgctacattacctagcggcggacgggtgagtaatgcttaggaatctgcctattagtgggggacaacattccgaaaggaatgctaataccgcatacgtcctacgggagaaagcaggggatcttcggaccttgcgctaatagatgagcctaagtcggattagctagttggtggggtaaaggcctaccaaggcgacgatctgtagcgggtctgagaggatgatccgccacactgggactgagacacggcccagactcctacgggaggcagcagtggggaatattggacaatgggcggaagcctgatccagccatgccgcgtgtgtgaagaaggccttttggttgtaaagcactttaagcgaggaggaggctactctagttaatacctagagatagtggacgttactcgcagaataagcaccggctaactctgtgccagcagccgcggtaatacagagggtgcgagcgttaatcggatttactgggcgtaaagcgtgcgtaggcggctgattaagtcggatgtgaaatccctgagcttaacttaggaattgcattcgatactggtcagctagagtatgggagaggatggtagaattccaggtgtagcggtgaaatgcgtagagatctggaggaataccgatggcgaaggcagccatctggcctaatactgacgctgaggtacgaaagcatggggagcaaacaggattagataccctggtagtccatgccgtaaacgatgtctactagccgttggggcctttgaggctttagtggcgcagctaacgcgataagtagaccgcctggggagtacggtcgcaagactaaaactcaaatgaattgacgggggcccgcacaagcggtggagcatgtggtttaattcgatgcaacgcgaagaaccttacctggtcttgacatagtaagaactttccagagatggattggtgccttcgggaacttacatacaggtgctgcatggctgtcgtcagctcgtgtcgtgagatgttgggttaagtcccgcaacgagcgcaacccttttccttatttgccagcgggttaagccgggaactttaaggatactgccagtgacaaactggaggaaggcggggacgacgtcaagtcatcatggcccttacgaccagggctacacacgtgctacaatggtcggtacaaagggttgctacctagcgataggatgctaatctcaaaaagccgatcgtagtccggattggagtctgcaactcgactccatgaagtcggaatcgctagtaatcgcggatcagaatgccgcggtgaatacgttcccgggccttgtacacaccgcccgtcacaccatgggagtttgttgcaccagaagtaggtagtctaaccgcaaggaggacgcttaccacggtgtggccgatgactggggtgaagtcgtaacaaggtagccgtaggggaacctgcggctggatcacctcctt

SEQ ID NO: 1551 - DNA, 1539 bp, artificial sequence
  GCF_001456655.1_01233_Lactococcus_lactis
tgaagagtttgatcctggctcagattgaacgctggcggcatgcttaacacatgcaagtcgaacggcagcacgggctagtttactagttgggtggcgagtggcggacgggtgagtaacgcgtaggaatatgccttaaagagtgggacaacctggggaaactcaggctaataccgcatgaactctgaggaggaaagctggggaccgtaaggcctggcgctttaagagtagcctgcgtccgattagctagttggtggggtaagggcctaccaaggcgacgatcggtagctggtctgagaggatgatcagccacactgggactgagacacggcccagactcctacgggaggcagcagtggggaatattggacaatggggggaaccctgatccagcaatgccgcgtgtgtgaagaaggcctgagggttgtaaagcacttttgttggggaggagtcttgttaggttaagagctagatgagaggacgttacccaaagaaaaagcaccggctaactccgtgccagcagccgcggtaatacggagggtgcgagcgttaatcggaattactgggcgtaaagggtgcgtaggttgctgattaagttatctgtgaaattcctgggctcaacctggggtggtcagataagactggttagctggagtataggagagggtagtggaatttccggtgtagcggtgaaatgcgtagagatcggaaggaacaccagtggcgaaggcggctacctggcctaatactgacactgaggcacgaaagcgtggggagcgaacaggattagataccctggtagtccacgctgtaaacgatgtcaactagctgttggtcatataaatgtgattagtggcgtagcaaacgcgctaagttgaccgcctggggagtacggtcgcaagattaaaactcaaaggaattgacgggggcccgcacaagcggtggagcatgtggtttaattcgatgcaacgcgaagaaccttacctacccttgacatacagtggagcttgcagagatgtgggtgtgccttcgggaacactgctacaggtgctgcatggctgtcgtcagctcgtgtcgtgagatgttgggttaagtcccgtaacgagcgcaacccttattcttagttgccagcgcgtgaaggcgggaactctaaggagactgccggtgacaaaccggaggaaggcggggatgacgtcaagtcatcatggcccttacgggtagggctacacacgtgctacaatggccggtacagagggcggcgaaggggtgacctggagcaaatccttgaaagctggtcgtagtccggattggagtctgcaactcgactccatgaagtcggaatcgctagtaatcgcgaatcagcatgtcgcggtgaatacgttcccgggccttgtacacaccgcccgtcacaccatgggagtgggctgcaccagaagcggatagtctaaccttcggggggacgtttgccacggtgtggttcatgactggggtgaagtcgtaacaaggtagccgtaggggaacctgcggctgggtcacctcctt

SEQ ID NO: 1552 - DNA, 1495 bp, artificial sequence
  GCF_001540895.1_01253_Lactococcus_lactis
atgagagtttgatcctggctcagaacgaacgctggcggcaggcctaacacatgcaagtcgagcgcgtattttatacgagcggcagacgggtgagtaacgcgtaggaatctacctttttctacgggataacgcatggaaacgtgtgctaataccgtatacgccctattgggggaaagattttattggagagagatgagcctgcgttggattagctagttggtagggtaaaggcctaccaaggctacgatctatagctggtctgagaggacgatcagccacactgggactgagacacggcccagactcctacgggaggcagcagtggggaatattggacaatgggggcaaccctgatccagccatgccgcgtgagtgaagaaggccttagggttgtaaagctctttcgccggagaagataatgacggtattcggagaagaagccccggctaacttcgtgccagcagccgcggtaatacgaagggggcgagcgttgttcggaataactgggcgtaaagggcgcgtaggcgggcgattaagttagaggtgaaatcccagggctcaaccttggaactgcctttaatactgattgtctagagttcaggagaggtgagtggaattccgagtgtagaggtgaaattcgtagatattcggaggaacaccggtggcgaaggcggctcactggcctgatactgacgctgaggcgcgaaagcgtggggagcaaacaggattagataccctggtagtccacgctgtaaacgatgagtgctagctgttgggtggtttaccattcagtggcgcccttaaagcattaagcactccgcctggggagtacggtcgcaagattaaaactcaaaggaattgacgggggcccgcacaagcggtggagcatgtggtttaattcgatgcaacgcgcagaaccttaccagcccttgacatatgttggacgatatcagagacgatattttcttttccgagactttcatacaggtgctgcatggctgtcgtcagctcgtgtcgtgagatgttgggttaagtcccgcaacgagcgcaacccctacctctagttgccatcaagtttagattttatctagatgttgggtactttatagggactgccggtgataagccggaggaaggtggggatgacgtcaagtcctcatggcccttatgggctgggctacacacgtgctacaatggtggttacaatgggttgcgaagtcgcgaggcggagctaatccccaaagtccatctcagttcggattgcactctgcaactcgagtgcatgaagttggaatcgctagtaatcgcggatcagcatgccgcggtgaatacgttctcgggccttgtacacaccgcccgtcacaccatgggagttggttttgcctgaagacggtgtgctaaccgcaagggggcagccggccacggtaaggtcagcgactggggtgaagtcgtaacaaggtagccgtaggggaacctgtggctggatcatctcctt

SEQ ID NO: 1553 - DNA, 1482 bp, artificial sequence
  GCF_001591725.1_02659_Lactococcus_lactis
cttgagagtttgatcctggctcagaacgaacgctggcggcaggcttaacacatgcaagtcgagcgccccgcaaggggagcggcagacgggtgagtaacgcgtgggaatctacccttttctacggaataacgcagggaaacttgtgctaataccgtatacgcccttcgggggaaagatttatcgggaaaggatgagcccgcgttggattagctagttggtggggtaaaggcctaccaaggcgacgatccatagctggtctgagaggatgatcagccacattgggactgagacacggcccaaactcctacgggaggcagcagtggggaatattggacaatgggcgcaagcctgatccagccatgccgcgtgagtgatgaaggccctagggttgtaaagctctttcaccggtgaagataatgacggtaaccggagaagaagccccggctaacttcgtgccagcagccgcggtaatacgaagggggctagcgttgttcggaattactgggcgtaaagcgcacgtaggcggacatttaagtcaggggtgaaatcccggggctcaaccccggaactgcctttgatactgggtgtctagagtatggaagaggtgagtggaattccgagtgtagaggtgaaattcgtagatattcggaggaacaccagtggcgaaggcggctcactggtccattactgacgctgaggtgcgaaagcgtggggagcaaacaggattagataccctggtagtccacgccgtaaacgatgaatgttagccgtcgggcagtttactgttcggtggcgcagctaacgcattaaacattccgcctggggagtacggtcgcaagattaaaactcaaaggaattgacgggggcccgcacaagcggtggagcatgtggtttaattcgaagcaacgcgcagaaccttaccagcccttgacatcccgatcgcggattacggagacgttttccttcagttcggctggatcggagacaggtgctgcatggctgtcgtcagctcgtgtcgtgagatgttgggttaagtcccgcaacgagcgcaaccctcgcccttagttgccagcatttagttgggcactctaaggggactgccggtgataagccgagaggaaggtggggatgacgtcaagtcctcatggcccttacgggctgggctacacacgtgctacaatggtggtgacagtgggcagcgagaccgcgaggtcgagctaatctccaaaagccatctcagttcggattgcactctgcaactcgagtgcatgaagttggaatcgctagtaatcgcagatcagcatgctgcggtgaatacgttcccgggccttgtacacaccgcccgtcacaccatgggagttggttctacccgaaggtagtgcgctaaccgcaaggaggcagctaaccacggtagggtcagcgactggggtgaagtcgtaacaaggtagccgtaggggaacctgcggctggatcacctccttt

SEQ ID NO: 1554 - DNA, 1482 bp, artificial sequence
  GCF_001622205.1_01311_Lactococcus_lactis
cttgagagtttgatcctggctcagaacgaacgctggcggcatgcctaacacatgcaagtcgaacgagaccttcgggtctagtggcgcacgggtgcgtaacgcgtgggaatctgccccttggttcggaataacagcgagaaattgctgctaataccggataatgacgtaagtccaaagatttatcgccaagggatgagcccgcgtaggattagctagttggtgtggtaaaggcgcaccaaggcgacgatccttagctggtctgagaggatgatcagccacactgggactgagacacggcccagactcctacgggaggcagcagtggggaatattggacaatgggcgaaagcctgatccagcaatgccgcgtgagtgatgaaggccttagggttgtaaagctcttttacccgggaagataatgactgtaccgggagaataagctccggctaactccgtgccagcagccgcggtaatacggagggagctagcgttgttcggaattactgggcgtaaagcgcacgtaggcggctttgtaagttagaggtgaaagcctggagctcaactccagaattgcctttaagactgcatcgcttgaatccaggagaggtgagtggaattccgagtgtagaggtgaaattcgtagatattcggaagaacaccagtggcgaaggcggctcactggactggtattgacgctgaggtgcgaaagcgtggggagcaaacaggattagataccctggtagtccacgccgtaaacgatgataactagctgtcagggttcttagaactttggtggcgcagctaacgcattaagttatccgcctggggagtacggtcgcaagattaaaactcaaaggaattgacgggggcctgcacaagcggtggagcatgtggtttaattcgaagcaacgcgcagaaccttaccagcgtttgacatgtccggacgactggcagagatgcctttcttcccttcggggactggaacacaggtgctgcatggctgtcgtcagctcgtgtcgtgagatgttgggttaagtcccgcaacgagcgcaaccctcgtctttagttaccatcattcagttgggtactctaaagaaaccgccggtgataagccggaggaaggtggggatgacgtcaagtcctcatggcccttacgcgctgggctacacacgtgctacaatggcgactacagtgggctgcaatcccgcgagggtgagctaatctccaaaagtcgtctcagttcggattgttctctgcaactcgagagcatgaaggcggaatcgctagtaatcgcggatcagcatgccgcggtgaatacgttcccaggccttgtacacaccgcccgtcacaccatgggagttggtttcacccgaaggcagtgcgctaaccgcaaggaggcagctgaccacggtgggatcagcgactggggtgaagtcgtaacaaggtagccgtaggggaacctgcggctggatcacctccttt

SEQ ID NO: 1555 - DNA, 1477 bp, artificial sequence
  GCF_001622305.1_01110_Lactococcus_lactis
atgagagtttgatcctggctcagaacgaacgctggcggcaggcttaacacatgcaagtcgagcgccccgcaaggggagcggcagacgggtgagtaacgcgtgggaacgtaccctttactacggaataacgcagggaaacttgtgctaataccgtatgtgccctttgggggaaagatttatcggtaaaggatcggcccgcgttggattagctagttggtggggtaaaggcctaccaaggcgacgatccatagctggtctgagaggatgatcagccacattgggactgagacacggcccaaactcctacgggaggcagcagtggggaatattggacaatgggcgcaagcctgatccagccatgccgcgtgagtgatgaaggccctagggttgtaaagctctttcaccggagaagataatgacggtatccggagaagaagccccggctaacttcgtgccagcagccgcggtaatacgaagggggctagcgttgttcggaattactgggcgtaaagcgcacgtaggcggatcgatcagtcaggggtgaaatcccagggctcaaccctggaactgcctttgatactgtcgatctggagtatggaagaggtgagtggaattccgagtgtagaggtgaaattcgtagatattcggaggaacaccagtggcgaaggcggctcactggtccattactgacgctgaggtgcgaaagcgtggggagcaaacaggattagataccctggtagtccacgccgtaaacgatgaatgttagccgtcgggcagtatactgttcggtggcgcagctaacgcattaaacattccgcctggggagtacggtcgcaagattaaaactcaaaggaattgacgggggcccgcacaagcggtggagcatgtggtttaattcgaagcaacgcgcagaaccttaccagcccttgacatgcccggctacttgcagagatgcaaggttcccttcggggaccgggacacaggtgctgcatggctgtcgtcagctcgtgtcgtgagatgttgggttaagtcccgcaacgagcgcaaccctcgcccttagttgccagcattcagttgggcactctaaggggactgccggtgataagccgagaggaaggtggggatgacgtcaagtcctcatggcccttacgggctgggctacacacgtgctacaatggtggtgacagtgggcagcgagcacgcgagtgtgagctaatctccaaaagccatctcagttcggattgcactctgcaactcgagtgcatgaagttggaatcgctagtaatcgcggatcagcatgccgcggtgaatacgttcccgggccttgtacacaccgcccgtcacaccatgggagttggttttacccgaaggtagtgcgctaaccgcaaggaggcagctaaccacggtagggtcagcgactggggtgaagtcgtaacaaggtagccgtaggggaacctgcggctggatcacctccttt

SEQ ID NO: 1556 - DNA, 1548 bp, artificial sequence
  GCF_001645365.1_00667_Lactococcus_lactis
ttgaagagtttgatcatggctcagattgaacgctggcggcaggcctaacacatgcaagtcgagcggcagcgacttaactgaaccttcggggaacgttaagggcggcgagcggcggacgggtgagtaatgcctgggaatatgccctgatgtgggggataactattggaaacgatagctaataccgcataatctcttcggagcaaagagggggaccttcgggcctctcgcgtcaggattagcccaggtgggattagcttgttggtgaggtaatggctcaccaaggcaacgatccctagctggtctgagaggatgatcagccacactggaactgagacacggtccagactcctacgggaggcagcagtggggaatattgcacaatgggggaaaccctgatgcagccatgccgcgtgtgtgaagaaggccttcgggttgtaaagcactttcagtagggaggaaggtagtgtagttaacacctgcattatttgacgttacctacagaagaagcaccggctaactccgtgccagcagccgcggtaatacggagggtgcgagcgttaatcggaattactgggcgtaaagcgcatgcaggcggcctgttaagtcagatgtgaaagcccggggcttaacctcggaattgcatttgaaactggcaggctagagtcttgtagaggggggtagaatttcaggtgtagcggtgaaatgcgtagagatctgaaggaataccagtggcgaaggcggccccctggacaaagactgacgctcagatgcgaaagcgtggggagcaaacaggattagataccctggtagtccacgccgtaaacgatgtctacttggaggttgtggccttgagccgtggctttcggagctaacgcgttaagtagaccgcctggggagtacggtcgcaagattaaaactcaaatgaattgacgggggcccgcacaagcggtggagcatgtggtttaattcgatgcaacgcgaagaaccttacctactcttgacatccagagaagcttgaagagattcgagtgtgccttcgggaactctgagacaggtgctgcatggctgtcgtcagctcgtgttgtgaaatgttgggttaagtcccgcaacgagcgcaacccttatccttgtttgccagcacttcgggtgggaactccagggagactgccggtgataaaccggaggaaggtggggacgacgtcaagtcatcatggcccttacgagtagggctacacacgtgctacaatggcatatacagagggcagcaagaccgcgaggtggagcgaatcccagaaagtatgtcgtagtccggatcggagtctgcaactcgactccgtgaagtcggaatcgctagtaatcgtggatcagaatgccacggtgaatacgttcccgggccttgtacacaccgcccgtcacaccatgggagtgggctgcaccagaagtagatagcttaaccttcgggagggcgtttaccacggtgtggttcatgactggggtgaagtcgtaacaaggtagccctaggggaacctggggctggatcacctcctt

SEQ ID NO: 1557 - DNA, 1548 bp, artificial sequence; identical to SEQ ID NO: 1556
  GCF_001645365.1_01334_Lactococcus_lactis

SEQ ID NO: 1558 - DNA, 1541 bp, artificial sequence
  GCF_002078975.2_00612_Lactococcus_lactis
ttgaagagtttgatcatggctcagattgaacgctggcggcaggcctaacacatgcaagtcgagcggcagcgggaagatagcttgctatcttcgccggcgagcggcggacgggtgagtaatacctggggatctgcccaatcgagggggataacagttggaaacgactgctaataccgcatacgccctacgggggaaaggaggggaccttcgggccttccgcgattggatgaacccaggcgggattagctagtaggtgaggtaatggctcacctaggcgacgatccctagctgttctgagaggatggacagccacactggaactgagacacggtccagactcctacgggaggcagcagtggggaatattggacaatgggggaaaccctgatccagccatgccgcgtgtgtgaagaaggccttcgggttgtaaagcactttcagtggggaggaaaggttgatggttaatacctatcagctgtgacgttacccacagaagaagcaccggctaactccgtgccagcagccgcggtaatacggagggtgcaagcgttaatcggaattactgggcgtaaagcgtgcgcaggcggtctgttaagcgagatgtgaaagccccgggctcaacctgggaactgcatttcgaactggcagactagagtcttgtagaggggggtagaattccaggtgtagcggtgaaatgcgtagagatctggaggaataccggtggcgaaggcggccccctggacaaagactgacgctcaggcacgaaagcgtggggagcaaacaggattagataccctggtagtccacgccgtaaacgatgtctactcggagtttggtgtcttgaacactgggctctcaagctaacgcattaagtagaccgcctggggagtacggccgcaaggttaaaactcaaatgaattgacgggggcccgcacaagcggtggagcatgtggtttaattcgatgcaacgcgaagaaccttacctactcttgacatccagagaactttccagagatggattggtgccttcgggaactctgagacaggtgctgcatggctgtcgtcagctcgtgttgtgaaatgttgggttaagtcccgcaacgagcgcaacccttatccttacttgccagcgggtaatgccgggaactttagggagactgccggtgataaaccggaggaaggtggggacgacgtcaagtcatcatggcccttacgagtagggctacacacgtgctacaatggtcggtacagagggttgcgaagccgcgaggtggagctaatctcataaagccggtcgtagtccggattggagtctgcaactcgactccatgaagtcggaatcgctagtaatcgtggatcagaatgccacggtgaatacgttcccgggccttgtacacaccgcccgtcacaccatgggagtgggctgcaccagaagtagatagcttaaccttcgggagggcgtttaccacggtgtggttcatgactggggtgaagtcgtaacaaggtagccctaggggaacctggggctggatcacctcctt

SEQ ID NO: 1559 - DNA, 1541 bp, artificial sequence; identical to SEQ ID NO: 1558
  GCF_002078975.2_02227_Lactococcus_lactis

SEQ ID NO: 1560 - DNA, 1541 bp, artificial sequence; identical to SEQ ID NO: 1558
  GCF_002078975.2_02444_Lactococcus_lactis

SEQ ID NO: 1561 - DNA, 1541 bp, artificial sequence; identical to SEQ ID NO: 1558
  GCF_002078975.2_02481_Lactococcus_lactis

SEQ ID NO: 1562 - DNA, 1541 bp, artificial sequence; identical to SEQ ID NO: 1558
  GCF_002078975.2_02558_Lactococcus_lactis

SEQ ID NO: 1563 - DNA, 1541 bp, artificial sequence; identical to SEQ ID NO: 1558
  GCF_002078975.2_02578_Lactococcus_lactis

SEQ ID NO: 1564 - DNA, 1517 bp, artificial sequence
  GCF_002115705.1_00993_Lactococcus_lactis
acggagagtttgatcatggctcaggatgaacgctggcggcgtgcttaacacatgcaagtcgaacgatgatcccagcttgctgggggattagtggcgaacgggtgagtaacacgtgagtaacctgcccttgactctgggataagcctgggaaactgggtctaataccggatatgacctcctgacgcatgtcaggtggtggaaagcttttgtggttttggatggactcgcggcctatcagcttgttggtggggtaatggcctaccaaggcgacgacgggtagccggcctgagagggtgaccggccacactgggactgagacacggcccagactcctacgggaggcagcagtggggaatattgcacaatgggcgcaagcctgatgcagcgacgccgcgtgagggatgacggccttcgggttgtaaacctctttcagtagggaagaagcgaaagtgacggtacctgcagaagaagcgccggctaactacgtgccagcagccgcggtaatacgtagggcgcaagcgttatccggaattattgggcgtaaagagctcgtaggcggtttgtcgcgtctgctgtgaaagaccggggctcaactccggttctgcagtgggtacgggcagactagagtgatgtaggggagactggaattcctggtgtagcggtgaaatgcgcagatatcaggaggaacaccgatggcgaaggcaggtctctgggcattaactgacgctgaggagcgaaagcatggggagcgaacaggattagataccctggtagtccatgccgtaaacgttgggcactaggtgtgggggacattccacgttttccgcgccgtagctaacgcattaagtgccccgcctggggagtacggccgcaaggctaaaactcaaaggaattgacgggggcccgcacaagcggcggagcatgcggattaattcgatgcaacgcgaagaaccttaccaaggcttgacatgaaccggtaatacctggaaacaggtgccccgcttgcggtcggtttacaggtggtgcatggttgtcgtcagctcgtgtcgtgagatgttgggttaagtcccgcaacgagcgcaaccctcgttctatgttgccagcgcgttatggcggggactcataggagactgccggggtcaactcggaggaaggtggggacgacgtcaaatcatcatgccccttatgtcttgggcttcacgcatgctacaatggccggtacaaagggttgcgatactgtgaggtggagctaatcccaaaaagccggtctcagttcggattggggtctgcaactcgaccccatgaagtcggagtcgctagtaatcgcagatcagcaacgctgcggtgaatacgttcccgggccttgtacacaccgcccgtcaagtcacgaaagttggtaacacccgaagccggtggcctaacccttgtggggggagccgtcgaaggtgggaccggcgattgggactaagtcgtaacaaggtagccgtaccggaaggtgcggctggatcacctccttt

SEQ ID NO: 1565 - DNA, 1547 bp, artificial sequence
  GCF_002276835.1_01880_Lactococcus_lactis
aaagagagtttgatcctggctcaggacgaacgctggcggcgtgcctaatacatgcaagtcgaacgaacggaggaagagcttgctcttccaatgttagtggcggacgggtgagtaacacgtgggcaacctgcctgtaagttggggataactccgggaaaccggggctaataccgaatgataagtagtgacgcatgtcatcactttgaaagatggtttcggctatcgcttacagatgggcccgcggtgcattagctagttggtagggtaaaggcctaccaaggcaacgatgcatagccgacctgagagggtgatcggccacactgggactgagacacggcccagactcctacgggaggcagcagtagggaatcttccgcaatggacgaaagtctgacggagcaacgccgcgtgtatgaagaaggttttcggatcgtaaagtactgttgttagagaagaacaaggataagagtaactgcttgtcccttgacggtatctaaccagaaagccacggctaactacgtgccagcagccgcggtaatacgtaggtggcaagcgttgtccggatttattgggcgtaaagcgcgcgcaggcggtcttttaagtctgatgtgaaagcccccggcttaaccggggagggtcattggaaactggaagactggagtgcagaagaggagagtggaattccacgtgtagcggtgaaatgcgtagatatgtggaggaacaccagtggcgaaggcgactctctggtctgtaactgacgctgaggcgcgaaagcgtggggagcaaacaggattagataccctggtagtccacgccgtaaacgatgagtgctaagtgttagggggtttccgccccttagtgctgcagctaacgcattaagcactccgcctggggagtacgaccgcaaggttgaaactcaaaggaattgacgggggcccgcacaagcggtggagcatgtggtttaattcgaagcaacgcgaagaaccttaccaggtcttgacatcctttgaccactctggagacagagctttcccttcggggacaaagtgacaggtggtgcatggttgtcgtcagctcgtgtcgtgagatgttgggttaagtcccgcaacgagcgcaacccttgattttagttgccagcatttagttgggcactctaaagtgactgccggtgcaagccggaggaaggtggggatgacgtcaaatcatcatgccccttatgacctgggctacacacgtgctacaatggatggtacaaagggtcgcgaagccgcgaggtggagccaatcccataaaaccattctcagttcggattgtaggctgcaactcgcctacatgaagccggaatcgctagtaatcgcggatcagcatgccgcggtgaatacgttcccgggccttgtacacaccgcccgtcacaccacgagagtttgtaacacccgaagtcggtagggtaaccttttaggagccagccgccgaaggtgggacagataattggggtgaagtcgtaacaaggtagccgtatcggaaggtgcggctggatcacctccttt

SEQ ID NO: 1566 - DNA, 1536 bp, artificial sequence
  GCF_002441825.1_01963_Lactococcus_lactis
ttgaagagtttgatcatggctcagattgaacgctggcggcaggcctaacacatgcaagtcgaacggtagcacagagagcttgctctcgggtgacgagtggcggacgggtgagtaatgtctgggaaactgcctgatggagggggataactactggaaacggtagctaataccgcataacgtcgcaagaccaaagagggggaccttcgggcctcttgccatcagatgtgcccagatgggattagctagtaggtggggtaacggctcacctaggcgacgatccctagctggtctgagaggatgaccagccacactggaactgagacacggtccagactcctacgggaggcagcagtggggaatattgcacaatgggcgcaagcctgatgcagccatgccgcgtgtatgaagaaggccttcgggttgtaaagtactttcagcggggaggaaggtgttgtggttaataaccgcagcaattgacgttacccgcagaagaagcaccggctaactccgtgccagcagccgcggtaatacggagggtgcaagcgttaatcggaattactgggcgtaaagcgcacgcaggcggtctgtcaagtcggatgtgaaatccccgggctcaacctgggaactgcattcgaaactggcaggctagagtcttgtagaggggggtagaattccaggtgtagcggtgaaatgcgtagagatctggaggaataccggtggcgaaggcggccccctggacaaagactgacgctcaggtgcgaaagcgtggggagcaaacaggattagataccctggtagtccacgccgtaaacgatgtcgacttggaggttgtgcccttgaggcgtggcttccggagctaacgcgttaagtcgaccgcctggggagtacggccgcaaggttaaaactcaaatgaattgacgggggcccgcacaagcggtggagcatgtggtttaattcgatgcaacgcgaagaaccttacctactcttgacatccagagaacttagcagagatgctttggtgccttcgggaactctgagacaggtgctgcatggctgtcgtcagctcgtgttgtgaaatgttgggttaagtcccgcaacgagcgcaacccttatcctttgttgccagcggtccggccgggaactcaaaggagactgccagtgataaactggaggaaggtggggatgacgtcaagtcatcatggcccttacgagtagggctacacacgtgctacaatggcgcatacaaagagaagcgaactcgcgagagcaagcggacctcataaagtgcgtcgtagtccggattggagtctgcaactcgactccatgaagtcggaatcgctagtaatcgtagatcagaatgctacggtgaatacgttcccgggccttgtacacaccgcccgtcacaccatgggagtgggttgcaaaagaagtaggtagcttaaccttcgggagggcgcttaccactttgtgattcatgactggggtgaagtcgtaacaaggtaaccgtaggggaacctgcggttggatcacctcctt

SEQ ID NO: 1567 - DNA, 1529 bp, artificial sequence
  GCF_002563455.1_01317_Lactococcus_lactis
tattgagagtttgatcctggctcaggatgaacgctggcggcgtgcttaacacatgcaagtcgaacggagtgcctttgaaagaggattcgtccaattgataaggttacttagtggcggacgggtgagtaacgcgtgaggaacctgccttggagtggggaataacacagtgaaaattgtgctaataccgcataatgcagttgggtcgcatgactctgactgccaaagatttatcgctctgagatggcctcgcgtctgattagctagttggtggggtaacggcccaccaaggcgacgatcagtagccggactgagaggttggccggccacattgggactgagacacggcccagactcctacgggaggcagcagtggggaatattgggcaatgggcgcaagcctgacccagcaacgccgcgtgaaggaagaaggctttcgggttgtaaacttcttttcttagggacgaagcaagtgacggtacctaaggaataagccacggctaactacgtgccagcagccgcggtaatacgtaggtggcaagcgttatccggatttactgggtgtaaagggcgtgtaggcgggattgcaagtcagatgtgaaaaccacgggctcaacctgtggcctgcatttgaaactgtagttcttgagtactggagaggcagacggaattcctagtgtagcggtgaaatgcgtagatattaggaggaacaccagtggcgaaggcggtctgctggacagcaactgacgctgaggcgcgaaagcgtggggagcaaacaggattagataccctggtagtccacgctgtaaacgatggatactaggtgtggggggtctgaccccctccgtgccgcagttaacacaataagtatcccacctggggagtacgatcgcaaggttgaaactcaaaggaattgacgggggcccgcacaagcggtggagtatgtggtttaattcgaagcaacgcgaagaaccttaccagggcttgacatcccgaggcccggtctagagatagacctttctcttcggagacctcggtgacaggtggtgcatggttgtcgtcagctcgtgtcgtgagatgttgggttaagtcccgcaacgagcgcaacccctattgttagttgctacgcaagagcactctagcgagactgccgttgacaaaacggaggaaggtggggacgacgtcaaatcatcatgccccttatgtcctgggccacacacgtactacaatggtggttaacagagggaggcaataccgcgaggtggagcaaacccctaaaagccatcccagttcggattgcaggctgcaacccgcctgcatgaagttggaatcgctagtaatcgcggatcagcatgccgcggtgaatacgttcccgggccttgtacacaccgcccgtcacaccatgagagtcgggaacacccgaagtccgtagcctaaccgcaaggggggcgcggccgaaggtgggttcgataattggggtgaagtcgtaacaaggtagccgtatcggaaggtgcggctggatcacctccttt

SEQ ID NO: 1568 - DNA, 1529 bp, artificial sequence; identical to SEQ ID NO: 1567
  GCF_002563475.1_00546_Lactococcus_lactis

SEQ ID NO: 1569 - DNA, 1538 bp, artificial sequence
  GCF_002563535.1_02309_Lactococcus_lactis
ttgaagagtttgatcatggctcagattgaacgctggcggcaggcctaacacatgcaagtcgaacggtaacaggaaacagcttgctgtttcgctgacgagtggcggacgggtgagtaatgtctgggaaactgcctgatggagggggataactactggaaacggtagctaataccgcataacgtcgcaagaccaaagagggggaccttcgggcctcttgccatcggatgtgcccagatgggattagctagtaggtggggtaacggctcacctaggcgacgatccctagctggtctgagaggatgaccagccacactggaactgagacacggtccagactcctacgggaggcagcagtggggaatattgcacaatgggcgcaagcctgatgcagccatgccgcgtgtatgaagaaggccttcgggttgtaaagtactttcagcggggaggaagggagtaaagttaatacctttgctcattgacgttacccgcagaagaagcaccggctaactccgtgccagcagccgcggtaatacggagggtgcaagcgttaatcggaattactgggcgtaaagcgcacgcaggcggtttgttaagtcagatgtgaaatccccgggctcaacctgggaactgcatctgatactggcaagcttgagtctcgtagaggggggtagaattccaggtgtagcggtgaaatgcgtagagatctggaggaatatcggtggcgaaggcggccccctggacgaagactgacgctcaggtgcgaaagcgtggggagcaaacaggattagataccctggtagtccacgccgtaaacgatgtcgacttggaggttgtgcccttgaggcgtggcttccggagctaacgcgttaagtcgaccgcctggggagtacggccgcaaggttaaaactcaaatgaattgacgggggcccgcacaagcggtggagcatgtggtttaattcgatgcaacgcgaagaaccttacctggtcttgacatccacggaagttttcagagatgagaatgtgccttcgggaaccgtgagacaggtgctgcatggctgtcgtcagctcgtgttgtgaaatgttgggttaagtcccgcaacgagcgcaacccttatcctttgttgccagcggtccggccgggaactcaaaggagactgccagtgataaactggaggaaggtggggatgacgtcaagtcatcatggcccttacgaccagggctacacacgtgctacaatggcgcatacaaagagaagcgacctcgcgagagcaagcggacctcataaagtgcgtcgtagtccggattggagtctgcaactcgactccatgaagtcggaatcgctagtaatcgtggatcagaatgccacggtgaatacgttcccgggccttgtacacaccgcccgtcacaccatgggagtgggttgcaaaagaagtaggtagcttaaccttcgggagggcgcttaccactttgtgattcatgactggggtgaagtcgtaacaaggtaaccgtaggggaacctgcggttggatcacctcctt

SEQ ID NO: 1570 - DNA, 1527 bp, artificial sequence
  GCF_002563575.1_00522_Lactococcus_lactis
tgtagagtttgatcctggctcagattgaacgctggcggcatgccttacacatgcaagtcgaacggtaacagggacttcggtctgctgacgagtggcgaacgggtgagtaatacatcggaacgtgcccaagagtgggggataacgaggcgaaagctttgctaataccgcatacgatctcaggatgaaagcaggggaccttcgggccttgcgctcctggagcggccgatggcagattaggtagttggtgggataagagcttaccaagcctgcgatctgtagctggtctgagaggatgatcagccacactgggactgagacacggcccagactcctacgggaggcagcagtggggaattttggacaatgggggcaaccctgatccagccatgccgcgtgcaggatgaaggccttcgggttgtaaactgcttttgtacggaacgaaaagtctctggttaatacctggggatcatgacggtaccgtaagaataagcaccggctaactacgtgccagcagccgcggtaatacgtagggtgcaagcgttaatcggaattactgggcgtaaagcgtgcgcaggcggtcatgcaagacagtggtgaaatccccgggctcaacctgggaactgccattgtgactgcatggctggagtgcggcagagggggatggaattccgcgtgtagcagtgaaatgcgtagatatgcggaggaacaccgatggcgaaggcaatcccctgggcctgcactgacgctcatgcacgaaagcgtggggagcaaacaggattagataccctggtagtccacgccctaaacgatgtcaactggttgttggggatttatttcttcagtaacgaagctaacgcgtgaagttgaccgcctggggagtacggccgcaaggttgaaactcaaaggaattgacggggacccgcacaagcggtggatgatgtggtttaattcgatgctacgcgaagaaccttacccacctttgacatggtcggaatcttgcagagacgcaggagtgcccgaaagggagccgacacacaggtgctgcatggctgtcgtcagctcgtgtcgtgagatgttgggttaagtcccgcaacgagcgcaacccttgccattagttgctacgaaagggcactctaatgggactgccggtgacaaaccggaggaaggtggggatgacgtcaagtcctcatggcccttataggtggggctacacacgtcatacaatggctggtacagagggttgccaacccgcgagggggagccaatcccacaaagccagtcgtagtccggatcgcagtctgcaactcgactgcgtgaagtcggaatcgctagtaatcgcggatcagaatgtcgcggtgaatacgttcccgggtcttgtacacaccgcccgtcacaccatgggagcgggtctcgccagaagtgggtagcctaaccgcaaggagggcgcttaccacggcggggttcgtgactggggtgaagtcgtaacaaggtagccgtatcggaaggtgcggctggatcacctccttt

SEQ ID NO: 1571 - DNA, 1513 bp, artificial sequence
  GCF_002866835.1_00621_Lactococcus_lactis
ttggagagtttgatcctggctcaggacgaacgctggcggcgtgcttaacacatgcaagtcgagcggaaaggcccttcggggtactcgagcggcgaacgggtgagtaacacgtgagcaacctgccctaggctttgggataaccccgggaaaccggggctaataccgaatatgacctggcctcgcatgaggcttggtggaaagtttttcggcctgggatgggctcgcggcctatcagcttgttggtggggtgatggcctaccaaggcgacgacgggtagccggcctgagagggcgaccggccacactgggactgagacacggcccagactcctacgggaggcagcagtggggaatattgcacaatgggcggaagcctgatgcagcgacgccgcgtgagggatgacggccttcgggttgtaaacctctttcagcagggacgaagcgagagtgacggtacctgcagaagaagcaccggccaactacgtgccagcagccgcggtaagacgtagggtgcaagcgttgtccggatttattgggcgtaaagagctcgtaggcggcttgtcgcgtcgactgtgaaaacccgcggctcaaccgcgggcctgcagtcgatacgggcaggctagagttcggtaggggagactggaattcctggtgtagcggtgaaatgcgcagatatcaggaggaacaccggtggcgaaggcgggtctctgggccgatactgacgctgaggagcgaaagcgtggggagcgaacaggattagataccctggtagtccacgctgtaaacgttgggcgctaggtgtggggggcctctccggttccctgtgccgcagctaacgcattaagcgccccgcctggggagtacggccgcaaggctaaaactcaaaggaattgacgggggcccgcacaagcggcggagcatgcggattaattcgatgcaacgcgaagaaccttacctgggtttgacatggccgcaaaaccggcagagatgtcgggtccttcgggggcggtcacaggtggtgcatggctgtcgtcagctcgtgtcgtgagatgttgggttaagtcccgcaacgagcgcaaccctcgttcgatgttgccagcgcgttatggcggggactcatcgaagactgccggggtcaactcggaggaaggtggggatgacgtcaagtcatcatgccccttatgtccagggcttcacgcatgctacaatggccggtacaatgggctgcgataccgtgaggtggagcgaatcccaaaaagccggtctcagttcggatcggggtctgcaactcgaccccgtgaagtcggagtcgctagtaatcgcagatcagcaacgctgcggtgaatacgttcccgggccttgtacacaccgcccgtcacgtcacgaaagtcggcaacacccgaagccggtggcccaacccgtaagggagggagccgtcgaaggtggggctggcgattgggacgaagtcgtaacaaggtagccgtaccggaaggtgcggctggatcacctccttt

SEQ ID NO: 1572 - DNA, 943 bp, artificial sequence
  GCF_002866835.1_00894_Lactococcus_lactis
atggagagtttgatcctggctcaggatgaacgctagcggcaggcctaatacatgcaagtcgagcggcaagtcgaggagtaatctaagacctagagcggcgcacgggtgcgtaacgcgtatgcaacctacctcatacagggggatagcccggagaaatctggattaataccccatggtactatgaagcggcattgttttatagttaaagattcatcggtatgagatgggcatgcgtctgattagctagttggcggtgtaacggaccaccaaggcgacgatcagtaggggttctgagaggaaggtcccccacactggcactgagatacgggccagactcctacgggaggcagcagtagggaatattgggcaatggacgagagtctgacccagccatgccgcgtgcaggaagacggcgttctgcgttgtaaactgcttttatctgggaagaaaaggcccatgcgtgggacattgccggtaccagatgaataagcaccggctaactccgtgccagcagccgcggtaatacggagggtgcaagcgttgtccggatttattgggtttaaagggtgcgtaggcggctatttaagtcagcggtgaaagacatcggctcaaccgatgcagtgccattgatactggatagcttgagtgttggaggggtacatggaattgatggtgtagcggtgaaatgcatagataccatcaggaacaccgatagcgaaggcattgtactggccaacaactgacgctgaggcacgaaagcatggggagcgaacaggattagataccctggtagtccatgccgtaaacgatgattactcgctgttatgccttgatggtgtagcggccaagcgaaagcgttaagtaatccacctggggagtacgccggcaacggtgaaactcaaaggaattgacgggggtccgcacaagcggtggagcatgtggt

SEQ ID NO: 1573 - DNA, 832 bp, artificial sequence
  GCF_002866835.1_00933_Lactococcus_lactis
acggagagtttgatcctggctcaggacgaacgctggcggcgtgcttaacacatgcaagtcgaacgatgaagcctttcggggtggattagtggcgaacgggtgagtaacacgtgggcaatctgcccttcactctgggacaagccctggaaacggggtctaataccggataatacttctgcctgcatgggtgggggttgaaagctccggcggtgaaggatgagcccgcggcctatcagcttgttggtggggtaatggcctaccaaggcgacgacgggtagccggcctgagagggcgaccggccacactgggactgagacacggcccagactcctacgggaggcagcagtggggaatattgcacaatgggcgaaagcctgatgcagcgacgccgcgtgagggatgacggccttcgggttgtaaacctctttcagcagggaagaagcgcaagtgacggtacctgcagaagaagcgccggctaactacgtgccagcagccgcggtaatacgtagggcgcaagcgttgtccggaattattgggcgtaaagagctcgtaggcggcttgtcacgtcggatgtgaaagcccggggcttaaccccgggtctgcattcgatacgggctagctagagtgtggtaggggagatcggaattcctggtgtagcggtgaaatgcgcagatatcaggaggaacaccggtggcgaaggcggatctctgggccattactgacgctgaggagcgaaagcgtggggagcgaacaggattagataccctggtagtccacgccgtaaacgttgggaactaggtgttggcgacattccacgtcgtcggtgccgcag

SEQ ID NO: 1574 - DNA, 816 bp, artificial sequence
  GCF_002866835.1_01014_Lactococcus_lactis
ctgggccattactgacgctgaggagcgaaagcgtggggagcgaacaggattagataccctggtagtccacgccgtaaacgttgggaactaggtgttggcgacattccacgtcgtcggtgccgcagctaacgcattaagttccccgcctggggagtacggccgcaaggctaaaactcaaaggaattgacgggggcccgcacaagcagcggagcatgtggcttaattcgacgcaacgcgaagaaccttaccaaggcttgacatataccggaaagcatcagagatggtgccccccttgtggtcggtatacaggtggtgcatggctgtcgtcagctcgtgtcgtgagatgttgggttaagtcccgcaacgagcgcaacccttgttctgtgttgccagcatgcctttcggggtgatggggactcacaggagactgccggggtcaactcggaggaaggtggggacgacgtcaagtcatcatgccccttatgtcttgggctgcacacgtgctacaatggccggtacaatgagctgcgatgccgtgaggcggagcgaatctcaaaaagccggtctcagttcggattggggtctgcaactcgaccccatgaagtcggagttgctagtaatcgcagatcagcattgctgcggtgaatacgttcccgggccttgtacacaccgcccgtcacgtcacgaaagtcggtaacacccgaagccggtggcccaaccccttgtgggagggagctgtcgaaggtgggactggcgattgggacgaagtcgtaacaaggtagccgtaccggaaggtgcggctggatcacctccttt

SEQ ID NO: 1575 - DNA, 1465 bp, artificial sequence
  GCF_002866835.1_01034_Lactococcus_lactis
ctgagagtttgattctggctcagaacgaacgctggcggcaggcttaacacatgcaagtcgaacgagatcttcggatctagtggcggacgggtgagtaacgcgtgggaacgtgcctttcactacggaatagtcctgggaaactgggtttaataccgtatacgcccttcgggggaaagaatttcggtgaaagatcggcccgcgttggattaggtagttggtggggtaatggcctaccaagccgacgatccatagctggttttagaggatgatcagccacactgggactgagacacggcccagactcctacgggaggcagcagtggggaatcttagacaatgggggaaaccctgatctagccatgccgcgtgagtgacgaaggccctagggtcgtaaagctctttcaacggtgaagataatgacggtagccgtagaagaaaccccggctaactccgtgccagcagccgcggtaatacggagggggttagcgttgttcggaattactgggcgtaaagcgcgcgtaggcggattggaaagttgggggtgaaatcccggggctcaaccccggaactgcctccaaaactatcagtctagagttcgagagaggtgagtggaattccgagtgtagaggtgaaattcgtagatattcggaggaacaccagtggcgaaggcggctcactggctcgatactgacgctgaggtgcgaaagtgtggggagcaaacaggattagataccctggtagtccacaccgtaaacgatgaatgccagtcgtcgggtagcatgctattcggtgacacacctaacggattaagcattccgcctggggagtacggccgcaaggttaaaactcaaagaaattgacgggggcccgcacaagcggtggagcatgtggtttaattcgaagcaacgcgcagaaccttaccaacccttgacatccctgtcgcgggtaccggagacggtatccttcagttcggctggacaggtgacaggtgctgcatggctgtcgtcagctcgtgtcgtgagatgttcggttaagtccggcaacgagcgcaacccacatccctagttgccagcagttcggctgggcactctatggaaactgcccgtgataagcgggaggaaggtgtggatgacgtcaagtcctcatggcccttacgggttgggctacacacgtgctacaatggtggtgacagtgggttaatccccaaaaaccatctcagttcggattgtcgtctgcaactcgacggcatgaagtcggaatcgctagtaatcgcgtaacagcatgacgcggtgaatacgttcccgggccttgtacacaccgcccgtcacaccatgggagttgggttcacccgaaggccgtgcgccaacctgtttacagggggcagcggaccacggtgagctcagcgactggggtgaagtcgtaacaaggtagccgtaggggaacctgcggctggatcacctccttt

SEQ ID NO: 1576 - DNA, 1532 bp, artificial sequence
  GCF_002866835.1_01497_Lactococcus_lactis
tgaagagtttgatcatggctcagattgaacgctggcggcaggcctaacacatgcaagtcgagcggatgacaggagcttgctcctgaattcagcggcggacgggtgagtaatgcctaggaatctgcctggtagtgggggacaacgtttcgaaaggaacgctaataccgcatacgtcctacgggagaaagcaggggaccttcgggccttgcgctatcagatgagcctaggtcggattagctagttggtgaggtaatggctcaccaaggcgacgatccgtaactggtctgagaggatgatcagtcacactggaactgagacacggtccagactcctacgggaggcagcagtggggaatattggacaatgggcgaaagcctgatccagccatgccgcgtgtgtgaagaaggtcttcggattgtaaagcactttaagttgggaggaagggttgtagattaatactctgcaattttgacgttaccgacagaataagcaccggctaactctgtgccagcagccgcggtaatacagagggtgcaagcgttaatcggaattactgggcgtaaagcgcgcgtaggtggttcgttaagttggatgtgaaagccccgggctcaacctgggaactgcattcaaaactgacgagctagagtatggtagagggtggtggaatttcctgtgtagcggtgaaatgcgtagatataggaaggaacaccagtggcgaaggcgaccacctggactgatactgacactgaggtgcgaaagcgtggggagcaaacaggattagataccctggtagtccacgccgtaaacgatgtcaactagccgttgggagccttgagctcttagtggcgcagctaacgcattaagttgaccgcctggggagtacggccgcaaggttaaaactcaaatgaattgacgggggcccgcacaagcggtggagcatgtggtttaattcgaagcaacgcgaagaaccttaccaggccttgacatccaatgaactttccagagatggattggtgccttcgggaacattgagacaggtgctgcatggctgtcgtcagctcgtgtcgtgagatgttgggttaagtcccgtaacgagcgcaacccttgtccttagttaccagcacgttatggtgggcactctaaggagactgccggtgacaaaccggaggaaggtggggatgacgtcaagtcatcatggcccttacggcctgggctacacacgtgctacaatggtcggtacagagggttgccaagccgcgaggtggagctaatcccacaaaaccgatcgtagtccggatcgcagtctgcaactcgactgcgtgaagtcggaatcgctagtaatcgcgaatcagaatgtcgcggtgaatacgttcccgggccttgtacacaccgcccgtcacaccatgggagtgggttgcaccagaagtagctagtctaaccttcgggaggacggttaccacggtgtgattcatgactggggtgaagtcgtaacaaggtagccgtaggggaacctgcggctggatcacctcctt

SEQ ID NO: 1577 - DNA, 1432 bp, artificial sequence
  GCF_002926075.1_00047_Lactococcus_lactis
ggcgaccggcgcacgggtgagtaacacgtatgcaacctgccctcttcagggggacaaccttccgaaagggaggctaatcccgcgtatatcggtttcgggcatccgagatcgaggaaagattcatcggaagaggatgggcatgcggcgcattagctagacggcggggtaacggcccaccgtggcgacgatgcgtaggggttctgagaggaaggtcccccacactggtactgagacacggaccagactcctacgggaggcagcagtgaggaatattggtcaatgggagagatcctgaaccagccaagccgcgtgagggaagacggccctatgggttgtaaacctcttttgtcggagaacaaaacccgggacgtgtcccggactgcgtgtatccgaagaaaaagcatcggctaactccgtgccagcagccgcggtaatacggaggatgcgagcgttatccggatttattgggtttaaagggtgcgtaggcggtccgttaagtcagcggtaaaattgcggggctcaaccccgtcgagccgttgaaactggcagacttgagttggcgagaagtacgcggaatgcgcggtgtagcggtgaaatgcatagatatcgcgcagaactccgattgcgaaggcagcgtaccggcgccacactgacgctgaggcacgaaagcgtggggatcgaacaggattagataccctggtagtccacgcagtaaacgatgaatgctggttgtccgggtcgagtgagacctgggcggcgaagcgaaagcgataagcattccacctggggagtacgccggcaacggtgaaactcaaaggaattgacgggggcccgcacaagcggaggaacatgtggtttaattcgatgatacgcgaggaaccttacccgggctcaaacgggagcggaatggaccagagacggttcagcctacgggccgcttccgaggtgctgcatggttgtcgtcagctcgtgccgtgaggtgtcggcttaagtgccataacgagcgcaacccccgccggcagttgctaacgggcaatgccgaggactctgccgggactgccgccgcaaggcgtgaggaaggcggggatgacgtcaaatcagcacggcccttacgtccggggcgacacacgtgttacaatgggcggtacagcgggaagccaggcggcgacgccgagcggaacccgaaagccgttctcagttcggatcggagtctgcaacccgactccgtgaagctggattcgctagtaatcgcgcatcagccatggcgcggtgaatacgttcccgggccttgtacacaccgcccgtcaagccatgggagccgggggtgcttgaagtgcgtcgccgcgaggcgcgccctagagcaaaaccggtgactggggctaagtcgtaacaaggtagccgtaccggaaggtgcggctggaacacctccttt

SEQ ID NO: 1578 - DNA, 1369 bp, artificial sequence
  GCF_003472365.1_02255_Lactococcus_lactis
agcagctggaaacggcgtctaatactggatacgaaactggcccgcatgggcatggtttggaaagtttttcggtttgggatgggctcgcggcctatcagcttgttggtgaggtaatggctcaccaaggcgacgacgggtagccggcctgagagggcgaccggccacactgggactgagacacggcccagactcctacgggaggcagcagtggggaatattgcacaatgggcgaaagcctgatgcagcgacgccgcgtgagggatgacggccttcgggttgtaaacctctttcagcagggaagaagcgaaagtgacggtacctgcagaagaagcaccggctaactacgtgccagcagccgcggtaatacgtagggtgcgagcgttgtccggaattattgggcgtaaagagcttgtaggcggtttgtcgcgtctgctgtgaaaatccggggctcaaccccggacttgcagtgggtacgggcagactagagtgtggtaggggagactggaattcctggtgtagcggtgaaatgcgcagatatcaggaggaacaccgatggcgaaggcaggtctctgggccactactgacgctgagaagcgaaagcatggggagcgaacaggattagataccctggtagtccatgccgtaaacgttgggcgctaggtgtgggactcattccacgagttccgtgccgcagctaacgcattaagcgccccgcctggggagtacggccgcaaggctaaaactcaaaggaattgacgggggcccgcacaagcggcggagcatgcggattaattcgatgcaacgcgaagaaccttaccaaggcttgacatatatcggaaacatccagagatgggtgccccttttaggtcggtatacaggtggtgcatggttgtcgtcagctcgtgtcgtgagatgttgggttaagtcccgcaacgagcgcaaccctcgttctatgttgccagcacgttatggtggggactcatggaagactgccggggtcaactcggaggaaggtggggatgacgtcaaatcatcatgccccttatgtcttgggcttcacgcatgctacaatggccggtacaaagggctgcgaaaccgtaaggtggagcgaatcccaaaaaaccggtctcagttcggattggggtctgcaactcgaccccatgaagtcggagtcgctagtaatcgcagatcagcaacgctgcggtgaatacgttcccgggccttgtacacaccgcccgtcaagtcacgaaagtcggtaacacccgaagccggtggcccaacccttgtggagggagccgtcgaaggtgggactggcgattgggactaagtcgtaacaaggtagccgtaccggaaggtgcggctggatcac

SEQ ID NO: 1579 - DNA, 1464 bp, artificial sequence
  GCF_003722255.1_00497_Lactococcus_lactis
cttgagagtttgatcctggctcagaatgaacgctggcggcaggcctaacacatgcaagtcgagcgaagtcttcggacttagcggcggacgggtgagtaacgcgtgggaacgtgccctttgcttcggaatagccccgggaaactgggagtaataccgaatgtgccctttgggggaaagatttatcggcaaaggatcggcccgcgttggattaggtagttggtggggtaatggcctaccaagccgacgatccatagctggtttgagaggatgatcagccacactgggactgagacacggcccagactcctacgggaggcagcagtggggaatcttagacaatgggcgcaagcctgatctagccatgccgcgtgatcgatgaaggccttagggttgtaaagatctttcaggtgggaagataatgacggtaccaccagaagaagccccggctaactccgtgccagcagccgcggtaatacggagggggctagcgttattcggaattactgggcgtaaagcgcacgtaggcggatcggaaagtcagaggtgaaatcccagggctcaaccctggaactgcctttgaaactcccgatcttgaggtcgagagaggtgagtggaattccgagtgtagaggtgaaattcgtagatattcggaggaacaccagtggcgaaggcggctcactggctcgatactgacgctgaggtgcgaaagcgtggggagcaaacaggattagataccctggtagtccacgccgtaaacgatgaatgccagtcgtcgggcagcatgctgttcggtgacacacctaacggattaagcattccgcctggggagtacggccgcaaggttaaaactcaaaggaattgacgggggcccgcacaagcggtggagcatgtggtttaattcgaagcaacgcgcagaaccttaccaacccttgacatggcgatcgcggttccagagatggttccttcagttcggctggatcgcacacaggtgctgcatggctgtcgtcagctcgtgtcgtgagatgttcggttaagtccggcaacgagcgcaacccacgtccttagttgccagcattcagttgggcactctagggaaactgccggtgataagccggaggaaggtgtggatgacgtcaagtcctcatggcccttacgggttgggctacacacgtgctacaatggcagtgacaatgggttaatcccaaaaagctgtctcagttcggattggggtctgcaactcgaccccatgaagtcggaatcgctagtaatcgcgtaacagcatgacgcggtgaatacgttcccgggccttgtacacaccgcccgtcacaccatgggaattggttctacccgaaggcggtgcgccaacctcgcaagaggaggcagccgaccacggtaggatcagtgactggggtgaagtcgtaacaaggtagccgtaggggaacctgcggctggatcacctccttt

SEQ ID NO: 1580 - DNA, 1464 bp, artificial sequence; identical to SEQ ID NO: 1579
  GCF_003722255.1_01839_Lactococcus_lactis

SEQ ID NO: 1581 - DNA, 1464 bp, artificial sequence; identical to SEQ ID NO: 1579
  GCF_003722255.1_02074_Lactococcus_lactis

SEQ ID NO: 1582 - DNA, 1464 bp, artificial sequence; identical to SEQ ID NO: 1579
  GCF_003722255.1_02112_Lactococcus_lactis

SEQ ID NO: 1583 - DNA, 1464 bp, artificial sequence; identical to SEQ ID NO: 1579
  GCF_003722255.1_02198_Lactococcus_lactis

SEQ ID NO: 1584 - DNA, 1464 bp, artificial sequence; identical to SEQ ID NO: 1579
  GCF_003722255.1_02218_Lactococcus_lactis

SEQ ID NO: 1585 - DNA, 1519 bp, artificial sequence
  GCF_003838305.1_01330_Lactococcus_lactis
tttggagagtttgatcctggctcaggacgaacgctggcggcgtgcttaacacatgcaagtcgaacgatgaagcccagcttgctgggtggattagtggcgaacgggtgagtaacacgtgagtaatctacccctcactttgggataagccccggaaacggggtctaatactgaatatgacctttcctcgcatgaggtttggtggaaagttttttcggtgggggatgtgctcgcggcctatcagcttgttggtgaggtaacggctcaccaaggcgacgacgggtagccggcctgagagggtgaacggccacactgggactgagacacggcccagactcctacgggaggcagcagtggggaatattgcacaatgggcgaaagcctgatgcagcgacgccgcgtgagggatgaaggccttcgggttgtaaacctctttcagcaggggagaagcgaaagtgacggtacctgcagaagaagcaccggctaactacgtgccagcagccgcggtaatacgtagggtgcgagcgttgtccggaattattgggcgtaaagagcttgtaggcggtttgtcgcgtctgctgtgaaaatccagggcttaaccctggacgtgcagtgggtacgggcaggctagagtgtggtaggggagactggaattcctggtgtagcggtgaaatgcgcagatatcaggaggaacaccgatggcgaaggcaggtctctgggccattactgacgctgagaagcgaaagcatgggtagcgaacaggattagataccctggtagtccatgccgtaaacgttgggcgctgggtgtggggtccattccacggattctgcgccgtagctaacgcattaagcgccccgcctggggagtacggccgcaaggctaaaactcaaaggaattgacgggggcccgcacaagcggcggagcatgcggattaattcgatgcaacgcgaagaaccttaccaaggcttgacatacaccggaaaagtgcagagatgtactcccctttttggtcggtgtacaggtggtgcatggttgtcgtcagctcgtgtcgtgagatgttgggttaagtcccgcaacgagcgcaaccctcgtcgcatgttgccagcacgtaatggtggggactcatgtgagactgccggggtcaactcggaggaaggtggggatgacgtcaaatcatcatgccccttatgtcttgggcttcacgcatgctacaatggccggtacagagtgctgcgataccgtgaggtggagcgaatcacttaaagccggtctcagttcggattggggtctgcaactcgaccccatgaagtcggagtcgctagtaatcgcagatcagcaacgctgcggtgaatacgttcccgggccttgtacacaccgcccgtcaagtcacgaaagttggtaacacccgaagccggtggcctaacccttgtggggggagccgtcgaaggtgggactggcgattgggactaagtcgtaacaaggtagccgtaccggaaggtgcggctggatcacctccttt

SEQ ID NO: 1586 - DNA, 1515 bp, artificial sequence
  GCF_003839715.1_01723_Lactococcus_lactis
acggagagtttgatcctggctcaggacgaacgctggcggcgtgcttaacacatgcaagtcgagcggtaaggcctttcggggtacacgagcggcgaacgggtgagtaacacgtgggtgatctgccctgcacttcgggataagcctgggaaactgggtctaataccggatatgacctcaggttgcatgacttggggtggaaagatttatcggtgcaggatgggcccgcggcctatcagcttgttggtggggtaatggcctaccaaggcgacgacgggtagccgacctgagagggtgaccggccacactgggactgagacacggcccagactcctacgggaggcagcagtggggaatattgcacaatgggcgaaagcctgatgcagcgacgccgcgtgagggatgacggccttcgggttgtaaacctctttcagcagggacgaagcgcaagtgacggtacctgcagaagaagcaccggctaactacgtgccagcagccgcggtaatacgtagggtgcaagcgttgtccggaattactgggcgtaaagagttcgtaggcggtttgtcgcgtcgtttgtgaaaaccagcagctcaactgctggcttgcaggcgatacgggcagacttgagtactgcaggggagactggaattcctggtgtagcggtgaaatgcgcagatatcaggaggaacaccggtggcgaaggcgggtctctgggcagtaactgacgctgaggaacgaaagcgtgggtagcgaacaggattagataccctggtagtccacgccgtaaacggtgggcgctaggtgtgggttccttccacggaatccgtgccgtagctaacgcattaagcgccccgcctggggagtacggccgcaaggctaaaactcaaaggaattgacgggggcccgcacaagcggcggagcatgtggattaattcgatgcaacgcgaagaaccttacctgggtttgacatataccggaaagctgcagagatgtggccccccttgtggtcggtatacaggtggtgcatggctgtcgtcagctcgtgtcgtgagatgttgggttaagtcccgcaacgagcgcaacccctatcttatgttgccagcacgttatggtggggactcgtaagagactgccggggtcaactcggaggaaggtggggacgacgtcaagtcatcatgccccttatgtccagggcttcacacatgctacaatggccagtacagagggctgcgagaccgtgaggtggagcgaatcccttaaagctggtctcagttcggatcggggtctgcaactcgaccccgtgaagtcggagtcgctagtaatcgcagatcagcaacgctgcggtgaatacgttcccgggccttgtacacaccgcccgtcacgtcatgaaagtcggtaacacccgaagccggtggcttaaccccttgtgggagggagccgtcgaaggtgggatcggcgattgggacgaagtcgtaacaaggtagccgtaccggaaggtgcggctggatcacctccttt

SEQ ID NO: 1587 - DNA, 1549 bp, artificial sequence
  GCF_004022375.1_01695_Lactococcus_lactis
ttgaagagtttgatcatggctcagattgaacgctggcggcaggcctaacacatgcaagtcgagcggaaacgagttatctgaaccttcggggaacgataacggcgtcgagcggcggacgggtgagtaatgcctaggaaattgccctgatgtgggggataaccattggaaacgatggctaataccgcataatgcctacgggccaaagagggggaccttcgggcctctcgcgtcaggatatgcctaggtgggattagctagttggtgaggtaatggctcaccaaggcgacgatccctagctggtctgagaggatgatcagccacactggaactgagacacggtccagactcctacgggaggcagcagtggggaatattgcacaatgggcgcaagcctgatgcagccatgccgcgtgtgtgaagaaggccttcgggttgtaaagcactttcagtcgtgaggaaggtagtgtagttaatagctgcattacttgacgttagcgacagaagaagcaccggctaactccgtgccagcagccgcggtaatacggagggtgcgagcgttaatcggaattactgggcgtaaagcgcatgcaggtggtttgttaagtcagatgtgaaagcccggggctcaacctcggaatagcatttgaaactggcagactagagtactgtagaggggggtagaatttcaggtgtagcggtgaaatgcgtagagatctgaaggaataccggtggcgaaggcggccccctggacagatactgacactcagatgcgaaagcgtggggagcaaacaggattagataccctggtagtccacgccgtaaacgatgtctacttggaggttgtggccttgagccgtggctttcggagctaacgcgttaagtagaccgcctggggagtacggtcgcaagattaaaactcaaatgaattgacgggggcccgcacaagcggtggagcatgtggtttaattcgatgcaacgcgaagaaccttacctactcttgacatccagagaactttccagagatggattggtgccttcgggaactctgagacaggtgctgcatggctgtcgtcagctcgtgttgtgaaatgttgggttaagtcccgcaacgagcgcaacccttatccttgtttgccagcgagtaatgtcgggaactccagggagactgccggtgataaaccggaggaaggtggggacgacgtcaagtcatcatggcccttacgagtagggctacacacgtgctacaatggcgcatacagagggcagcaagctagcgatagtgagcgaatcccaaaaagtgcgtcgtagtccggattggagtctgcaactcgactccatgaagtcggaatcgctagtaatcgtggatcagaatgccacggtgaatacgttcccgggccttgtacacaccgcccgtcacaccatgggagtgggctgcaaaagaagtaggtagtttaaccttcgggaggacgcttaccactttgtggttcatgactggggtgaagtcgtaacaaggtagcgctaggggaacctggcgctggatcacctcctt

SEQ ID NO: 1588 - DNA, 1532 bp, artificial sequence
  GCF_004194355.1_00686_Lactococcus_lactis
tgaagagtttgatcatggctcagattgaacgctggcggcaggcttaacacatgcaagtcgagcggggattgggtgcttgcacctaatcttagcggcggacgggtgagtaatgcttaggaatctgccatttagtgggggacaacattccgaaagggatgctaataccgcatacgccctacgggggaaagcaggggatcttcggaccttgcgctaaatgatgagcctaagtcggattagctagttggtggggtaaaggcctaccaaggcgacgatctgtagcgggtctgagaggatgatccgccacactgggactgagacacggcccagactcctacgggaggcagcagtggggaatattggacaatggggggaagcctgatccagccatgccgcgtgtgtgaagaaggccttttggttgtaaagcactttaagcgaggaggaggctacctggattaatactctaggatagtggacgttactcgcagaataagcaccggctaactctgtgccagcagccgcggtaatacagagggtgcgagcgttaatcggatttactgggcgtaaagcgtgcgtaggcggctgattaagtcggatgtgaaatccctgagcttaacttaggaattgcattcgatactggtcagctagagtatgggagaggatggtagaattccaggtgtagcggtgaaatgcgtagagatctggaggaataccgatggcgaaggcagccatctggcctaatactgacgctgaggtacgaaagcatggggagcaaacaggattagataccctggtagtccatgccgtaaacgatgtctactagccgttggggcctttgaggctttagtggcgcagctaacgcgataagtagaccgcctggggagtacggtcgcaagactaaaactcaaatgaattgacgggggcccgcacaagcggtggagcatgtggtttaattcgatgcaacgcgaagaaccttacctggccttgacatagtagaaactttccagagatggattggtgccttcgggaatctacatacaggtgctgcatggctgtcgtcagctcgtgtcgtgagatgttgggttaagtcccgcaacgagcgcaacccttttccttacttgccagcatttcggatgggaactttaaggatactgccagtgacaaactggaggaaggcggggacgacgtcaagtcatcatggcccttacggccagggctacacacgtgctacaatggtcggtacaaagggttgctacctagcgataggatgctaatctcaaaaagccgatcgtagtccggattggagtctgcaactcgactccatgaagtcggaatcgctagtaatcgcggatcagaatgccgcggtgaatacgttcccgggccttgtacacaccgcccgtcacaccatgggagtttgttgcaccagaagtaggtagtctaaccttaggggggacgcttaccacggtgtggccgatgactggggtgaagtcgtaacaaggtagccgtaggggaacctgcggctggatcacctcctt

SEQ ID NO: 1589 - DNA, 1532 bp, artificial sequence
  GCF_004194355.1_00938_Lactococcus_lactis
tgaagagtttgatcatggctcagattgaacgctggcggcaggcttaacacatgcaagtcgagcggggtgaagtgcttcggtactgatcctagcggcggacgggtgagtaatgcttaggaatctgccatttagtgggggacaacattccgaaagggatgctaataccgcatacgccctacgggggaaagcaggggatcttcggaccttgcgctaaatgatgagcctaagtcggattagctagttggtggggtaaaggcctaccaaggcgacgatctgtagcgggtctgagaggatgatccgccacactgggactgagacacggcccagactcctacgggaggcagcagtggggaatattggacaatgggcggaagcctgatccagccatgccgcgtgtgtgaagaaggccttttggttgtaaagcactttaagcgaggaggaggctacctggattaatactctaggatagtggacgttactcgcagaataagcaccggctaactctgtgccagcagccgcggtaatacagagggtgcgagcgttaatcggatttactgggcgtaaagcgtgcgtaggcggctgattaagtcggatgtgaaatccctgagcttaacttaggaattgcattcgatactggtcagctagagtatgggagaggatggtagaattccaggtgtagcggtgaaatgcgtagagatctggaggaataccgatggcgaaggcagccatctggcctaatactgacgctgaggtacgaaagcatggggagcaaacaggattagataccctggtagtccatgccgtaaacgatgtctactagccgttggggcctttgaggctttagtggcgcagctaacgcgataagtagaccgcctggggagtacggtcgcaagactaaaactcaaatgaattgacgggggcccgcacaagcggtggagcatgtggtttaattcgatgcaacgcgaagaaccttacctggccttgacatagtagaaactttccagagatggattggtgccttcgggaatctacatacaggtgctgcatggctgtcgtcagctcgtgtcgtgagatgttgggttaagtcccgcaacgagcgcaacccttttccttacttgccagcatttcggatgggaactttaaggatactgccagtgacaaactggaggaaggcggggacgacgtcaagtcatcatggcccttacggccagggctacacacgtgctacaatggtcggtacaaagggttgctacctagcgataggatgctaatctcaaaaagccgatcgtagtccggattggagtctgcaactcgactccatgaagtcggaatcgctagtaatcgcggatcagaatgccgcggtgaatacgttcccgggccttgtacacaccgcccgtcacaccatgggagtttgttgcaccagaagtaggtagtctaaccttaggggggacgcttaccacggtgtggccgatgactggggtgaagtcgtaacaaggtagccgtaggggaacctgcggctggatcacctcctt

SEQ ID NO: 1590 - DNA, 1532 bp, artificial sequence
  GCF_004194355.1_00977_Lactococcus_lactis
tgaagagtttgatcatggctcagattgaacgctggcggcaggcttaacacatgcaagtcgagcggggattgggtgcttgcacctaatcttagcggcggacgggtgagtaatgcttaggaatctgccatttagtgggggacaacattccgaaagggatgctaataccgcatacgccctacgggggaaagcaggggatcattagaccttgcgctaaatgatgagcctaagtcggattagctagttggtggggtaaaggcctaccaaggcgacgatctgtagcgggtctgagaggatgatccgccacactgggactgagacacggcccagactcctacgggaggcagcagtggggaatattggacaatgggcgaaagcctgatccagccatgccgcgtgtgtgaagaaggccttttggttgtaaagcactttaagcgaggaggaggctacctggattaatactctaggatagtggacgttactcgcagaataagcaccggctaactctgtgccagcagccgcggtaatacagagggtgcgagcgttaatcggatttactgggcgtaaagcgtgcgtaggcggctgattaagtcggatgtgaaatccctgagcttaacttaggaattgcattcgatactggtcagctagagtatgggagaggatggtagaattccaggtgtagcggtgaaatgcgtagagatctggaggaataccgatggcgaaggcagccatctggcctaatactgacgctgaggtacgaaagcatggggagcaaacaggattagataccctggtagtccatgccgtaaacgatgtctactagccgttggggcctttgaggctttagtggcgcagctaacgcgataagtagaccgcctggggagtacggtcgcaagactaaaactcaaatgaattgacgggggcccgcacaagcggtggagcatgtggtttaattcgatgcaacgcgaagaaccttacctggccttgacatagtagaaactttccagagatggattggtgccttcgggaatctacatacaggtgctgcatggctgtcgtcagctcgtgtcgtgagatgttgggttaagtcccgcaacgagcgcaacccttttccttacttgccagcatttcggatgggaactttaaggatactgccagtgacaaactggaggaaggcggggacgacgtcaagtcatcatggcccttacggccagggctacacacgtgctacaatggtcggtacaaagggttgctacctagcgataggatgctaatctcaaaaagccgatcgtagtccggattggagtctgcaactcgactccatgaagtcggaatcgctagtaatcgcggatcagaatgccgcggtgaatacgttcccgggccttgtacacaccgcccgtcacaccatgggagtttgttgcaccagaagtaggtagtctaaccttaggggggacgcttaccacggtgtggccgatgactggggtgaagtcgtaacaaggtagccgtaggggaacctgcggctggatcacctcctt

SEQ ID NO: 1591 - DNA, 1532 bp, artificial sequence
  GCF_004194355.1_01055_Lactococcus_lactis
tgaagagtttgatcatggctcagattgaacgctggcggtatgcttaacacatgcaagtcgaacggtaacgatgctagcttgctagcaggcgacgagtggcggacgggtgagtaacgcgtgggaatctaccgagtagcgggggatagcccggagaaatccggattaataccgcatgtgcactacggtgtaaagagggcctctatttataagctctcactattcgatgagcctgcgtcagattagctagatggtggggtaaaggcctaccatggcgacgatctgtagctggtctgagaggatgatcagccacactgggactgagacacggcccagactcctacgggaggcagcagtggggaatattggacaatgggggcaaccctgatccagcaataccgcgtgtgtgaagaaggccttcgggttgtaaagcactttcagcgaggaggaaaagctagtagttaatacctgctggccttgacgttactcgcagaagaagcaccggctaactccgtgccagcagccgcggtaatacggagggtgcaagcgttaatcggaattactgggcgtaaagcgcgcgtaggcggatgattaagtcagatgtgaaagcccagggcttaaccttggaactgcatttgatactggtcatctagagtacagtagaggggggtggaattccaggtgtagcggtgaaatgcgtagagatctggaggaacatcagtggcgaaggcgaccccctggactgatactgacgctgaggtgcgaaagcgtgggtagcgaacaggattagataccctggtagtccacgccgtaaacgatgtctattagctgttgggtatattaagatacttagtggcgcagctaacgctttaaatagaccgcctggggagtacggccgcaaggttaaaactcaaatgaattgacgggggcccgcacaagcggtggagcatgtggtttaattcgatgcaacgcgaagaaccttaccaggtcttgacatccagagaactttccagagatggattggtgccttcgggaactctgtgacaggtgctgcatggctgtcgtcagctcgtgtcgtgagatgttgggttaagtcccgtaacgagcgcaacccttgtccttagttgctaacatttagttgagaactctaaggagactgccggtgacaaaccggaggaaggtggggacgacgtcaagtcatcatggcccttacgacctgggctacacacgtgctacaatgggcagtacagagggttgccaacccgcgagggggagctaatctcacaaagctgttcgtagtccggattgtactctgcaactcgagtgcatgaagtcggaatcgctagtaatcgtggatcagaatgccacggtgaatacgttcccgggccttgtacacaccgcccgtcacaccatggaagttgtttgcaccagaagtagctagcttaacattgggcggttaccacggtgtgaccaatgactggggtgaagtcgtaacaaggtagccgtaggggaacctgcggctggatcacctcctt

SEQ ID NO: 1592 - DNA, 1532 bp, artificial sequence; identical to SEQ ID NO: 1591
  GCF_004194355.1_01075_Lactococcus_lactis

SEQ ID NO: 1593 - DNA, 1522 bp, artificial sequence
  GCF_004194355.1_01573_Lactococcus_lactis
acggagagtttgatcctggctcaggatgaacgctggcggcgtgcttaacacatgcaagtcgaacgatgaactggtgcttgcactggggattagtggcgaacgggtgagtaacacgtgagtaacctgcccttgactctgggataagcctgggaaactgggtctaataccggatatgaccttccatcgcatggtggttggtggaaagcttttgtggttttggatggactcgcggcctatcagcttgttggtggggtaatggcctaccaaggcgacgacgggtagccggcctgagagggtgaccggccacactgggactgagacacggcccagactcctacgggaggcagcagtggggaatattgcacaatgggcggaagcctgatgcagcgacgccgcgtgagggatgacggccttcgggttgtaaacctctttcagtagggaagaagcgaaagtgacggtacctgcagaagaagcgccggctaactacgtgccagcagccgcggtaatacgtagggcgcaagcgttatccggaattattgggcgtaaagagctcgtaggcggtttgtcgcgtctgccgtgaaagtccggggctcaactccggatctgcggtgggtacgggcagactagagtgatgtaggggagactggaattcctggtgtagcggtgaaatgcgcagatatcaggaggaacaccgatggcgaaggcaggtctctgggcattaactgacgctgaggagcgaaagcatggggagcgaacaggattagataccctggtagtccatgccgtaaacgttgggcactaggtgtgggggacattccacgttttccgcgccgtagctaacgcattaagtgccccgcctggggagtacggccgcaaggctaaaactcaaaggaattgacgggggcccgcacaagcggcggagcatgcggattaattcgatgcaacgcgaagaaccttaccaaggcttgacatgaaccggtaatacctggaaacaggtgccccactttgtggtcggtttacaggtggtgcatggttgtcgtcagctcgtgtcgtgagatgttgggttaagtcccgcaacgagcgcaaccctcgttctatgttgccagcacgtgatggtggggactcataggagactgccggggtcaactcggaggaaggtggggacgacgtcaaatcatcatgccccttatgtcttgggcttcacgcatgctacaatggccggtacaaagggttgcgatactgtgaggtggagctaatcccaaaaagccggtctcagttcggattggggtctgcaactcgaccccatgaagtcggagtcgctagtaatcgcagatcagcaacgctgcggtgaatacgttcccgggccttgtacacaccgcccgtcaagtcacgaaagttggtaacacccgaagccggtggcctaaccccttgtgggagggagctgtcgaaggtgggactggcgattgggactaagtcgtaacaaggtagccgtaccggaaggtgcggctggatcacctccttt

SEQ ID NO: 1594 - DNA, 1539 bp, artificial sequence
  GCF_004210295.1_00894_Lactococcus_lactis
ttgaagagtttgatcatggctcagattgaacgctggcggcaggcctaacacatgcaagtcgagcggcagcggaagggagcttgctcccttgccggcgagcggcggacgggtgagtaatgtctggggatctgcccgatggagggggataactactggaaacggtagctaataccgcataacgtcgcaagaccaaagtgggggaccttagggcctcacaccatcggatgaacccagatgggattagctagtaggcggggtaagagcccacctaggcgacgatctctagctggtctgagaggatgaccagccacactggaactgagacacggtccagactcctacgggaggcagcagtggggaatattgcacaatgggggaaaccctgatgcagccatgccgcgtgtatgaagaaggccttcgggttgtaaagtactttcagcggggaggaaggcagtgaacttaatacgttcgctgattgacgttacccgcagaagaagcaccggctaactccgtgccagcagccgcggtaatacggagggtgcaagcgttaatcggaatgactgggcgtaaagcgcacgcaggcggtttgttaagtcagatgtgaaatccccgagcttaacttgggaactgcatttgaaactggcaggctagagtcttgtagaggggggtagaattccaggtgtagcggtgaaatgcgtagagatctggaggaataccggtggcgaaggcggccccctggacaaagactgacgctcaggtgcgaaagcgtggggagcaaacaggattagataccctggtagtccacgctgtaaacgatgtcgacttggaggttgcggtcttgaactgtggcttccggagctaacgcgttaagtcgaccgcctggggagtacggccgcaaggttaaaactcaaatgaattgacgggggcccgcacaagcggtggagcatgtggtttaattcgatgcaacgcgaagaaccttacctactcttgacatccagagaacttggcagagatgccttggtgccttcgggagctctgagacaggtgctgcatggctgtcgtcagctcgtgttgtgaaatgttgggttaagtcccgcaacgagcgcaacccttatcctttgttgccagcacgtcatggtgggaactcaaaggagactgccggtgataaaccggaggaaggtggggatgacgtcaagtcatcatggcccttacgagtagggctacacacgtgctacaatggcgcatacaaagagaagcgaacttgcgagagtaagcggacctcataaagtgcgtcgtagtccggattggagtctgcaactcgactccatgaagtcggaatcgctagtaatcgtagatcagaatgctacggtgaatacgttcccgggccttgtacacaccgcccgtcacaccatgggagtgggttgcaaaagaagtaggtagcttaaccttcgggagggcgcttaccactttgtgattcatgactggggtgaagtcgtaacaaggtaaccgtaggggaacctgcggttggatcacctcctt

SEQ ID NO: 1595 - DNA, 1535 bp, artificial sequence
  GCF_004210295.1_01298_Lactococcus_lactis
taagagtttgatcctggctcagattgaacgctggcggcatgctttacacatgcaagtcgaacggcagcacggagagcttgctctctggtggcgagtggcgaacgggtgagtaatgcatcggaacgtaccgagtaatgggggataactgtccgaaaggatggctaataccgcatacgccctgagggggaaagcgggggatcttagtgacctcgcgttatttgagcggccgatgttggattagctagttggtggggtaaaggcctaccaaggcgacgatccatagcgggtctgagaggatgatccgccacattgggactgagacacggcccaaactcctacgggaggcagcagtggggaattttggacaatggggggaaccctgatccagccatgccgcgtgtctgaagaaggccttcgggttgtaaaggacttttgttagggaagaaaagccgggtgttaataccacctggtgctgacggtacctaaagaataagcaccggctaactacgtgccagcagccgcggtaatacgtagggtgcgagcgttaatcggaattactgggcgtaaagcgagcgcagacggttaattaagtcagatgtgaaatccccgagctcaacttgggacgtgcatttgaaactggttaactagagtgtgtcagagggaggtagaattccacgtgtagcagtgaaatgcgtagagatgtggaggaataccgatggcgaaggcagcctcctgggataacactgacgttcatgctcgaaagcgtgggtagcaaacaggattagataccctggtagtccacgccctaaacgatgacaattagctgttgggacactagatgtcttagtagcgaagctaacgcgtgaaattgtccgcctggggagtacggtcgcaagattaaaactcaaaggaattgacggggacccgcacaagcggtggatgatgtggattaattcgatgcaacgcgaagaaccttacctggtcttgacatgtacggaatctcttagagataggagagtgccttcgggaaccgtaacacaggtgctgcatggctgtcgtcagctcgtgtcgtgagatgttgggttaagtcccgcaacgagcgcaacccttgtcattagttgccatcattaagttgggcactctaatgagactgccggtgacaaaccggaggaaggtggggatgacgtcaagtcctcatggcccttatgaccagggcttcacacgtcatacaatggtcggtacagagggtagcgaagccgcgaggtgaagccaatctcagaaagccgatcgtagtccggattgcactctgcaactcgagtgcatgaagtcggaatcgctagtaatcgcaggtcagcatactgcggtgaatacgttcccgggtcttgtacacaccgcccgtcacaccatgggagtgggggataccagaattgggtagactaaccgcaaggaggtcgcttaacacggtatgcttcatgactggggtgaagtcgtaacaaggtagccgtaggggaacctgcggctggatcacctccttt

SEQ ID NO: 1596 - DNA, 1538 bp, artificial sequence
  GCF_004210295.1_01517_Lactococcus_lactis
ttgaagagtttgatcatggctcagattgaacgctggcggcaggcctaacacatgcaagtcgaacggtaacagggatcagcttgctgattcgctgacgagtggcggacgggggagtaatgtctgggaaactgcccgatggagggggataactattggaaacggtagctaataccgcataacgtcgcaagaccaaagagggggaccttcgggcctcttgccatcggatgtgcccagatgggattagctagtaggtggggtaacggctcacctaggcgacgatccctagctggtctgagaggatgaccagccacactggaactgagacacggtccagactcctacgggaggcagcagtggggaatattgcacaatgggcgcaagcctgatgcagccatgccgcgtgtatgaagaaggccttcgggttgtaaagtactttcagcggggaggaagggagtaaagttaatacctttgctcattgacgttacccgcagaagaagcaccggctaactccgtgccagcagccgcggtaatacggagggtgcaagcgttaatcggaattactgggcgtaaagcgcacgcaggcggtctgttaagtcagatgtgaaatccccgggctcaacctgggaactgcatctgatactggcaggcttgagtctcgtagaggggggtagaattccaggtgtagcggtgaaatgcgtagagatctggaggaataccggtggcgaaggcggccccctggacgaagactgacgctcaggtgcgaaagcgtggggagcaaacaggattagataccctggtagtccacgccgtaaacgatgtcgacttggaggttgtgcccttgaggcgtggcttccggagctaacgcgttaagtcgaccgcctggggagtacggccgcaaggttaaaactcaaatgaattgacgggggcccgcacaagcggtggagcatgtggtttaattcgatgcaacgcgaagaaccttacctggtcttgacatccacagaagttttcagagatgagaatgtgccttcgggaactgtgagacaggtgctgcatggctgtcgtcagctcgtgttgtgaaatgttgggttaagtcccgcaacgagcgcaacccttatcctttgttgccagcggtccggccgggaactcaaaggagactgccagtgataaactggaggaaggtggggatgacgtcaagtcatcatggcccttacgaccagggctacacacgtgctacaatggcgcatacaaagagaagcgacctcgcgagagcaagcggacctcataaagtgcgtcgtagtccggattggagtctgcaactcgactccatgaagtcggaatcgctagtaatcgtggatcagaatgccacggtgaatacgttcccgggccttgtacacaccgcccgtcacaccatgggagtgggttgcaaaagaagtaggtagcttaaccttcgggagggcgcttaccactttgtgattcatgactggggtgaagtcgtaacaaggtaaccgtaggggaacctgcggttggatcacctcctt

SEQ ID NO: 1597 - DNA, 1538 bp, artificial sequence
  GCF_004210295.1_01548_Lactococcus_lactis
ttgaagagtttgatcatggctcagattgaacgctggcggcaggcctaacacatgcaagtcgaacggtaacagggatcagcttgctgattcgctgacgagtggcggacgggtgagtaatgtctgggaaactgcccgatggagggggataactattggaaacggtagctaataccgcataacgtcgcaagaccaaagagggggaccttcgggcctcttgccatcggatgtgcccagatgggattagctagtaggtggggtaacggctcacctaggcgacgatccctagctggtctgagaggatgaccagccacactggaactgagacacggtccagactcctacgggaggcagcagtggggaatattgcacaatgggcgcaagcctgatgcagccatgccgcgtgtatgaagaaggccttcgggttgtaaagtactttcagcggggaggaagggagtaaagttaatacctttgctcattgacgttacccgcagaagaagcaccggctaactccgtgccagcagccgcggtaatacggagggtgcaagcgttaatcggaattactgggcgtaaagcgcacgcaggcggtctgttaagtcagatgtgaaatccccgggctcaacctgggaactgcatctgatactggcaggcttgagtctcgtagaggggggtagaattccaggtgtagcggtgaaatgcgtagagatctggaggaataccggtggcgaaggcggccccctggacgaagactgacgctcaggtgcgaaagcgtggggagcaaacaggattagataccctggtagtccacgccgtaaacgatgtcgacttggaggttgtgcccttgaggcgtggcttccggagctaacgcgttaagtcgaccgcctggggagtacggccgcaaggttaaaactcaaatgaattgacgggggcccgcacaagcggtggagcatgtggtttaattcgatgcaacgcgaagaaccttacctggtcttgacatccacggaacttttcagagatgagaatgtgccttcgggaaccgtgagacaggtgctgcatggctgtcgtcagctcgtgttgtgaaatgttgggttaagtcccgcaacgagcgcaacccttatcctttgttgccagcggtccggccgggaactcaaaggagactgccagtgataaactggaggaaggtggggatgacgtcaagtcatcatggcccttacgaccagggctacacacgtgctacaatggcgcatacaaagagaagcgacctcgcgagagcaagcggacctcataaagtgcgtcgtagtccggattggagtctgcaactcgactccatgaagtcggaatcgctagtaatcgtggatcagaatgccacggtgaatacgttcccgggccttgtacacaccgcccgtcacaccatgggagtgggttgcaaaagaagtaggtagcttaaccttcgggagggcgcttaccactttgtgattcatgactggggtgaagtcgtaacaaggtaaccgtaggggaacctgcggttggatcacctcctt

SEQ ID NO: 1598 - DNA, 1538 bp, artificial sequence
  GCF_004210295.1_01639_Lactococcus_lactis
ttgaagagtttgatcatggctcagattgaacgctggcggcaggcctaacacatgcaagtcgaacggtaacaggaaacagcttgctgtttcgctgacgagtggcggacgggtgagtaatgtctgggaaactgcccgatggagggggataactactggaaacggtagctaataccgcataacgtcgcaagaccaaagagggggaccttcgggcctcttgccatcggatgtgcccagatgggattagctagtaggtggggtaatggctcacctaggcgacgatccctagctggtctgagaggatgaccagccacactggaactgagacacggtccagactcctacgggaggcagcagtggggaatattgcacaatgggcgcaagcctgatgcagccatgccgcgtgtatgaagaaggccttcgggttgtaaagtactttcagcggggaggaagggagtaaagttaatacctttgctcattgacgttacccgcagaagaagcaccggctaactccgtgccagcagccgcggtaatacggagggtgcaagcgttaatcggaattactgggcgtaaagcgcacgcaggcggtctgttaagtcagatgtgaaatccccgggctcaacctgggaactgcatctgatactggcaggcttgagtctcgtagaggggggtagaattccaggtgtagcggtgaaatgcgtagagatctggaggaataccggtggcgaaggcggccccctggacgaagactgacgctcaggtgcgaaagcgtggggagcaaacaggattagataccctggtagtccacgccgtaaacgatgtcgacttggaggttgtgcccttgaggcgtggcttccggagctaacgcgttaagtcgaccgcctggggagtacggccgcaaggttaaaactcaaatgaattgacgggggcccgcacaagcggtggagcatgtggtttaattcgatgcaacgcgaagaaccttacctggtcttgacatccacagaactttccagagatggattggtgccttcgggaactgtgagacaggtgctgcatggctgtcgtcagctcgtgttgtgaaatgttgggttaagtcccgcaacgagcgcaacccttatcctttgttgccagcggtccggccgggaactcaaaggagactgccagtgataaactggaggaaggtggggatgacgtcaagtcatcatggcccttacgaccagggctacacacgtgctacaatggcgcatacaaagagaagcgacctcgcgagagcaagcggacctcataaagtgcgtcgtagtccggattggagtctgcaactcgactccatgaagtcggaatcgctagtaatcgtggatcagaatgccacggtgaatacgttcccgggccttgtacacaccgcccgtcacaccatgggagtgggttgcaaaagaagtaggtagcttaaccttcgggagggcgcttaccactttgtgattcatgactggggtgaagtcgtaacaaggtaaccgtaggggaacctgcggttggatcacctcctt

SEQ ID NO: 1599 - DNA, 1538 bp, artificial sequence
  GCF_004210295.1_01673_Lactococcus_lactis
ttgaagagtttgatcatggctcagattgaacgctggcggcaggcctaacacatgcaagtcgaacggtaacagggatcagcttgctgattcgctgacgagtggcggacgggtgagtaatgtctgggaaactgcccgatggagggggataactactggaaacggtagctaataccgcataacgtcgcaagaccaaagagggggaccttcgggcctcttgccatcggatgtgcccagatgggattagctagtaggtggggtaacggctcacctaggcgacgatccctagctggtctgagaggatgaccagccacactggaactgagacacggtccagactcctacgggaggcagcagtggggaatattgcacaatgggcgcaagcctgatgcagccatgccgcgtgtatgaagaaggccttcgggttgtaaagtactttcagcggggaggaagggagtaaagttaatacctttgctcattgacgttacccgcagaagaagcaccggctaactccgtgccagcagccgcggtaatacggagggtgcaagcgttaatcggaattactgggcgtaaagcgcacgcaggcggtctgttaagtcagatgtgaaatccccgggctcaacctgggaactgcatctgatactggcaggcttgagtctcgtagaggggggtagaattccaggtgtagcggtgaaatgcgtagagatctggaggaataccggtggcgaaggcggccccctggacgaagactgacgctcaggtgcgaaagcgtggggagcaaacaggattagataccctggtagtccacgccgtaaacgatgtcgacttggaggttgtgcccttgaggcgtggcttccggagctaacgcgttaagtcgaccgcctggggagtacggccgcaaggttaaaactcaaatgaattgacgggggcccgcacaagcggtggagcatgtggtttaattcgatgcaacgcgaagaaccttacctggtcttgacatccacggaagttttcagagatgagaaggtgccttcgggaactgtgagacaggtgctgcatggctgtcgtcagctcgtgttgtgaaatgttgggttaagtcccgcaacgagcgcaacccttatcctttgttgccagcggtccggccgggaactcaaaggagactgccagtgataaactggaggaaggtggggatgacgtcaagtcatcatggcccttacgaccagggctacacacgtgctacaatggcgcatacaaagagaagcgacctcgcgagagcaagcggacctcataaagtgcgtcgtagtccggattggagtctgcaactcgactccatgaagtcggaatcgctagtaatcgtggatcagaatgccacggtgaatacgttcccgggccttgtacacaccgcccgtcacaccatgggagtgggttgcaaaagaagtaggtagcttaaccttcgggagggcgcttaccactttgtgattcatgactggggtgaagtcgtaacaaggtaaccgtaggggaacctgcggttggatcacctcctt

SEQ ID NO: 1600 - DNA, 1528 bp, artificial sequence
  GCF_004795205.1_02362_Lactococcus_lactis
tgaagagtttgatcatggctcagattgaacgctggcggcaggcctaacacatgcaagtcgagcggtaacaggtccagcttgctggatgctgacgagcggcggacgggtgagtaatgcataggaatctacccggtagtgggggataacctggggaaacccaggctaataccgcatacgtcctacgggagaaagggggctttggctcccgctatcggatgagcctatgccggattagctggttggtgaggtaacggctcaccaaggcgacgatccgtagctggtctgagaggatgatcagccacatcgggactgagacacggcccgaactcctacgggaggcagcagtggggaatattggacaatgggggcaaccctgatccagccatgccgcgtgtgtgaagaaggccctcgggttgtaaagcactttcagcgaggaagaacgcctggtggttaatacccgccaggaaagacatcactcgcagaagaagcaccggctaactccgtgccagcagccgcggtaatacggagggtgcaagcgttaatcggaattactgggcgtaaagcgcgcgtaggtggcttgataagccggttgtgaaagccccgggctcaacctgggaacggcatccggaactatcaggctagagtgcaggagaggaaggtagaattcccggtgtagcggtgaaatgcgtagagatcgggaggaataccagtggcgaaggcggccttctggactgacactgacactgaggtgcgaaagcgtgggtagcaaacaggattagataccctggtagtccacgccgtaaacgatgtcgaccagccgttgggtgcctagcgcactttgtggcgaagttaacgcgataagtcgaccgcctggggagtacggccgcaaggttaaaactcaaatgaattgacgggggcccgcacaagcggtggagcatgtggtttaattcgatgcaacgcgaagaaccttacctacccttgacatcctgcgaacttggtagagataccttggtgccttcgggagcgcagagacaggtgctgcatggctgtcgtcagctcgtgttgtgaaatgttgggttaagtcccgtaacgagcgcaacccttgtccttatttgccagcgggtaatgccgggaactctaaggagactgccggtgacaaaccggaggaaggtggggacgacgtcaagtcatcatggcccttacgggtagggctacacacgtgctacaatggccggtacagagggcggcgagctcgcgagagtcagcgaatcccttaaagccggtctcagtccggatcggagtctgcaactcgactccgtgaagtcggaatcgctagtaatcgtgaatcagaatgtcacggtgaatacgttcccgggccttgtacacaccgcccgtcacaccatgggagtggactgcaccagaagtggttagcctaactttggagggcgatcaccacggtgtggttcatgactggggtgaagtcgtaacaaggtagccgtaggggaacctgcggctggatcacctcctt

SEQ ID NO: 1601 - DNA, 1560 bp, artificial sequence
  GCF_006351065.1_00004_Lactococcus_lactis
ttggagagtttgatcctggctcaggacgaacgctggcggcgtgcttaacacatgcaagtcgaacgaagagcgatggaagcttgcttctatcaatcttagtggcgaacgggtgagtaacgcgtaatcaacctgcccttcagagggggacaacagttggaaacgactgctaataccgcatacgatccaatctcggcatcgaggatagatgaaaggtggcctctatttataagctatcactgaaggaggggattgcgtctgattagctagttggaggggtaacggcccaccaaggcgatgatcagtagccggtctgagaggatgaacggccacattgggactgagacacggcccagactcctacgggaggcagcagtggggaatcttccgcaatggacgaaagtctgacggagcaacgccgcgtgagtgatgacggccttcgggttgtaaagctctgttaatcgggacgaaaggccttcttgcgaatagttagaaggattgacggtaccggaatagaaagccacggctaactacgtgccagcagccgcggtaatacgtaggtggcaagcgttgtccggaattattgggcgtaaagcgcgcgcaggcggattggtcagtctgtcttaaaagttcggggcttaaccccgtgatgggatggaaactgccaatctagagtatcggagaggaaagtggaattcctagtgtagcggtgaaatgcgtagatattaggaagaacaccagtggcgaaggcgactttctggacgaaaactgacgctgaggcgcgaaagccaggggagcgaacgggattagataccccggtagtcctggccgtaaacgatgggtactaggtgtaggaggtatcgaccccttctgtgccggagttaacgcaataagtaccccgcctggggagtacgaccgcaaggttgaaactcaaaggaattgacgggggcccgcacaagcggtggagtatgtggtttaattcgacgcaacgcgaagaaccttaccaggtcttgacattgatggacagaactagagatagttcctcttcttcggaagccagaaaacaggtggtgcacggttgtcgtcagctcgtgtcgtgagatgttgggttaagtcccgcaacgagcgcaacccctatcttatgttgccagcactttgggtgggaactcatgagagactgccgcagacaatgcggaggaaggcggggatgacgtcaaatcatcatgccccttatgacctgggctacacacgtactacaatgggagttaatagacggaagcaataccgcgaggtggagcaaacccgagaaacactctctcagttcggatcgtaggctgcaactcgcctacgtgaagtcggaatcgctagtaatcgcaggtcagcatactgcggtgaatacgttcccgggccttgtacacaccgcccgtcacaccacgaaagtcggaagtgcccaaagccggtggggtaaccttcgggagccagccgtctaaggtaaagtcgatgattggggtgaagtcgtaacaaggtagccgtatcggaaggtgcggctggatcacctccttt

SEQ ID NO: 1602 - DNA, 1538 bp, artificial sequence
  GCF_900099625.1_02515_Lactococcus_lactis
ttgaagagtttgatcatggctcagattgaacgctggcggcaggcctaacacatgcaagtcgaacggtaacagggagcagcttgctgctctgctgacgagtggcggacgggtgagtaatgtctggggatctgcccgatggagggggataaccactggaaacggtggctaataccgcataacgtcgcaagaccaaagtgggggaccttcgggcctcacaccatcggatgaacccagatgggattagctagtaggtggggtaacggctcacctaggcgacgatccctagctggtctgagaggatgaccagccacactggaactgagacacggtccagactcctacgggaggcagcagtggggaatattgcacaatgggcgcaagcctgatgcagccatgccgcgtgtatgaagaaggccttcgggttgtaaagtactttcagcggggaggaagggagcaaggttaataacctggttcattgacgttacccgcagaagaagcaccggctaactccgtgccagcagccgcggtaatacggagggtgcaagcgttaatcggaattactgggcgtaaagcgcacgcaggcggtctgtcaagtcggatgtgaaatccccgggctcaacccgggaactgcattcgaaactggcaggctagagtcttgtagaggggggtagaattccaggtgtagcggtgaaatgcgtagagatctggaggaataccggtggcgaaggcggccccctggacaaagactgacgctcaggtgcgaaagcgtggggagcaaacaggattagataccctggtagtccacgccgtaaacgatgtcgacttggaggctgtgagcttgactcgtggcttccggagctaacgcgttaagtcgaccgcctggggagtacggccgcaaggttaaaactcaaatgaattgacgggggcccgcacaagcggtggagcatgtggtttaattcgatgcaacgcgaagaaccttacctggccttgacatccacggaattctgcagagatgcggaagtgccttcgggaaccgtgagacaggtgctgcatggctgtcgtcagctcgtgttgtgaaatgttgggttaagtcccgcaacgagcgcaacccttatcctttgttgccagcgattcggtcgggaactcaagggagactgccggtgataaaccggaggaaggtggggatgacgtcaagtcatcatggcccttacggccagggctacacacgtgctacaatggcgcatacaaagagaagcgacctcgcgagagcaagcggacctcataaagtgcgtcgtagtccggatcggagtctgcaactcgactccgtgaagtcggaatcgctagtaatcgtggatcagaatgccacggtgaatacgttcccgggccttgtacacaccgcccgtcacaccatgggagtgggttgcaaaagaagtaggtagcttaaccttcgggagggcgcttaccactttgtgattcatgactggggtgaagtcgtaacaaggtaaccgtaggggaacctgcggttggatcacctcctt

SEQ ID NO: 1603 - DNA, 1538 bp, artificial sequence
  GCF_900240895.1_01170_Lactococcus_lactis
ttgaagagtttgatcatggctcagattgaacgctggcggcaggcctaacacatgcaagtcgagcggtagcacaagagagcttgctctctgggtgacgagcggcggacgggtgagtaatgtctgggaaactgcctgatggagggggataactactggaaacggtagctaataccgcataacgtctacggaccaaagtgggggaccttcgggcctcacgccatcagatgtgcccagatgggattagctagtaggtggggtaatggctcacctaggcgacgatccctagctggtctgagaggatgaccagccacactggaactgagacacggtccagactcctacgggaggcagcagtggggaatattgcacaatgggcgcaagcctgatgcagccatgccgcgtgtgtgaagaaggccttagggttgtaaagcactttcagcgaggaggaagggttcagtgttaatagcactgttcattgacgttactcgcagaagaagcaccggctaactccgtgccagcagccgcggtaatacggagggtgcaagcgttaatcggaattactgggcgtaaagcgcacgcaggcggtttgttaagtcagatgtgaaatccccgcgcttaacgtgggaactgcatttgaaactggcaagctagagtcttgtagaggggggtagaattccaggtgtagcggtgaaatgcgtagagatctggaggaataccggtggcgaaggcggccccctggacaaagactgacgctcaggtgcgaaagcgtggggagcaaacaggattagataccctggtagtccacgctgtaaacgatgtcgatttggaggttgtgcccttgaggcgtggcttccggagctaacgcgttaaatcgaccgcctggggagtacggccgcaaggttaaaactcaaatgaattgacgggggcccgcacaagcggtggagcatgtggtttaattcgatgcaacgcgaagaaccttacctactcttgacatccagagaattcgctagagatagcttagtgccttcgggaactctgagacaggtgctgcatggctgtcgtcagctcgtgttgtgaaatgttgggttaagtcccgcaacgagcgcaacccttatcctttgttgccagcgattcggtcgggaactcaaaggagactgccggtgataaaccggaggaaggtggggatgacgtcaagtcatcatggcccttacgagtagggctacacacgtgctacaatggcgtatacaaagagaagcgaactcgcgagagcaagcggacctcataaagtacgtcgtagtccggattggagtctgcaactcgactccatgaagtcggaatcgctagtaatcgtagatcagaatgctacggtgaatacgttcccgggccttgtacacaccgcccgtcacaccatgggagtgggttgcaaaagaagtaggtagcttaaccttcgggagggcgcttaccactttgtgattcatgactggggtgaagtcgtaacaaggtaaccgtaggggaacctgcggttggatcacctcctt

SEQ ID NO: 1604 - DNA, 1510 bp, artificial sequence
  GCF_000177015.3_02648_Lawsonibacter_sp3
tatggagagtttgatcctggctcagagtgaacgctggcggcgtgcctaatacatgcaagtcgaacgatgaagcttttagcttgctagaagtggattagtggcgcacgggtgagtaaggtatagttaatctgccctacacaagaggacaacagttggaaacgactgctaatactctatactcctgcttaacacaagttgagtagggaaagtttttcggtgtaggatgagactatatagtatcagctagttggtgaggtaatggctcaccaaggctatgacgcttaactggtctgagaggatgatcagtcacactggaactgagacacggtccagactcctacgggaggcagcagtagggaatattgcgcaatgggggaaaccctgacgcagcaacgccgcgtggaggatgacacttttcggagcgtaaactccttttcttagggaagaattctgacggtacctaaggaataagcaccggctaactccgtgccagcagccgcggtaatacggagggtgcaagcgttactcggaatcactgggcgtaaagggcgcgtaggcggattatcaagtctcttgtgaaatccaacggcttaaccgttgaactgcttgggaaactggtagtctagagtgagggagaggcagatggaattggtggtgtaggggtaaaatccgtagatatcaccaagaatacccattgcgaaggcgatctgctggaacttaactgacgctaaggcgcgaaagcgtggggagcaaacaggattagataccctggtagtccacgccctaaacgatgtacactagttgttggggtgctagtcatctcagtaatgcagctaacgcattaagtgtaccgcctggggagtacggtcgcaagattaaaactcaaaggaatagacggggacccgcacaagcggtggagcatgtggtttaattcgaagatacgcgaagaaccttacctgggcttgatatcctaagaacctcttagagataagagggtgctagcttgctagaacttagagacaggtgctgcacggctgtcgtcagctcgtgtcgtgagatgttgggttaagtcccgcaacgagcgcaacccacgtatttagttgctaacggttcggccgagcactctaaatagactgccttcgtaaggaggaggaaggtgtggacgacgtcaagtcatcatggcccttatgcccagggcgacacacgtgctacaatggcatatacaatgagacgcaataccgcgaggtggagcaaatctataaaatatgtcccagttcggattgttctctgcaactcgagagcatgaagccggaatcgctagtaatcgtagatcagccatgctacggtgaatacgttcccgggtcttgtactcaccgcccgtcacaccatgggagttgatttcactcgaagccggaatactaaactagttaccgtccacagtggaatcagcgactggggtgaagtcgtaacaaggtaaccgtaggagaacctgcggttggatcacctcctt

SEQ ID NO: 1605 - DNA, 1520 bp, artificial sequence
  GCF_003202955.1_00486_Lawsonibacter_sp3
ttggagagtttgatcctggctcaggacgaacgctggcggcgtgcttaacacatgcaagtcgaacgctgaagccgcttcggtggtggatgagtggcgaacgggtgagtaacacgtgggcaatctgccctgtactctgggataagccctggaaacggggtctaataccggataggacactgtctcgcatggggtggtgtggaaagcttcggcggtacgggatgagcccgcggcctatcagcttgttggtggggtgatggcctaccaaggcgacgacgggtagccggcctgagagggtgaccggccacactgggactgagacacggcccagactcctacgggaggcagcagtggggaatattgcacaatgggcggaagcctgatgcagcgacgccgcgtgagggatgacggccttcgggttgtaaacctctttcgcccgggacgaagcgtcacagtgacggtaccgggagaagaagcaccggctaactacgtgccagcagccgcggtaatacgtagggtgcgagcgttgtccggaattattgggcgtaaagagctcgtaggcggtgtgtcacgtctgccgtgaaaacctgcggcttaaccgtgggcgtgcggtggatacgggcatcacttgagttcggcaggggagactggaattcctggtgtagcggtggaatgcgcagatatcaggaggaacaccggtggcgaaggcgggtctctgggccgatactgacgctgaggagcgaaagcgtggggagcgaacaggattagataccctggtagtccacgccgtaaacgttgggcgctaggtgtgggacgctgttcacgtgtcccgtgccgtagctaacgcattaagcgccccgcctggggagtacggccgcaaggctaaaactcaaaggaattgacgggggcccgcacaagcggcggagcatgtggattaattcgatgcaacgcgaagaaccttacctgggcttgacatgcaccggatcgcctcagagatggggtttcccttgtggctggtgcacaggtggtgcatggctgtcgtcagctcgtgtcgtgagatgttgggttaagtcccgcaacgagcgcaacccttgtcccatgttgccagcgggttatgccggggactcgtgggagactgccggggtcaactcggaggaaggtggggatgacgtcaagtcatcatgccccttatgtccagggcttcacacatgctacaatggccggtacagagggtggcgagaccgtgaggtggagcgaatcccttaaagccggtctcagttcggatcgtagtctgcaactcgactgcgtgaagtcggagtcgctagtaatcgcagatcagcaacgctgcggtgaatacgttcccgggccttgtacacaccgcccgtcacgtcatgaaagtcggtaacacccgaagcccacggcccaaccgttcgcggggggagtggtcgaaggtgggactggcgattgggacgaagtcgtaacaaggtagccgtaccggaaggtgcggctggatcacctccttt

SEQ ID NO: 1606 - DNA, 1536 bp, artificial sequence
  GCF_003202955.1_02199_Lawsonibacter_sp3
ttgaagagtttgatcatggctcagattgaacgctggcggcaggcctaacacatgcaagtcgaacggtaacaggaagcagcttgctgcttcgctgacgagtggcggacgggtgagtaatgtctgggaaactgcctgatggagggggataactactggaaacggtagctaataccgcataacgtcgcaagaccaaagaggggaccttcgggcctcttgccatcagatgtgcccagatgggattagctagtaggtggggtaacggctcacctaggcgacgatccctagctggtctgagaggatgaccagccacactggaactgagacacggtccagactcctacgggaggcagcagtggggaatattgcacaatgggcgcaagcctgatgcagccatgccgcgtgtatgaagaaggccttcgggttgtaaagtactttcagcggggaggaaggcgatgcggttaataaccgcgtcgattgacgttacccgcagaagaagcaccggctaactccgtgccagcagccgcggtaatacggagggtgcaagcgttaatcggaattactgggcgtaaagcgcacgcaggcggtctgtcaagtcggatgtgaaatccccgggctcaacctgggaactgcatccgaaactggcaggcttgagtctcgtagaggggggtagaattccaggtgtagcggtgaaatgcgtagagatctggaggaataccggtggcgaaggcggccccctggacgaagactgacgctcaggtgcgaaagcgtggggagcaaacaggattagataccctggtagtccacgccgtaaacgatgtcgacttggaggttgtgcccttgaggcgtggcttccggagctaacgcgttaagtcgaccgcctggggagtacggccgcaaggttaaaactcaaatgaattgacgggggcccgcacaagcggtggagcatgtggtttaattcgatgcaacgcgaagaaccttacctggtcttgacatccacagaacttggcagagatgccttggtgccttcgggaactgtgagacaggtgctgcatggctgtcgtcagctcgtgttgtgaaatgttgggttaagtcccgcaacgagcgcaacccttatcctttgttgccagcggttaggccgggaactcaaaggagactgccagtgataaactggaggaagtggggatgacgtcaagtcatcatggcccttacgaccagggctacacacgtgctacaatggcgcatacaaagagaagcaaactcgcgagagcaagcggacctcataaagtgcgtcgtagtccggattggagtctgcaactcgactccatgaagtcggaatcgctagtaatcgtgaatcagaatgtcacggtgaatacgttcccgggccttgtacacaccgcccgtcacaccatgggagtgggttgcaaaagaagtaggtagcttaaccttcgggagggcgcttaccactttgtgattcatgactggggtgaagtcgtaacaaggtaaccgtaggggaacctgcggttggatcacctcctt

SEQ ID NO: 1607 - DNA, 1538 bp, artificial sequence
  GCF_003202955.1_02736_Lawsonibacter_sp3
ttgaagagtttgatcatggctcagattgaacgctggcggcaggcctaacacatgcaagtcgaacggtaacaggaagcagcttgctgcttcgctgacgagtggcggacgggtgagtaatgtctgggaaactgcctgatggagggggataactactggaaacggtagctaataccgcataacgtcgcaagaccaaagagggggaccttcgggcctcttgccatcagatgtgcccagatgggattagctagtaggtggggtaacggctcacctaggcgacgatccctagctggtctgagaggatgaccagccacactggaactgagacacggtccagactcctacgggaggcagcagtggggaatattgcacaatgggcgcaagcctgatgcagccatgccgcgtgtatgaagaaggccttcgggttgtaaagtactttcagcggggaggaaggcgatgtggttaataaccgcgtcgattgacgttacccgcagaagaagcaccggctaactccgtgccagcagccgcggtaatacggagggtgcaagcgttaatcggaattactgggcgtaaagcgcacgcaggcggtctgtcaagtcggatgtgaaatccccgggctcaacctgggaactgcatccgaaactggcaggcttgagtctcgtagaggggggtagaattccaggtgtagcggtgaaatgcgtagagatctggaggaataccggtggcgaaggcggccccctggacgaagactgacgctcaggtgcgaaagcgtggggagcaaacaggattagataccctggtagtccacgccgtaaacgatgtcgacttggaggttgtgcccttgaggcgtggcttccggagctaacgcgttaagtcgaccgcctggggagtacggccgcaaggttaaaactcaaatgaattgacgggggcccgcacaagcggtggagcatgtggtttaattcgatgcaacgcgaagaaccttacctggtcttgacatccacagaacttggcagagatgccttggtgccttcgggaactgtgagacaggtgctgcatggctgtcgtcagctcgtgttgtgaaatgttgggttaagtcccgcaacgagcgcaacccttatcctttgttgccagcggttaggccgggaactcaaaggagactgccagtgataaactggaggaaggtggggatgacgtcaagtcatcatggcccttacgaccagggctacacacgtgctacaatggcgcatacaaagagaagcaaactcgcgagagcaagcggacctcataaagtgcgtcgtagtccggattggagtctgcaactcgactccatgaagtcggaatcgctagtaatcgtgaatcagaatgtcacggtgaatacgttcccgggccttgtacacaccgcccgtcacaccatgggagtgggttgcaaaagaagtaggtagcttaaccttcgggagggcgcttaccactttgtgattcatgactggggtgaagtcgtaacaaggtaaccgtaggggaacctgcggttggatcacctcctt

SEQ ID NO: 1608 - DNA, 1529 bp, artificial sequence
  STR02467_Lawsonibacter_sp7
tattgagagtttgatcctggctcaggatgaacgctggcggcgtgcttaacacatgcaagtcgaacggagtgctcatgacagaggattcgtccaatggagtgagttacttagtggcggacgggtgagtaacgcgtgagtaacctgccttggagtggggaataacaggtggaaacatctgctaataccgcatgatgcagttgagtcgcatggctctgactgccaaagatttatcgctctgagatggactcgcgtctgattagctagttggcggggtaacggcccaccaaggcgacgatcagtagccggactgagaggttggccggccacattgggactgagacacggcccagactcctacgggaggcagcagtggggaatattgggcaatgggcgcaagcctgacccagcaacgccgcgtgaaggaagaaggctttcgggttgtaaacttcttttctcagggacgaagcaagtgacggtacctgaggaataagccacggctaactacgtgccagcagccgcggtaatacgtaggtggcaagcgttatccggatttactgggtgtaaagggcgtgtaggcgggactgcaagtcagatgtgaaaaccacgggctcaacctgtggcctgcatttgaaactgtagttcttgagtactggagaggcagacggaattcctagtgtagcggtgaaatgcgtagatattaggaggaacaccagtggcgaaggcggtctgctggacagcaactgacgctgaggcgcgaaagcgtggggagcaaacaggattagataccctggtagtccacgctgtaaacgatggatactaggtgtggggggtctgaccccctccgtgccgcagttaacacaataagtatcccacctggggagtacgatcgcaaggttgaaactcaaaggaattgacgggggcccgcacaagcggtggagtatgtggtttaattcgaagcaacgcgaagaaccttaccagggcttgacatcccgctgaccggtgtagagatacacctttcccttcggggacagcggtgacaggtggtgcatggttgtcgtcagctcgtgtcgtgagatgttgggttaagtcccgcaacgagcgcaacccctattgttagttgctacgcaagagcactctagcgagactgccgttgacaaaacggaggaaggtggggacgacgtcaaatcatcatgccccttatgtcctgggccacacacgtactacaatggtggtcaacagagggaagcaatcccgcgaggaggagcaaacccctaaaagccatcccagttcggattgcaggctgcaactcgcctgtatgaagttggaatcgctagtaatcgcggatcagcatgccgcggtgaatacgttcccgggccttgtacacaccgcccgtcacaccatgagagtcgggaacacccgaagtccgtagcctaaccgcaaggggggcgcggccgaaggtgggttcgataattggggtgaagtcgtaacaaggtagccgtatcggaaggtgcggctggatcacctccttt

SEQ ID NO: 1609 - DNA, 1529 bp, artificial sequence
  STR02699_Lawsonibacter_sp7
tattgagagtttgatcctggctcaggatgaacgctggcggcgtgcttaacacatgcaagtcgaacggagtgctcatgacagaggattcgtccaatggagtgagttacttagtggcggacgggtgagtaacgcgtgagtaacctgccttggagtggggaataacaggtggaaacatctgctaataccgcatgatgcagttgggtcgcatggctctgactgccaaagatttatcgctctgagatggactcgcgtctgattagctggttggcggggtaacggcccaccaaggcgacgatcagtagccggactgagaggttggccggccacattgggactgagacacggcccagactcctacgggaggcagcagtggggaatattgggcaatgggcgcaagcctgacccagcaacgccgcgtgaaggaagaaggctttcgggttgtaaacttcttttctcagggacgaagcaagtgacggtacctgaggaataagccacggctaactacgtgccagcagccgcggtaatacgtaggtggcgagcgttatccggatttactgggtgtaaagggcgtgtaggcgggactgcaagtcagatgtgaaaaccatgggctcaacctgtggcctgcatttgaaactgtagttcttgagtactggagaggcagacggaattcctagtgtagcggtgaaatgcgtagatattaggaggaacaccagtggcgaaggcggtctgctggacagcaactgacgctgaggcgcgaaagcgtggggagcaaacaggattagataccctggtagtccacgctgtaaacgatggatactaggtgtggggggcctgaccccctccgtgccgcagttaacacaataagtatcccacctggggagtacgatcgcaaggttgaaactcaaaggaattgacgggggcccgcacaagcggtggagtatgtggtttaattcgaagcaacgcgaagaaccttaccagggcttgacatcccggtgaccggtgtagagatacaccttcttcttcggaagcgccggtgacaggtggtgcatggttgtcgtcagctcgtgtcgtgagatgttgggttaagtcccgcaacgagcgcaacccttattgttagttgctacgcaagagcactctagcgagactgccgttgacaaaacggaggaaggtggggacgacgtcaaatcatcatgccccttatgtcctgggccacacacgtactacaatggtggtcaacagagggaagcaagaccgcgaggtggagcaaacccctaaaagccatcccagttcggattgcaggctgcaactcgcctgtatgaagttggaatcgctagtaatcgcggatcagcatgccgcggtgaatacgttcccgggccttgtacacaccgcccgtcacaccatgagagtcgggaacacccgaagtccgtagcctaaccgcaaggggggcgcggccgaaggtgggttcgataattggggtgaagtcgtaacaaggtagccgtatcggaaggtgcggctggatcacctccttt

SEQ ID NO: 1610 - DNA, 1493 bp, artificial sequence
  ERR1022336_02676_Lawsonibacter_sp7
attccggttgatcctgccggacccgaccgctatcggggtagggataagccatgggagtcttacactcccgggtaagggagtgtggcggacggctgagtaacacgtggctaacctaccctcgggacggggataaccccgggaaactggggataatccccgatagggaaggagtcctggaatggttccttccctaaagggctataggctatttcccgtttgtagccgcccgaggatggggctacggcccatcaggctgtcggtggggtaaaggcccaccgaacctataacgggtaggggccgtggaagcgggagcctccagttgggcactgagacaagggcccaggccctacggggcgcaccaggcgcgaaacgtccccaatgcgcgaaagcgtgagggcgctaccccgagtgcctccgcaaggaggcttttccccgctctaaaaaggcgggggaataagcggggggcaagtctggtgtcagccgccgcggtaataccagctccgcgagtggtcggggtgattactgggcctaaagcgcctgtagccggcccaccaagtcgccccttaaagtccccggctcaaccggggaactgggggcgatactggtgggctagggggcgggagaggcggggggtactcccggagtaggggcgaaatccttagataccgggaggaccaccagtggcggaagcgccccgctagaacgcgcccgacggtgagaggcgaaagccggggcagcaaacgggattagataccccggtagtcccggctgtaaacgatgcgggctaggtgtcgagtaggcttagagcctactcggtgccgcagggaagccgttaagcccgccgcctggggagtacggtcgcaagactgaaacttaaaggaattggcgggggagcaccacaaggggtggaacctgcggctcaattggagtcaacgcctggaatcttaccgggggagaccgcagtatgacggccaggctaacgaccttgcctgactcgcggagaggaggtgcatggccgtcgccagctcgtgttgtgaaatgtccggttaagtccggcaacgagcgagacccccacccctagttggtattctggactccggtccagaaccacactagggggactgccggcgtaagccggaggaaggagggggccacggcaggtcagcatgccccgaaactcccgggccgcacgcgggttacaatggcagggacaacgggatgctacctcgaaagggggagccaatccttaaaccctgccgcagttgggatcgagggctgaaacccgccctcgtgaacgaggaatccctagtaaccgcgggtcaacaacccgcggtgaatacgtccctgctccttgcacacaccgcccgtcgctccacccgagcgagaaaggggtgaggtcccttgcgataagtgggggatcgaactcctttcccgcgaggggggagaagtcgtaacaaggtagccgtaggggaacctgcggctggatcacctca

SEQ ID NO: 1611 - DNA, 1467 bp, artificial sequence; identical to SEQ ID NO: 1317
  ERR1022409_02810_Lawsonibacter_sp7

SEQ ID NO: 1612 - DNA, 1495 bp, artificial sequence
  ERR1022451_03124_Lawsonibacter_sp7
atccggttgatcctgccggacccgaccgctatcggggtggggctaagccatgggagtcgtacgctcccgggcaagggagcgtggcggacggctgagtaacacgtggctaacctaccctgaggagggagataaccccgggaaactggggataatctcccataggcgaggagtcctggaacggttcctcgctgaaaggctcatgggctattccccgctcatgagcgcctcaggatggggctgcggcccatcaggtagttgggggagtaagggccccccaagcctataacgggtaggggccgtgagagcgggagcccccagttgggcactgagacaagggcccaggccctacggggcgcaccaggcgcgaaacgtccccaatgcgcggaagcgtgagggcgccaccccgagtgctcccgtaagggagcttttccccgctctacaaaggcgggggaataagcggggggcaagtctggtgtcagccgccgcggtaataccagccccgcgagtggtcgggactcttactgggcctaaagcgcccgtagccggcccgacaagtcactccttaaagaccccggctcaaccgggggaatgggggtgatactgtcgggctagggggcgggagaggccagcggtactcccggagtaggggcgaaatcctcagatctcgggaggaccaccagtggcgaaagcggctggctagaacgcgcccgacggtgaggggcgaaagccggggcagcaaaagggattagatacccctgtagtcccggctgtaaacaatgcaggctaggtgtcacatgggcttagagcccatgtggtgccgcagggaagccgttaagcctgccgcctggggagtacggtcgcaagactgaaacttaaaggaattggcgggggagcaccacaaggggtggaacctgcggctcaattggagtcaacgcctggaatcttaccaggggagaccgcaggatgacggccaggctaacgaccttgcctgactcgcggagaggaggtgcatggccgtcgccagctcgtgttgtgaaatgtcctgttaagtcaggcaacgagcgagacccccaccactagttggtatcttggtctccgggccgggaccacactagtgggactgccggcgtaagccggaggagggagggggccacggcaggtcagcatgccccgaaacccctgggccgcacgcgggttacaatggcagggacagcgggattccgaccccgaaaggggaaggtaatcccttaaaccctgccgcagttgggatcgagggctgaaactcgccctcgtgaacgaggaatccctagtaaccgcagatcaacaatctgcggtgaatacgtccctgctccttgcacacaccgcccgtcgctccacccgagtaggagaggggtgaggccccttgcctttgggtggggggtcgagcttctctcctgcaaggggggagaagtcgtaacaaggtagccgtaggggaacctgcggctggatcacctca

SEQ ID NO: 1613 - DNA, 1425 bp, artificial sequence
  GCA_900066315_00707_Lawsonibacter_sp7
  misc_feature (1192)..(1192): n is a, c, g, or t
attccggttgatcctgccggaggccattgctatcggagtccgatttagccatgctagttgcacgagttcacactcgtagcatatagctcagtaacacgtggtcaagctaccctgcagacacggacaacctcgggaaactgaggctaatccgcgataccgatcccacgctggaatgccgggatccacaaacgctccggcgctgcaggatgcggctgcggccgattaggtagacggtggggtaacggcccaccgtgccgataatcggtacgggttgtgagagcaagagcccggagacggaatctgagacaagattccgggccctacggggcgcagcaggcgcgaaacctttacactgcacgcaagtgcgataaggggactccgagtgcgagggcatatagtcctcgcttttgagaaccgtaaggcggttctcgaataagagctgggcaagaccggtgccagccgccgcggtaataccggcagctcaagtgatggccaatcttattgggcctaaagcgtccgtagctggccacgaaagtccgtcgggaaatccatctgcccaacagatgggcgtccggcggaaacttcgtggcttgggaccggaaggctcgaggggtacgtccggggtaggagtgaaatcccgtaatcctggacggaccgccgatggcgaaagcacctcgagaagacggatccgacagtgagggacgaaagctagggtctcgaaccggattagatacccgggtagtcctagccgtaaacaatgttcactaggtgtggcacaggctacgagcctgtgctgtgccgtagggaagccgagaagtgaaccgcctgggaagtacgtccgcaaggatgaaacttaaaggaattggcgggggagcactacaaccggaggagcctgcggtttaattggactcaacgccggacatctcaccagctccgactacagtaatgacgatcaggttgatgaccttatcacgagctgtagagaggaggtgcatggccgccgtcagctcgtaccgtgaggcgtcctgttaagtcaggcaacgagcgagacccacacatctaattgccagcagcagttccgactggctgggtacattagatggactgccagtgccaaactggaggaaggaatgggcaacggtaggtcagtatgccccgaatgagctgggctacacgcgggctacaatggccnggtcgtagttcggattgagggctgaaactcgccctcatgaagctggattcggtagtaatcgcatttcacaagagtgcggtgaatacgtccctgctccttgcacacaccgcccgtcaaagcacccgagtgaggtccggatgaggctatcgcaagatagtcgaatctgggcttcgcaagggggcttaagtcgtaacaaggtagccgtaggggaatctgcggctggatcacctcct

SEQ ID NO: 1614 - DNA, 1473 bp, artificial sequence
  GCA_900066645_02766_Lawsonibacter_sp7
attccggttgatcctgccggaggtcattgctattggagtccgatttagccatgctagttgcacgggtttagacccgtagcagatagctcagtaacacgtggccaaactaccctatggatccggataacctcgggaaactgaggctaatccggaataggattctcaggctggaactgccgagaattcgaaacgccccggcgccataggatgtggctgcggccgattaggtagacggtggggtaacggcccaccgtgccagtaatcggtacgggttgtgagagcaagagcccggagacggtatctgagacaagataccgggccctacggggcgcagcaggcgcgaaacctttacactgcacgccagtgcgataaggggactccaagtgcgagggcatatagtcctcgcttttctgtaccgtaaggtggtacaggaataagggctgggcaagaccggtgccagccgccgcggtaataccggcagcccaagtgatgaccgctattattgggcctaaagcgtccgtagctggccacgcaagtccatcgggaaatctgtccgcttaacgggcaggcgtccggtggaaactgcgtggcttgggaccggaagacctgaggggtacgtccggggtaggagtgaaatcccgtaatcctggacggaccaccggtggcgaaagcgcctcaggaagacggatccgacggtgagggacgaaagctcgggtcacgaaccggattagatacccgggtagtccgagctgtaaacgatgtctgctaggtgtgacacaggctacgagcctgtgttgtgccgtagggaagccgtgaagcagaccgcctgggaagtacgtccgcaaggatgaaacttaaaggaattggcgggggagcactacaaccggaggagcctgcggtttaattggactcaacgccggacatctcaccagcatcgacagtagcaatgaagatcagcctgatgagcttattggagctactgagaggaggtgcatggccgccgtcagctcgtaccgtgaggcgtcctgttaagtcaggcaacgagcgagacccgcactcctaattgccagcaacacccttgtggtggttgggtacattaggaggactgccagtgccaaactggaggaaggaacgggcaacggtaggtcagtatgccccgaatgtgctgggcgacacgcgggctacaatggccgagacagtgggacgcaacgccgaaaggcgacgctaatctccgaaactcggtcgtagttcggattgcggattgaaactcatccgcatgaagctggattcggtagtaatcgcgcctcagaagggcgcggtgaatacgtccctgctccttgcacacaccgcccgtcaaagcacccgagtggggtccggatgaggccggtgcaacgccggtcgaatctgggctccgcaagggggcttaagtcgtaacaaggtagccgtaggggaatctgcggctggatcacctcc

SEQ ID NO: 1615 - DNA, 1488 bp, artificial sequence
  GCA_900066875_00394_Lawsonibacter_sp7
attccggttgatcctgccggaggccactgctatgggggtccgactaagccatgcgagtcatggggcgcgctctgcgcgcaccggcggacggctcagtaacacgtcggtaacctaccctcgggagggggataaccccgggaaactggggctaatcccccataggcctggggtactggaaggtccccaggccgaaaggggctctgcccgcccgaggatgggccggcggccgattaggtagttggtggggtaacggcccaccaagccgaagatcggtacgggccatgagagtgggagcccggagatggacactgagacacgggtccaggccctacggggcgcagcaggcgcgaaacctccgcaatgcgggaaaccgcgacggggggacccccagtgccgtggcacagccacggcttttccggagtgtaaaaagctccgggaataagggctgggcaaggccggtggcagccgccgcggtaataccggcggcccaagtggtggccgctattattgggcctaaagcgtccgtagccgggcccgtaagtccctggcgaaatcccacggctcaaccgtggggcttgctggggatactgcgggccttgggaccgggagaggccgggggtacccctggggtaggggtgaaatcctataatcccagggggaccgccagtggcgaaggcgcccggctggaacgggtccgacggtgagggacgaaggccaggggagcgaaccggattagatacccgggtagtcctggctgtaaaggatgcgggctaggtgtcgggcgagcttcgagctcgcccggtgccggagggaagccgttaagcccgccgcctggggagtacggccgcaaggctgaaacttaaaggaattggcgggggagcactacaaggggtggagcgtgcggtttaattggattcaacgccgggaacctcaccgggggcgacggcaggatgaaggccaggctgaaggtcttgccggacgcgccgagaggaggtgcatggccgccgtcagctcgtaccgtgaggcgtccacttaagtgtggtaacgagcgagacccgcgcccccagttgccagtcctccccgctggggaggaggcactctggggggaccgccggcgataagccggaggaaggagcgggcgacggtaggtcagtatgccccgaaacccccgggctacacgcgcgctacaatgggcgggacaatgggaaccgaccccgaaaggggaagggaatcccctaaacccgccctcagttcggatcgcgggctgcaactcgcccgcgtgaagctggaatccctagtacccgcgtgtcatcatcgcgcggcgaatacgtccctgctccttgcacacaccgcccgtcactccacccgagcggggtccgggtgaggcctggtctcccttcggggaggccgggtcgagcctgggctccgtgaggggggagaagtcgtaacaaggtagccgtaggggaacctacggctcgatcacctcct

SEQ ID NO: 1616 - DNA, 962 bp, artificial sequence
  STR02243_Marvinbryantia_sp5
tttagagagtttgatcctggctcaggatgaacgctggcggcgtgcttaacacatgcaagtcgagcgaagcacttatgaagattcttcggatgattcatttgtgactgagcggcggacgggtgagtaacgcgtgagtaacctgcctcatacaggggaataacagttagaaatgactgctaatgccgcataagcgcacagggccacatggtctggtgtgaaaaactccggtggtatgagatggactcgcgtctgattagctggttggtgaggtaacggcccaccaaggcgacgatcagtagccggcctgagagggtgaacggccacattgggactgagacacggcccaaactcctacgggaggcagcagtggggaatattgcacaatgggggaaaccctgatgcagcgacgccgcgtgagtgaagaagtatttcggtatgtaaagctctatcagcagggaagaaaatgacggtacctgactaagaagccccggctaactacgtgccagcagccgcggtaatacgtagggggcaagcgttatccggatttactgggtgtaaagggagcgtagacggctttgcaagtctgacgtgaaaatccggggctcaaccccggaactgcgttggaaactgtgaggcttgagtgccggagaggtaagcggaattcctagtgtagcggtgaaatgcgtagatattaggaggaacaccagtggcgaaggcggcttactggacggcaactgacgttgaggctcgaaagcgtggggagcaaacaggattagataccctggtagtccacgccgtaaacgatgaatactaggtgttgggggacaaagtccttcggtgccgccgcaaacgcattaagtattccacctggggagtacgttcgcaagaatgaaactcaaaggaattgacggggacccgcacaagcggtggagcatgtggtttaattcgaagcaacgcgaaga

SEQ ID NO: 1617 - DNA, 1530 bp, artificial sequence
  STR02278_Marvinbryantia_sp5
tttagagagtttgatcctggctcaggatgaacgctggcggcgtgcttaacacatgcaagtcgagcgaagcacttatggagattcttcggatgatccatttgtgactgagcggcggacgggtgagtaacgcgtgagtaacctgcctcatacaggggaataacagttagaaatgactgctaatgccgcataagcgcacaggaccacatggtctggtgtgaaaaactccggtggtatgagatggactcgcgtctgattagctagttggtgaggtaacggcccaccaaggcgacgatcagtagccggcctgagagggtgaacggccacattgggactgagacacggcccaaactcctacgggaggcagcagtggggaatattgcacaatgggggaaaccctgatgcagcgacgccgcgtgagtgaagaagtatttcggtatgtaaagctctatcagcagggaagaaaatgacggtacctgactaagaagccccggctaactacgtgccagcagccgcggtaatacgtagggggcaagcgttatccggatttactgggtgtaaagggagcgtagacggctttgcaagtctgacgtgaaaatccggggctcaaccccggaactgcgttggaaactgtgaggcttgagtgccggagaggtaagcggaattcctagtgtagcggtgaaatgcgtagatattaggaggaacaccagtggcgaaggcggcttactggacggcaactgacgttgaggctcgaaagcgtggggagcaaacaggattagataccctggtagtccacgccgtaaacgatgaatactaggtgttgggggacaaagtccttcggtgccgccgcaaacgcattaagtattccacctggggagtacgttcgcaagaatgaaactcaaaggaattgacggggacccgcacaagcggtggagcatgtggtttaattcgaagcaacgcgaagaaccttaccaagtcttgacatcgattcgacgggactgtaatgagtcctttcccttcggggacgaagaagacaggtggtgcatggttgtcgtcagctcgtgtcgtgagatgttgggttaagtcccgcaacgagcgcaacccttatcttcagtagccagcaagtgaagttgggcactctggagagactgccagggacaacctggaggaaggtggggatgacgtcaaatcatcatgccccttatgacttgggctacacacgtgctacaatggcgtaaacaaagggaagcagccctgtgaaggtgagcaaatcccaaaaataacgtctcagttcggattgtagtctgcaactcgactacatgaagctggaatcgctagtaatcgcgaatcagaatgtcgcggtgaatacgttcccgggtcttgtacacaccgcccgtcacaccatgggagtcggtaacgcccgaagtcagtgacccaaccgaaaggagggagctgccgaaggcgggactggtaactggggtgaagtcgtaacaaggtagccgtatcggaaggtgcggctggatcacctccttt

SEQ ID NO: 1618 - DNA, 1530 bp, artificial sequence
  STR02348_Marvinbryantia_sp5
tttagagagtttgatcctggctcaggatgaacgctggcggcgtgcttaacacatgcaagtcgagcgaagcacttatgatgattcttcggatgaatcatttgtgactgagcggcggacgggtgagtaacgcgtgagtaacctgcctcatacaggggaataacagttagaaatgactgctaatgccgcataagcgcacagggccgcatggcccggtgtgaaaaactccggtggtatgagatggactcgcgtctgattagctagttggcagggtaacggcctaccaaggcgacgatcagtagccggcctgagagggtgaacggccacattgggactgagacacggcccaaactcctacgggaggcagcagtggggaatattgcacaatgggggaaaccctgatgcagcgacgccgcgtgagtgaagaagtatttcggtatgtaaagctctatcagcagggaagaaaatgacggtacctgactaagaagccccggctaactacgtgccagcagccgcggtaatacgtagggggcaagcgttatccggatttactgggtgtaaagggagcgtagacggctttgcaagtctgacgtgaaactccggggctcaactccggaactgcgttggaaactgtaaggcttgagtgccggagaggtaagcggaattcctagtgtagcggtgaaatgcgtagatattaggaggaacaccagtggcgaaggcggcttactggacggcaactgacgttgaggctcgaaagcgtggggagcaaacaggattagataccctggtagtccacgcggtaaacgatgaatactaggtgttgggggacaaagtccttcggtgccgccgcaaacgcattaagtattccacctggggagtacgttcgcaagaatgaaactcaaaggaattgacggggacccgcacaagcggtggagcatgtggtttaattcgaagcaacgcgaagaaccttaccaagtcttgacatcgattcgacgggagtgtaatgactcctttcccttcggggacgaagaagacaggtggtgcatggttgtcgtcagctcgtgtcgtgagatgttgggttaagtcccgcaacgagcgcaacccttatcttcagtagccagcgagtaaggtcgggcactctggagagactgccagggacaacctggaggaaggtggggatgacgtcaaatcatcatgccccttatgacttgggctacacacgtgctacaatggcgtaaacaaagggaagcgaacctgtgagggtgggcaaatcccaaaaataacgtctcagttcggattgtagtctgcaactcgactacatgaagctggaatcgctagtaatcgcgaatcagcatgtcgcggtgaatacgttcccgggtcttgtacacaccgcccgtcacaccatgggagtcggtaacgcccgaagtcagtgacccaaccgcaaggagggagctgccgaaggcgggactggtaactggggtgaagtcgtaacaaggtagccgtatcggaaggtgcggctggatcacctccttt

SEQ ID NO: 1619 - DNA, 1035 bp, artificial sequence
  GCA_900066135_00778_Marvinbryantia_sp5
  misc_feature (2)..(2): n is a, c, g, or t
gntgggcaagaccggtgccagccgccgcggtaataccggcagcacaagtgatgaccgctattattgggcctaaagcgtccgtagctggccactcaagtccatcgggaaatccgcgtgcttaacacgcgggcgtccggtggaaactgagtggcttgggaccggaagaccagaggggtacgtccggggtaggagtgaaatcccgtaatcctggacggaccaccggtggcgaaagcgcctctggaagacggatccgacggtgagggacgaaagctcgggtcacgaaccggattagatacccgggtagtccgagctgtaaacgatgtctgctaggtgtgacacaggctacgagcctgtgttgtgccgtagggaagccgtgaagcagaccgcctgggaagtacgtccgcaaggatgaaacttaaaggaattggcgggggagcactacaaccggaggagcctgcggtttaattggactcaacgccggacatctcaccagcatcgacaacgtgccgtgaaggtcagtgtgatgagcttactggagccgttgagaggaggtgcatggccgccgtcagctcgtaccgtgaggcgtcctgttaagtcaggcaacgagcgagacccgcactcctaattgccagcaacacccttgtggtggttgggtacattaggaggactgccagtgccaaactggaggaaggaacgggcaacggtaggtcagtatgccccgaatgtgctgggcgacacgcgggctacaatggccaagacagtgggatgcaaccccgaaagggggcgctaatctccgaaacttggtcgtagttcggattgagggctgaaactcgccctcatgaagctggattcggtagtaatcgcgcctcagaagggcgcggtgaatacgtccctgctccttgcacacaccgcccgtcaaagcacccgagtggggtccggatgaggccggcgcaacgccggtcgaatctgggctccgcaagggggcttaagtcgtaacaaggtagccgtaggggaatctgcggctggatcacctcc

SEQ ID NO: 1620 - DNA, 1513 bp, artificial sequence
  GCF_003463065.1_00760_Marvinbryantia_sp5
ttggagagtttgatcctggctcaggacgaacgctggcggcgtgcttaacacatgcaagtcgagcggaaaggcccttcggggtactcgagcggcgaacgggtgagtaacacgtgagtaacctgccctaggctttgggataaccccgggaaaccggggctaataccggatatgactggctgccgcatggtggttggtggaaagatttttcggcttgggatggactcgcggcctatcagcttgttggtggggtaatggcctaccaaggcggcgacgggtagccggcctgagagggcgaccggccacactgggactgagacacggcccagactcctacgggaggcagcagtggggaatcttgcacaatgggcggaagcctgatgcagcgacgccgcgtgagggatgacggccttcgggttgtaaacctctttcagcagggacgaagcgtttgtgacggtacctgcagaagaagcgccggccaactacgtgccagcagccgcggtaagacgtagggcgcgagcgttgtccggatttattgggcgtaaagagctcgtaggcggcttgtcgcgtcgactgtgaaaacccgtggctcaactgcgggcttgcagtcgatacgggcaggctagagttcggtaggggagactggaattcctggtgtagcggtgaaatgcgcagatatcaggaggaacaccggtggcgaaggcgggtctctgggccgatactgacgctgaggagcgaaagcgtggggagcgaacaggattagataccctggtagtccacgctgtaaacgttgggcgctaggtgtggggggcctctccggttctctgtgccgcagctaacgcattaagcgccccgcctggggagtacggccgcaaggctaaaactcaaaggaattgacgggggcccgcacaagcggcggagcatgcggattaattcgatgcaacgcgaagaaccttacctgggtttgacatcgccggaaatccttcagagatggggggtccttcggggccggtgacaggtggtgcatggctgtcgtcagctcgtgtcgtgagatgttgggttaagtcccgcaacgagcgcaacccttgttcgatgttgccagcgcgttatggcggggactcatcgaagactgccggggtcaactcggaggaaggtggggatgacgtcaagtcatcatgccccttatgtccagggcttcacgcatgctacaatggccggtacaatgggctgcgataccgtgaggtggagcgaatcccaaaaagccggtctcagttcggatcggggtctgcaactcgaccccgtgaagtcggagtcgctagtaatcgcagatcagcaacgctgcggtgaatacgttcccgggccttgtacacaccgcccgtcacgtcacgaaagtcggcaacacccgaagccggtggcctaacccttgtggggggagccgtcgaaggtggggctggcgattgggacgaagtcgtaacaaggtagccgtaccggaaggtgcggctggatcacctccttt

SEQ ID NO: 1621 - DNA, 1299 bp, artificial sequence
  STR00973_Murimonas_intestini
  misc_feature (316)..(316): n is a, c, g, or t
  misc_feature (328)..(328): n is a, c, g, or t
gtgagtaacgcgtgggcaacctgccccataccgggggataacagccagaaatggctgctaataccgcataagcgcacagcgccccatggcgcggtgtgaaaaactccggtggtatgggatgggcccgcgtctgattaggtagttggcggggtaacggcccaccaagccgacgatcagtagccgacctgagagggtgaccggccacattgggactgagacacggcccaaactcctacgggaggcagcagtggggaatattgcacaatgggggaaaccctgatgcagcgacgccgcgtgagcgaagaagtatttcggntatgtaaagctnctatcagcagggaagaaaaatgacggtacctgactaagaagccccggctaactacgtgccagcagccgcggtaatacgtagggggcaagcgttatccggatttactgggtgtaaagggagcgtagacggccaggcaagtctgatgtgaaaggcaggggctcaacccctggactgcattggaaactgtcaggctggagtgccggagaggtaagcggaattcctagtgtagcggtgaaatgcgtagatattaggaggaacaccagtggcgaaggcggcttactggacggtaactgacgttgatgctcgaaagcgtggggagcaaacaggattagataccctggtagtccacgccgtaaacgatgaatactaggtgtcggggggcaaagcccttcggtgccgccgcaaacgcattaagtattccacctggggagtacgttcgcaagaatgaaactcaaaggaattgacggggacccgcacaagcggtggagcatgtggtttaattcgaagcaacgcgaagaaccttaccaagccttgacatcccattgaagccagagtaacgtctgacggccttcgggacaatggagacaggtggtgcatggttgtcgtcagctcgtgtcgtgagatgttgggttaagtcccgcaacgagcgcaacccttatcttcagtagccagcacgcggaggtgggcactctggagagactgccagggacaacctggaggaaggtggggatgacgtcaaatcatcatgccccttatggcttgggctacacacgtgctacaatggcgtaaacagagggaagcagccctgcgaaggtgagcgaatcccaaaaataacgtctcagttcggattgtagtctgcaactcgactacatgaagctggaatcgctagtaatcgcgaatcagaatgtcgcggtgaatacgttcccgggtcttgtacacaccgcccgtcacaccatgggagtcagtaacgc

SEQ ID NO: 1622 - DNA, 1432 bp, artificial sequence
  STR00389_Odoribacter_splanchnicus
atgaagagtttgatcctggctcaggatgaacgctagcgacaggcttaacacatgcaagtcgaggggcatcatgaggtagcaataccttgatggcgaccggcgcacgggtgagtaacgcgtatgcaacctgcctgataccggggtatagcccatggaaacgtggattaacaccccatagtacttttatcctgcatgggatgtgagttaaatgttcaaggtatcggatgggcatgcgtcctattagttagttggcggggtaacagcccaccaagacgatgataggtaggggttctgagaggaaggtcccccacattggaactgagacacggtccaaactcctacgggaggcagcagtgaggaatattggtcaatggacgtgagtctgaaccagccaagtcgcgtgagggaagactgccctatgggttgtaaacctcttttataagggaagaataagttctacgtgtagaatgatgcctgtaccttatgaataagcatcggctaactccgtgccagcagccgcggtaatacggaggatgcgagcgttatccggatttattgggtttaaagggtgcgtaggcggtttattaagttagtggttaaatatttgagctaaactcaattgtgccattaatactggtaaactggagtacagacgaggtaggcggaataagttaagtagcggtgaaatgcatagatataacttagaactccgatagcgaaggcagcttaccagactgtaactgacgctgatgcacgagagcgtgggtagcgaacaggattagataccctggtagtccacgccgtaaacgatgctcactggttctgtgcgatatattgtacgggattaagcgaaagtattaagtgagccacctggggagtacgtcggcaacgatgaaactcaaaggaattgacgggggcccgcacaagcggaggaacatgtggtttaattcgatgatacgcgaggaaccttacctgggtttaaatgggaaatgccgtatttggaaacagatattctcttcggagcgtttttcaaggtgctgcatggttgtcgtcagctcgtgccgtgaggtgtcgggttaagtcccataacgagcgcaacccttaccgttagttgctagcatgtaatgatgagcactctaacgggactgccaccgtaaggtgagaggaaggcggggatgacgtcaaatcagcacggcccttacacccagggctacacacgtgttacaatggccggtacagagggccgctaccaggtgactggatgccaatctcaaaagccggtcgtagttcggattggagtctgtaacccgactccatgaagttggattcgctagtaatcgcgcatcagccatggcgcggtgaatacgttcccgggccttgtacacaccgcccgtcaagccatggaagccgggggtgcctgaagtccgtaacc

SEQ ID NO: 1623 - DNA, 1521 bp, artificial sequence
  STR01776_Odoribacter_splanchnicus
atgaagagtttgatcctggctcaggatgaacgctagcgacaggcttaacacatgcaagtcgaggggcatcatgaggtagcaataccttgatggcgaccggcgcacgggtgagtaacgcgtatgcaacctgcctgataccggggtatagcccatggaaacgtggattaacaccccatagtacttttatcctgcctgggatgggagttaaatgttcaaggtatcggatgggcatgcgtcctattagttagttggcggggtaacagcccaccaagacgatgataggtaggggttctgagaggaaggtcccccacattggaactgagacacggtccaaactcctacgggaggcagcagtgaggaatattggtcaatggacgtaagtctgaaccagccaagtcgcgtgagggaagactgccctatgggttgtaaacctcttttataagggaagaataagttctacgtgtagaatgatgcctgtaccttatgaataagcatcggctaactccgtgccagcagccgcggtaatacggaggatgcgagcgttatccggatttattgggtttaaagggtgcgtaggcggtttattaagttagtggttaaatatttgagctaaactcaattgtgccattaatactggtaaactggagtacagacgaggtaggcggaataagttaagtagcggtgaaatgcatagatataacttagaactccgatagcgaaggcagcttaccagactgtaactgacgctgatgcacgagagcgtgggtagcgaacaggattagataccctggtagtccacgccgtaaacgatgctcactggttctgtgcgatatattgtacgggattaagcgaaagtattaagtgagccacctggggagtacgtcggcaacgatgaaactcaaaggaattgacgggggcccgcacaagcggaggaacatgtggtttaattcgatgatacgcgaggaaccttacctgggtttaaatgggaaatgtcgtatttggaaacagatattctcttcggagcgtttttcaaggtgctgcatggttgtcgtcagctcgtgccgtgaggtgtcgggttaagtcccataacgagcgcaacccttaccgttagttgctagcatgtaatgatgagcactctaacgggactgccaccgtaaggtgagaggaaggcggggatgacgtcaaatcagcacggcccttacacccagggctacacacgtgttacaatggccggtacagagggctgctaccaggtgactggatgccaatctcaaaagccggtcgtagttcggattggagtctgtaacccgactccatgaagttggattcgctagtaatcgcgcatcagccatggcgcggtgaatacgttcccgggccttgtacacaccgcccgtcaagccatggaagccgggggtgcctgaagtccgtaaccgcgaggatcggcctagggcaaaactggtaactggggctaagtcgtaacaaggtagccgtaccggaaggtgcggctggaacacctccttt

SEQ ID NO: 1624 - DNA, 1467 bp, artificial sequence
  ERR1203973_03735_Odoribacter_splanchnicus
attccggttgatcctgccggaggccattgctatcggtgtccgatttagccatgcgagttgtacgtttaccgtagcaaactgctcagtaacacgtggccaaactgccctatggaccggaataacctcgggaaactgaggctaattccggataccacattcatcctggaattggagaatgtgcgaaatgctccggcgccataggatgtggctgcggccgattaggtagacggtggggtaacggcccaccgtgccgataatcggtacgggtcatgagagtgagagcccggagacggactctgagacacgagtccgggccctacggggcgcagcaggcgcgaaacctttacactgcacgacagtgcgatagggggacaccgagtgcgagggcatagagccctcgcttttctgaaccgtaaggaggttcaggaacaagggctgggcaagaccggtgccagccgccgcggtaacaccggcagcccaagtgatggccgatattattgggcctaaagcgtccgtagctggccgtgcaagttcgtcgggaaatccactcgcttaacgagtgggcgtccggcgaaaactgctcggcttgggaccggaagatccaaggggtacgtccggggtaggagtgaaatcccgtaatcctggacggaccaccgatggcgaaagcaccttggaaggacggatccgacagtgagggacgaaagctagggtctcgaaccggattagatacccgggtagtcctagccgtaaacgatgctcgctaggtgtggcgcaggctacgagcctgcgctgtgccgtagggaagccgtgaagcgagccgcctgggaagtacgtctgcaaggatgaaacttaaaggaattggcgggggagcactacaaccggaggagcctgcggtttaattggactcaacgccggacatctcaccagctccgacagcagtaatgacggtcaggttgatgaccttacccgacgctgctgagaggaggtgcatggccgccgtcagctcgtaccgtgaggcgtcctgttaagtcaggcaacgagcgagacccgcacctctagttgccagcagcatcttgcgatggctgggtacactagggggactgccgtcgctaagacggaggaaggaacgggcaacggtaggtcagtatgccccgaatgagctgggctacacgcgggctacaatggccaagacagtgggatgcgacaccgagaggtgaagctaatctcctaaacttggtcgtagttcggattgcggactgaaacccgtccgcatgaagctggattcggtagtaatcgcgtgtcagaagcgcgcggtgaatacgtccctgctccttgcacacaccgcccgtcaaagcacccgagtggggtccggatgaggcctggctaccaggtcgaatctgggctccgcaagggggcttaagtcgtaacaaggtagccgtaggggaatctgcggctggatcacctcct

SEQ ID NO: 1625 - DNA, 1475 bp, artificial sequence; identical to SEQ ID NO: 1507
  ERR1204067_03730_Odoribacter_splanchnicus

SEQ ID NO: 1626 - DNA, 898 bp, artificial sequence
  ERR2230125_03836_Odoribacter_splanchnicus
attccggttgatcctgccggaggccattgctattgggattcgatttagccatgctagtcgcacgagttcagactcgtggcgaatagctcagtaacacgtggccaaactacccttcggaacacaataccctcgggaaactgaggctaatagtgtataccgcatcacacctggaatgagtgatgcgccaaacgctccggcgccgaaggatgtggctgcggccgattaggtagacggtggggtaacggcccaccgtgccaataatcggtacgggtcatgagagtgagaacccggagacggaatctgagacaagattccgggccctacggggcgcagcaggcgcgaaacctttacactgcacgacagtgcgataagggaatcccaagtgcgtaggcatagagcctacgcttttgtccaccgtagggaggtggacgaataagggctgggcaagaccggggccagccgccgcggtaataccggcagcccgagtgatggccgatcttattgggcctaaagcgtccgtagctggccgcgcaagtctatcggaaaatccacccgctcaacgggtgggcgtccggtagaaactgcgtggcttgggaccggaaggcgcgacgggtacgtccggggtaggagtgaaatcctgtaatcctggacggaccgccgatggcgaaagcacgtcgcgaagacggatccgacagtgagggacgaaagctagggtctcgaaccggattagatacccgggtagtcctagccgtaaacaatgcctgttaggtgtggctcccactacgagtgggtgctgtgccgtagggaagccgctaaacaggccgcctgggaagtacgtccgcaaggatgaaacttaaaggaattggcgggggagcactacaaccggaggagcctgcgg

SEQ ID NO: 1627 - DNA, 1526 bp, artificial sequence
  GCF_000190535.1_01270_Odoribacter_splanchnicus
tgaagagtttgatcctggctcagattgaacgctggcggcatgccttacacatgcaagtcgaacggcagcgcgggagcaatcctggcggcgagtggcgaacgggtgagtaatacatcggaacgtgtcctgtagtgggggatagcccggcgaaagccggattaataccgcatacgatctacggatgaaagcgggggatcttcggacctcgcgctataggggcggccgatggcggattagctagttggtggggtaaaggcctaccaaggcgacgatccgtagctggtctgagaggacgaccagccacactgggactgagacacggcccagactcctacgggaggcagcagtggggaattttggacaatgggggcaaccctgatccagcaatgccgcgtgtgtgaagaaggccttcgggttgtaaagcacttttgtccggaaagaaatccttttcgataataccgaagggggatgacggtaccggaagaataagcaccggctaactacgtgccagcagccgcggtaatacgtagggtgcgagcgttaatcggaattactgggcgtaaagcgtgcgcaggcggtgatgtaagaccgatgtgaaatccccggcttaacacgggaactgcattggtgactgcatcgctggagtatggcagaggggggtagaattccacgtgtagcagtgaaatgcgtagagatgtggaggaataccgatggcgaaggcagccccctgggccaatactgacgctcatgcacgaaagcgtggggagcaaacaggattagataccctggtagtccacgccctaaacgatgtcaactggttgtcgggccttcattggcttggtaacgtagctaacgcgtgaagttgaccgcacggggagtacggtcgcaagattaaaactcaaaggaattgacggggacccgcacaagcggtggatgatgtggattaattcgatgcaacgcgaaaaaccttacctacccttgacatgtacggaatcctgctgagaggtgggagtgcccgaaagggagccgtaacacaggtgctgcatggctgtcgtcagctcgtgtcgtgagatgttgggttaagtcccgcaacgagcgcaacccttgtccctagttgctacgcaagagcactccagggagactgccggtgacaaaccggaggaaggtggggatgacgtcaagtcctcatggcccttatgggtagggcttcacacgtcatacaatggtcggaacagagggttgccaagccgcgaggtggagccaatcccagaaaaccgatcgtagtccggatcgcagtctgcaactcgactgcgtgaagctggaatcgctagtaatcgcggatcagcatgccgcggtgaatacgttcccgggtcttgtacacaccgcccgtcacaccatgggagtgggttttgccagaagtggctagtctaaccgcaaggaggacggtcaccacggcaggattcatgactggggtgaagtcgtaacaaggtagccgtatcggaaggtgcggctggatcacctccttt

SEQ ID NO: 1628 - DNA, 1523 bp, artificial sequence
  GCF_000190535.1_01899_Odoribacter_splanchnicus
tgaagagtttgatcctggctcagattgaacgctggcggcatgccttacacatgcaagtcgaacggcagcgcgggagcaatcctggcggcgagtggcgaacgggtgagtaatacatcggaacgtgtcctgtagtgggggatagcccggcgaaagccggattaataccgcatacgatctacggatgaaagcgggggatcttcggacctcgcgctataggggcggccgatggcggattagctagttggtggggtaaaggcctaccaaggcgacgatccgtagctggtctgagaggacgaccagccacactgggactgagacacggcccagactcctacgggaggcagcagtggggaattttggacaatgggggcaaccctgatccagcaatgccgcgtgtgtgaagaaggccttcgggttgtaaagcacttttgtccggaaagaaatcctttcgataataccgaagggggatgacggtaccggaagaataagcaccggctaactacgtgccagcagccgcggtaatacgtagggtgcgagcgttaatcggaattactgggcgtaaagcgtgcgcaggcggtgatgtaagaccgatgtgaaatccccgggcttaacctgggaactgcattggtgactgcatcgctggagtatggcagaggggggtagaattccacgtgtagcagtgaaatgcgtagagatgtggaggaataccgatggcgaaggcagccccgggccaatactgacgctcatgcacgaaagcgtggggagcaaacaggattagataccacggtagtccacgccctaaacgatgtcaactggttgtcgggccttcattggcttggtaacgtagctaacgcgtgaagttgaccgcacgggagtacggtcgcaagattaaaactcaaaggaattgacggggacccgcacaagcggtggatgatgtggattaattcgatgcaacgcgaaaaaccttacctacccttgacatgtacggaatcctgctgagaggtgggagtgcccgaaagggagccgtaacacaggtgctgcatggctgtcgtcagctcgtgtcgtgagatgttgggttaagtcccgcaacgagcgcaacccttgtccctagttgctacgcaagagcactccagggagactgccggtgacaaaccggaggaaggtggggatgacgtcaagtcctcatggcccttatgggtagggcttcacacgtcatacaatggtcggaacagagggttgccaagccgcgaggtggagccaatcccagaaaaccgatcgtagtccggatcgcagtctgcaactcgactgcgtgaagctggaatcgctagtaatcgcggatcagcatgccgcggtgaatacgttcccgggtcttgtacacaccgcccgtcacaccatgggagtgggttttgccagaagtggctagtctaaccgcaaggaggacggtcaccacggcaggattcatgactggggtgaagtcgtaacaaggtagccgtatcggaaggtgcggctggatcacctccttt

SEQ ID NO: 1629 - DNA, 1523 bp, artificial sequence
  GCF_000190535.1_01982_Odoribacter_splanchnicus
tgaagagtttgatcctggctcagattgaacgctggcggcatgccttacacatgcaagtcgaacggcagcgcgggagcaatcctggcggcgagtggcgaacgggtgagtaatacatcggaacgtgtcctgtagtgggggatagcccggcgaaagccggattaataccgcatacgatctacggatgaaagcgggggatcgcaagacctcgcgctataggggcggccgatggcggattagctagttggtggggtaaaggcctaccaaggcgacgatccgtagctggtctgagaggacgaccagccacactgggactgagacacggcccagactcctacgggaggcagcagtggggaattttggacaatgggggcaaccctgatccagcaatgccgcgtgtgtgaagaaggccttcgggttgtaaagcacttttgtccggaaagaaatcctttcgataataccgagagggatgacggtaccggaagaataagcaccggctaactacgtgccagcagccgcggtaatacgtagggtgcgagcgttaatcggaattactgggcgtaaagcgtgcgcaggcggtgatgtaagaccgatgtgaaatccccggcttaactcgggaactgcattggtgactgcatcgctggagtatggcagaggggggtagaattccacgtgtagcagtgaaatgcgtagagatgtggaggaataccgatggcgaaggcagccccctgggccaatactgacgctcatgcacgaaagcgtggggagcaaacaggattagataccctggtagtccacgccctaaacgatgtcaactggttgtcgggccttcattggcttggtaacgtagctaacgcgtgaagttgaccgcctggggagtacggtcgcaagattaaaactcaaaggaattgacggggacccgcacaagcggtggatgatgtggattaattcgatgcaacgcgaaaaaccttacctacccttgacatgtacggaatcctgctgagaggtgggagtgcccgaaagggagccgtaacacaggtgctgcatggctgtcgtcagctcgtgtcgtgagatgttgggttaagtcccgcaacgagcgcaacccttgtccctagttgctacgcaagagcactccagggagactgccggtgacaaaccggaggaaggtggggatgacgtcaagtcctcatggcccttatgggtagggcttcacacgtcatacaatggtcggaacagagggttgcaagccgcgaggtggagccaatcccagaaaaccgatcgtagtccggatcgcagtctgcaactcgactgcgtgaagctggaatcgctagtaatcgcggatcagcatgccgcggtgaatacgttcccgggtcttgtacacaccgcccgtcacaccatgggagtgggttttgccagaagtggctagtctaaccgcaaggaggacggtcaccacggcaggattcatgactggggtgaagtcgtaacaaggtagccgtatcggaaggtgcggctggatcacctccttt

SEQ ID NO: 1630 - DNA, 1521 bp, artificial sequence
  GCF_000190535.1_02193_Odoribacter_splanchnicus
acggagagtttgatcctggctcaggacgaacgctggcggcgtgcttaacacatgcaagtcgaacgatgaagcccttcggggtggattagtggcgaacgggtgagtaacacgtgggcaatctgcccttcactctgggacaagccctggaaacggggtctaataccggataacactctgtcccgcatgggacggggttaaaagctccggcggtgaaggatgagcccgcggcctatcagcttgttggtggggtaatggcctaccaaggcgacgacgggtagccggcctgagagggcgaccggccacactgggactgagacacggcccagactcctacgggaggcagcagtggggaatattgcacaatgggcgaaagcctgatgcagcgacgccgcgtgagggatgacggccttcgggttgtaaacctctttcagcagggaagaagcgaaagtgacggtacctgcagaagaagcgccggctaactacgtgccagcagccgcggtaatacgtagggcgcaagcgttgtccggaattattgggcgtaaagagctcgtaggcggcttgtcacgtcggatgtgaaagcccggggcttaaccccgggtctgcattcgatacgggctagctagagtgtggtaggggagatcggaattcctggtgtagcggtgaaatgcgcagatatcaggaggaacaccggtggcgaaggcggatctctgggccattactgacgctgaggagcgaaagcgtggggagcgaacaggattagataccctggtagtccacgccgtaaacgttgggaactaggtgttggcgacattccacgtcgtcggtgccgcagctaacgcattaagttccccgcctggggagtacggccgcaaggctaaaactcaaaggaattgacggggcccgcacaagcagcggagcatgtggcttaattcgacgcaacgcgaagaaccttaccaaggcttgacatataccggaaagcatcagagatggtgcccccttgtggtcggtatacaggtggtgcatggctgtcgtcagctcgtgtcgtgagatgttgggttaagtcccgcaacgagcgcaacccttgttctgtgttgccagcatgcccttcggggtgatggggactcacaggagactgccggggtcaactcggaggaaggtggggacgacgtcaagtcatcatgccccttatgtcttgggctgcacacgtgctacaatggccggtacaatgagctgcgatgccgcgaggcggagcgaatctcaaaaagccggtctcagttcggattggggtctgcaactcgaccccatgaagtcggagttgctagtaatcgcagatcagcattgctgcggtgaatacgttcccgggccttgtacacaccgcccgtcacgtcacgaaagtcggtaacacccgaagccggtggcccaaccccttgtgggagggagctgtcgaaggtgggactggcgattgggacgaagtcgtaacaaggtagccgtaccggaaggtgcggctggatcacctccttt

SEQ ID NO: 1631 - DNA, 1539 bp, artificial sequence
  GCF_002159415.1_03601_Odoribacter_splanchnicus
ttgaagagtttgatcatggctcagattgaacgctggcggcaggcctaacacatgcaagtcgagcggtaacacaagggagcttgctcctgaggtgacgagcggcggacgggtgagtaatgcctagggatctgcccagtcgagggggataacagttggaaacgactgctaataccgcatacgccctacgggggaaaggaggggaccttcgggccttccgcgattggatgaacctaggtgggattagctagttggtgaggtaatggctcaccaaggcgacgatccctagctgttctgagaggatgatcagccacactgggactgagacacggcccagactcctacgggaggcagcagtggggaatattgcacaatgggggaaaccctgatgcagccatgccgcgtgtgtgaagaaggccttcgggttgtaaagcactttcagtagggaggaaaggtaatagtttaataaactattactgtgacgttacctacagaagaaggaccggctaactccgtgccagcagccgcggtaatacggagggtccgagcgttaatcggaattactgggcgtaaagcgtgcgcaggcggtttgttaagccagatgtgaaatccccgggctcaacctgggaattgcatttggaactggcgaactagagtcttgtagaggggggtagaattccaggtgtagcggtgaaatgcgtagatatctggaggaataccggtggcgaaggcggccccctggacaaagactgacgctcatgcacgaaagcgtggggagcaaacaggattagataccctggtagtccacgccgtaaacgatgtctactcggagtttggtgacttagtcactgggctcccaagctaacgcattaagtagaccgcctggggagtacggccgcaaggttaaaactcaaatgaattgacgggggcccgcacaagcggtggagcatgtggtttaattcgatgcaacgcgaagaaccttacctactcttgacatccacagaagagaccagagatggacttgtgccttcgggaactgtgagacaggtgctgcatggctgtcgtcagctcgtgttgtgaaatgttgggttaagtcccgcaacgagcgcaacccctatccttatttgccagcacgtaatggtgggaactctagggagactgccggtgataaaccggaggaaggtggggacgacgtcaagtcatcatggcccttacgagtagggctacacacgtgctacaatggcgtatacagagggttgcaaagccgcgaggtggagctaatctcacaaagtacgtcgtagtccggatcggagtctgcaactcgactccgtgaagtcggaatcgctagtaatcgtggatcagaatgccacggtgaatacgttcccgggccttgtacacaccgcccgtcacaccatgggagtgggctgcaaaagaagtgggtagtttaaccttcgggagaacgctcaccactttgtggttcatgactggggtgaagtcgtaacaaggtagccctaggggaacctggggctggatcacctcctt

SEQ ID NO: 1632 - DNA, 1515 bp, artificial sequence
  GCF_002161635.1_03479_Odoribacter_splanchnicus
atgaagagtttgatcctggctcaggatgaacgctagcggcaggcctaacacatgcaagtcgaggggtaacagggagcttgctccgctgacgaccggcgcacgggtgcgcaacgcgtatgcaatctacctcttactaagggatagcccagagaaatttggattaatatcttatgtggtatatgactggcatcagttatatattaaaggttacggtaagagatgagcatgcgtcccattagttagttggtgtggtaacggcacaccaagacttcgatgggtaggggtcctgagagggagatcccccacactggtactgagacacggaccagactcctacgggaggcagcagtgaggaatattggacaatggacggaagtctgatccagccatgccgcgtgtaggaagactgccctatgggttgtaaactacttttatacaggaagaataagatctacgtgtagattgatgacggtactgtaagaataaggaccggctaactccgtgccagcagccgcggtaatacggagggtccgagcgttatccggaattattgggtttaaagggtccgtaggcgggctgttaagtcagaggtgaaatgctgcggctcaaccgtatgcactgcctttgatactggcggtcttgagttatagtgaagtggctagaataagtagtgtagcggtgaaatgcatagatattacttagaataccgattgcgaaggcaggtcactaactatacactgacgctgatggacgaaagcgtgggtagcgaacaggattagataccctggtagtccacgccgtaaacgatggatactagctgttcggttttcggactgagcggccaagcgaaagtgataagtatcccacctggggagtacgttcgcaagaatgaaactcaaaggaattgacgggggcccgcacaagcggtggagcatgtggtttaattcgatgatacgcgaggaaccttaccagggcttaaatgtagattgacaggtttagagatagacttttcttcggacaatttacaaggtgctgcatggttgtcgtcagctcgtgccgtgaggtgtcaggttaagtcctataacgagcgcaacccctgtcgttagttgccagcatgtaatgatggggactctaacgagactgccggtgcaaaccgtgaggaaggtggggatgacgtcaaatcatcacggcccttacgtcctgggccacacacgtgctacaatggccggtacagagagcagccatctggcaacagagagcgaatctataaaaccggtcacagttcggatcggggtctgcaactcgaccccgtgaagctggaatcgctagtaatcggatatcagccatgatccggtgaatacgttcccgggccttgtacacaccgcccgtcaagccatggaagccgggagtgcctgaagtccgtcaccgtaaggagcggcctagggcaagatcggtaactagggctaagtcgtaacaaggtagccgtaccggaaggtgcggctggaacacctcctt

SEQ ID NO: 1633 - DNA, 1513 bp, artificial sequence
  GCF_003462805.1_00795_Odoribacter_splanchnicus
ttggagagtttgatcctggctcaggacgaacgctggcggcgtgcttaacacatgcaagtcgagcggaaaggcccttcggggtactcgagcggcgaacgggtgagtaacacgtgagtaacctgccccaggctttgggataaccccgggaaaccggggctaataccggatatgactggctgccgcatggtggttggtggaaagatttttcggcttgggatggactcgcggcctatcagcttgttggtggggtaatggcctaccaaggcggcgacgggtagccggcctgagagggcgaccggccacactgggactgagacacggcccagactcctacgggaggcagcagtggggaatcttgcacaatgggcggaagcctgatgcagcgacgccgcgtgagggatgacggccttcgggttgtaaacctctttcagcagggacgaagcgtttgtgacggtacctgcagaagaagcgccggccaactacgtgccagcagccgcggtaagacgtagggcgcgagcgttgtccggatttattgggcgtaaagagctcgtaggcggcttgtcgcgtcgactgtgaaaacccgtggctcaacttcgggcttgcagtcgatacgggcaggctagagttcggtaggggagactggaattcctggtgtagcggtgaaatgcgcagatatcaggaggaacaccggtggcgaaggcgggtctctgggccgatactgacgctgaggagcgaaagcgtggggagcgaacaggattagataccctggtagtccacgctgtaaacgttgggcgctaggtgtggggggcctctccggttctctgtgccgcagctaacgcattaagcgccccgcctggggagtacggccgcaaggctaaaactcaaaggaattgacgggggcccgcacaagcggcggagcatgcggattaattcgatgcaacgcgaagaaccttacctgggtttgacatcgccggaaatccttcagagatggggggtccttcggggccggtgacaggtggtgcatggctgtcgtcagctcgtgtcgtgagatgttgggttaagtcccgcaacgagcgcaacccttgttcgatgttgccagcgcgttatggcggggactcatcgaagactgccggggtcaactcggaggaaggtggggatgacgtcaagtcatcatgccccttatgtccagggcttcacgcatgctacaatggccggtacaatgggctgcgataccgtgaggtggagcgaatcccaaaaagccggtctcagttcggatcggggtctgcaactcgaccccgtgaagtcggagtcgctagtaatcgcagatcagcaacgctgcggtgaatacgttcccgggccttgtacacaccgcccgtcacgtcacgaaagtcggcaacacccgaagccggtggcctaacccttgtggggggagccgtcgaaggtggggctggcgattgggacgaagtcgtaacaaggtagccgtaccggaaggtgcggctggatcacctccttt

SEQ ID NO: 1634 - DNA, 1541 bp, artificial sequence
  GCF_003463405.1_01710_Odoribacter_splanchnicus
ttgaagagtttgatcatggctcagattgaacgctggcggcaggcctaacacatgcaagtcgggcggtaacaggaaagggcttttgcatttttgctgacgagcggcggacgggtgagtaatgtctggggatctgcccggtagagggggataaccactggaaatggtggctaataccgcataacctctttggagcaaagtgggggaccttcgggcctcacgctatcggatgaacccagatgggattagctagtaggtggggtaagggctcacctaggcgacgatccctagctggtctgagaggatgaccagccacactgggactgagacacggcccagactcctacgggaggcagcagtggggaatattgcacaatgggcgcaagcctgatgcagccatgccgcgtgtatgaagaaggccttcgggttgtaaagtactttcagcggggaggaaggcgtgagtctgaacagggctcacgattgacgttacccgcagaagaagcaccggctaactccgtgccagcagccgcggtaatacggagggtgcaagcgttaatcggaattactgggcgtaaagcgcacgcaggcggccaattaagttagatgtgaaatccccgggcttaacccgggaacggcatctaagactggttggctggagtctcgtagaggggggtagaattccacgtgtagcggtgaaatgcgtagagatgtggaggaataccggtggcgaaggcggccccctggacgaagactgacgctcaggtgcgaaagcgtggggagcaaacaggattagataccctggtagtccacgccgtaaacgatgtcgatttggaggttgtgcccttgaggtgtggcttccggagctaacgcgttaaatcgaccgcctggggagtacggtcgcaagattaaaactcaaatgaattgacgggggcccgcacaagcggtggagcatgtggtttaattcgatgcaacgcgaagaaccttacctactcttgacatccacggaatttggcagagatgctgaagtgccttcgggaaccgtgagacaggtgctgcatggctgtcgtcagctcgtgttgtgaaatgttgggttaagtcccgcaacgagcgcaacccttatcctttgttgccagcacattatggtgggaactcaagggagactgccggtgataaaccggaggaaggtggggatgacgtcaagtcatcatggcccagacgagtagggctacacacgtgctacaatggcggatacaaagagaagcgacctcgcgagagcaagcggaactcataaagtctgtcgtagtccggattggagtctgcaactcgactccatgaagtcggaatcgctagtaatcgtagatcagcatgctacggtgaatacgttcccgggccttgtacacaccgcccgtcacaccatgggagtgggtggcaaaagaagtcggtagcttaacctgcgggagggcgctgaccactttgtgactcatgactggggtgaagtcgtaacaaggtaaccgtaggggaacctgcggttggatcacctcctt

SEQ ID NO: 1635 - DNA, 1548 bp, artificial sequence
  GCF_003464465.1_02944_Odoribacter_splanchnicus
attggagagtttgatcctggctcaggacgaacgctggcggcgtgcctaatacatgcaagtcgagcggatctttgggagcttgctcccaaaggttagcggcggacgggtgagtaacacgtgggcaacctgcctatgagactgggataactccgggaaaccggggctaataccggataattcttttctacacatgtagaaaagctgaaagatggtttcggctatcactcatagatgggcccgcggcgcattagctagttggtgaggtaatggctcaccaaggcgacgatgcgtagccgacctgagagggtgatcggccacactgggactgagacacggcccagactcctacgggaggcagcagtagggaatcttccgcaatggacgaaagtctgacggagcaacgccgcgtgagtgatgaaggttttcggatcgtaaaactctgttgttagggaagaacaagtaccggagtaactgccggtaccttgacggtacctaaccagaaagccacggctaactacgtgccagcagccgcggtaatacgtaggtggcaagcgttgtccggaattattgggcgtaaagcgcgcgcaggtggtctcttaagtctgatgtgaaagcccccggctcaaccggggagggtcattggaaactgggagacttgagtgcaggagagaagagtggaattccacgtgtagcggtgaaatgcgtagagatgtggaggaacaccagtggcgaaggcgactctttggcctgtaactgacactgaggcgcgaaagcgtggggagcaaacaggattagataccctggtagtccacgccgtaaacgatgagtgctaagtgttagagggtttccgccctttagtgctgcagcaaacgcattaagcactccgcctggggagtacggccgcaaggctgaaactcaaaggaattgacgggggcccgcacaagcggtggagcatgtggtttaattcgaagcaacgcgaagaaccttaccaggtcttgacatcctctgacaaccctagagatagggcgttccccttcgggggacagagtgacaggtggtgcatggttgtcgtcagctcgtgtcgtgagatgttgggttaagtcccgcaacgagcgcaacccttgatcttagttgccagcattcagttgggcactctaaggtgactgccggtgacaaaccggaggaaggtggggatgacgtcaaatcatcatgccccttatgacctgggctacacacgtgctacaatgggtggtacaaagggcagcaaaaccgcgaggtcgagccaatcccataaaaccactctcagttcggattgtaggctgcaactcgcctacatgaagctggaatcgctagtaatcgcggatcagcatgccgcggtgaatacgttcccgggccttgtacacaccgcccgtcacaccacgagagtttgtaacacccgaagtcggtggggtaaccgtaaggagccagccgcctaaggtgggacagatgattggggtgaagtcgtaacaaggtagccgtatcggaaggtgcggctggatcacctccttt

SEQ ID NO: 1636 - DNA, 1526 bp, artificial sequence
  GCF_003465155.1_03474_Odoribacter_splanchnicus
atggagagtttgatcctggctcaggatgaacgctagcggcaggcttaatacatgcaagtcgaggggcagcgcagtgtagcaatacatgggcggcgaccggcaaacgggtgcggaacacgtacgcaaccttccttcaagcgggggatagctttcggaaacgaaaattaataccccatagtaatgtctgatggcatctgaggacatttaaagatttatcacttgaagatgggcgtgcgcctgattaggtagttggcggggtaacggcccaccaagcctacgatcagtaactggtgtgagagcacgaccagtcacacgggcactgagacacgggcccgactcctacgggaggcagcagtaaggaatattggtcaatggacgcaagtctgaaccagccatgccgcgtggaggatgaaggtcctctggattgtaaacttcttttatcggagaagaaacccacgaattcttttgtggttgacggtacccgatgaataagcaccggctaactccgtgccagcagccgcggtaatacggagggtgcaagcgttatccggattcactgggtttaaagggagcgtaggtgggctggtaagtcagtggtgaaatctccgggcttaactcggaaactgccgttgatactatcagtcttgaatgttgtggaggtaagcggaatatgtcatgtagcggtgaaatgcttagatatgacatagaacaccgatagcgaaggcagcttgctacacaattattgacactgaggctcgaaagcgtggggatcaaacaggattagataccctggtagtccacgccctaaacgatggatactcgacatacgcgatacacagtgtgtgtctgagcgaaagcattaagtatcccacctgggaagtacgaccgcaaggttgaaactcaaaggaattggcgggggtccgcacaagcggtggagcatgtggtttaattcgatgatacgcgaggaaccttacctgggctagaatgcaatttgaccgtgggtgaaagctcattttgtagcaatacacagattgtaaggtgctgcatggctgtcgtcagctcgtgccgtgaggtgttgggttaagtcccgcaacgagcgcaacccccatcattagttgccatcaggtaaagctgggaactctaatgaaactgccgtcgtaagacgcgaggaaggaggggatgatgtcaagtcatcatggcctttatgcccagggctacacacgtgctacaatggaagggacaaagagctgccacttggcaacaaggcgctaatctcaaaaaccctttctcagttcagattggagtctgcaactcgactccatgaagctggaatcgctagtaatcgtatatcagcaatgatacggtgaatacgttcccggaccttgcacacaccgcccgtcaagccatggaagctgggtgtacctaaagtcggtaaccgcaaggagccgcctagggtaaaactagtgactggggctaagtcgtaacaaggtagccgtatcggaaggtgcggctggaatacctccttt

SEQ ID NO: 1637 - DNA, 818 bp, artificial sequence
  GCF_003466925.1_00924_Odoribacter_splanchnicus
  misc_feature (815)..(818): n is a, c, g, or t
ttgaaactggcgggctagagttaggtagaggggagtggaattccgggtgtagcggtgaaatgcgtagatatccggaggaacaccagtggcgaaggcggctccctggacccaaactgacgctgaggcacgaaagcgtgggtagcaaacaggattagataccctggtagtccacgccgtaaacgatgtcgactagccgttgggctcttatggggtttagtggcgcagctaacgcattaagtcgaccgcctggggagtacggccgcaaggttaaaactcaaatgaattgacgggggcccgcacaagcggtggagcatgtggtttaattcgatgcaacgcgaagaaccttacctacccttgacatgtctgaaatccctgagagattggggagtgccttcgggaatcagaacacaggtgctgcatggctgtcgtcagctcgtgtcgtgagatgttgggttaagtcccgtaacgagcgcaacccttgtccttagttgccagcgggtaatgccgggaactctagggagactgccggtgataaaccggaggaaggtggggacgacgtcaagtcatcatggcccttatgggtagggctacacacgtgctacaatggccggtacagagggctgcgaacttgcgaaagtaagctaatcccagaaagccggtcccagtccggattggagtctgcaactcgactccatgaagtcggaatcgctagtaatcgcgaatcagaatgtcgcggtgaatacgttcccgggccttgtacacaccgcccgtcacaccatgggagtgggttgcaaaagaagtaggtagtctaaccnnnn

SEQ ID NO: 1638 - DNA, 1513 bp, artificial sequence
  GCF_003467205.1_02625_Odoribacter_splanchnicus
atggagagtttgatcctggctcaggatgaacgctagcgggaggcctaacacatgcaagccgagcggtatttgtccttcgggacagagagagcggcgcacgggtgcggaacacgtgtgcaacctgcctttatctgggggatagcctttcgaaaggaagattaataccccataatatatagagtggcatcactttgtattgaaagctccggcggatagagatgggcacgcgcaagattagatagttggtagggtaacggcctaccaagtcgatgatctttagggggcctgagagggtgatcccccacactggtactgagacacggaccagactcctacgggaggcagcagtgaggaatattggacaatgggtgagagcctgatccagccatcccgcgtgaaggacgactgccctatgggttgtaaacttcttttgtacagggataaacctttccacgtgtgggaagttgaaggtactgtacgaataagcaccggctaactccgtgccagcagccgcggtaatacggagggtgcaagcgttatccggatttattgggtttaaagggtccgtaggcgggcctgtaagtcagtggtgaaatctcacagctcaactgtgaaactgccattgatactgcaggccttgagtgaatttgaagtggctggaataagtagtgtagcggtgaaatgcatagatattacttagaacaccgattgcgaaggcaggtcactaagattcaactgacgctgatggacgaaagcgtggggagcgaacaggattagataccctggtagtccacgccgtaaacgatgctaactcgtttttgggctttcgggctcagagactaagcgaaagtgataagttagccacctggggagtacgttcgcaagaatgaaactcaaaggaattgacgggggcccgcacaagcggtggattatgtggtttaattcgatgatacgcgaggaaccttaccaaggcttaaatgggaaatgacaggcttagaaataggcttttcttcggacattttccaaggtgctgcatggttgtcgtcagctcgtgccgtgaggtgttaggttaagtcctgcaacgagcgcaacccctgtcactagttgccatcattcagttggggactctagtgagactgcctacgcaagtagagaggaaggtggggatgacgtcaaatcatcacggcccttacgccttgggccacacacgtaatacaatggccggtacagagggcagctacacagcgatgtgatgcaaatctcgaaagccggtctcagttcggattggagtctgcaactcgactctatgaagctggaatcgctagtaatcgcgcatcagccatggcgcggtgaatacgttcccgggccttgtacacaccgcccgtcaagccatggaagtctggggtacctgaagtcggtgaccgtaacaggagctgcctagggtaaaacaggtaactagggctaagtcgtaacaaggtagccgtaccggaaggtgcggctggaacatctcatt

SEQ ID NO: 1639 - DNA, 1493 bp, artificial sequence
  GCF_003469405.1_01234_Odoribacter_splanchnicus
tatggagagtttgatcctggctcagagtgaacgctggcggcgtgcctaatacatgcaagtcgaacgatgaagcttctagcttgctagaagtggattagtggcgcacgggtgagtaatgcataggtaacatgccctttagtctgggatagccactggaaacggtgattaatactagatattccctacgggggaaagtttttcgctaaaggattggcctatgtcctatcagcttgttggtgaggtaatggctcaccaaggctatgacgggtatccggcctgagagggtgatcggacacactggaactgagacacggtccagactcctacgggaggcagcagtagggaatattgctcaatgggggaaaccctgaagcagcaacgccgcgtggaggatgaaggttttcggattgtaaactccttttgttagagaagataatgacggtatctaacgaataagcaccggctaactccgtgccagcagccgcggtaatacggagggtgcaagcgttactcggaatcactgggcgtaaagagcgcgtaggcggggtagcaagtcagatgtgaaatcctatggcttaactatagaactgcatttgaaactgttactctagagtatgggagaggtaggtggaattcttggtgtaggggtaaaatccgtagagatcaagaggaatactcattgcgaaggcgacctgctggaacattactgacgctgatgcgcgaaagcgtggggagcaaacaggattagataccctggtagtccacgccctaaacgatgaatgctagttgttgtgaggcttgtccttgcagtaatgcagctaacgcattaagcattccgcctggggagtacggtcgcaagattaaaactcaaaggaatagacggggacccgcacaagcggtggagcatgtggtttaattcgaggatacgcgaagaaccttacctaggcttgacattgatagaatctactagagatagtggagtgcccttcggggagcttgaaaacaggtgctgcacggctgtcgtcagctcgtgtcgtgagatgttgggttaagtcccgcaacgagcgcaaccctcgtccttagttgctagcagttcggctgagcactctaaggagactgccttcgtaaggaggaggaaggtgaggacgacgtcaagtcatcatggcccttacgcctagggctacacacgtgctacaatggggtgcacaaagagatgcaatactgtgaagtggagccaatctcaaaaacatctctcagttcggattgtagtctgcaactcgactacatgaagctggaatcgctagtaatcgtgaatcagccatgtcacggtgaatacgttcccgggtcttgtactcaccgcccgtcacaccatgggagttgtatttgccttaagtcggaatgctaaactggctaccgcccacggcagatgcagcgactggggtgaagtcgtaacaaggtaaccgtaggtgaacctgcggttggatcacctcctt

SEQ ID NO: 1640 - DNA, 1448 bp, artificial sequence
  GCF_003474785.1_02022_Odoribacter_splanchnicus
tgatttagcggcggacgggtgagtaatgcgtaggaagctgcccgatagagggggataccagttggaaacgactgttaataccgcataatgtctacggaccaaagtatgggaccttcgggccatacactatcggatgcgcctacgtgggattagctagttggtgtggtaatggcgcaccaaggcgacgatccctagctggtttgagaggatgatcagccacactgggactgagacacggcccagactcctacgggaggcagcagtggggaatattggacaatgggcgcaagcctgatccagccatgccgcgtgtgtgaagaaggccttcgggttgtaaagcactttcagcgaggaggaaggggttgtagttaatagctgcaatttttgacgttactcgcagaagaagcaccggctaactccgtgccagcagccgcggtaatacggagggtgcaagcgttaatcggaattactgggcgtaaagcgcacgcaggcggctttttaagtcggatgtgaaagccccgggctcaacctgggaattgcattcgatactggggagctagagtatgtgagaggggggtagaattccaagtgtagcggtgaaatgcgtagagatttggaggaataccagtggcgaaggcggccccctggcacaatactgacgctcaggtgcgaaagcgtggggagcaaacaggattagataccctggtagtccacgccgtaaacgatgtctactagatgttcgtggtcttgtaccgtgagtatcgcagctaacgcattaagtagaccgcctggggagtacggtcgcaagattaaaactcaaatgaattgacgggggcccgcacaagcggtggagcatgtggtttaattcgacgcaacgcgaagaaccttacctactcttgacatctacggaagttagcagagatgctgatgtgccttcgggaaccgtaagacaggtgctgcatggctgtcgtcagctcgtgttgtgaaatgttgggttaagtcccgcaacgagcgcaacccttatccttagttgccagcacgtaatggtgggaactctagggagactgccggtgataaaccggaggaaggtggggacgacgtcaagtcatcatggcccttacgagtagggctacacacgtgctacaatggtacgtacagagggaggcaagctggcgacagtgagcggatctcataaagcgtatcgtagtccggattggagtctgcaactcgactccatgaagtcggaatcgctagtaatcgtgaatcagaatgtcacggtgaatacgttcccgggccttgtacacaccgcccgtcacaccatgggagtgggttgcaaaagaagtaggtagcttaaccttcgggagggcgcttaccactttgtgattcatgactggggtgaagtcgtaacaaggtaaccgtaggggaacctgcggttggatcacctcctt

SEQ ID NO: 1641 - DNA, 1532 bp, artificial sequence
  GCF_900187175.1_01265_Odoribacter_splanchnicus
tgaagagtttgatcatggctcagattgaacgctggcggcaggcctaacacatgcaagtcgagcggtagagagaagcttgcttctcttgagagcggcggacgggtgagtaatgcctaggaatctgcctggtagtgggggataacgttcggaaacgaacgctaataccgcatacgtcctacgggagaaagcaggggaccttcgggccttgcgctatcagatgagcctaggtcggattagctagttggtggggtaatggctcaccaaggcgacgatccgtaactggtctgagaggatgatcagtcacactggaactgagacacggtccagactcctacgggaggcagcagtggggaatattggacaatgggcgaaagcctgatccagccatgccgcgtgtgtgaagaaggtcttcggattgtaaagcactttaagttgggaggaagggccattacctaatacgtgatggttttgacgttaccgacagaataagcaccggctaactctgtgccagcagccgcggtaatacagagggtgcaagcgttaatcggaattactgggcgtaaagcgcgcgtaggtggttcgttaagttggatgtgaaatccccgggctcaacctgggaactgcattcaaaactgtcgagctagagtatggtagagggtggtggaatttcctgtgtagcggtgaaatgcgtagatataggaaggaacaccagtggcgaaggcgaccacctggactgatactgacactgaggtgcgaaagcgtggggagcaaacaggattagataccctggtagtccacgccgtaaacgatgtcaactagccgttgggagccttgagctcttagtggcgcagctaacgcattaagttgaccgcctggggagtacggccgcaaggttaaaactcaaatgaattgacgggggcccgcacaagcggtggagcatgtggtttaattcgaagcaacgcgaagaaccttaccaggccttgacatccaatgaactttccagagatggattggtgccttcgggaacattgagacaggtgctgcatggctgtcgtcagctcgtgtcgtgagatgttgggttaagtcccgtaacgagcgcaacccttgtccttagttaccagcacgttatggtgggcactctaaggagactgccggtgacaaaccggaggaaggtggggatgacgtcaagtcatcatggcccttacggcctgggctacacacgtgctacaatggtcggtacagagggttgccaagccgcgaggtggagctaatcccataaaaccgatcgtagtccggatcgcagtctgcaactcgactgcgtgaagtcggaatcgctagtaatcgcgaatcagaatgtcgcggtgaatacgttcccgggccttgtacacaccgcccgtcacaccatgggagtgggttgcaccagaagtagctagtctaaccttcgggaggacggttaccacggtgtgattcatgactggggtgaagtcgtaacaaggtagccgtaggggaacctgcggctggatcacctcctt

SEQ ID NO: 1642 - DNA, 1532 bp, artificial sequence
  GCF_900187175.1_01893_Odoribacter_splanchnicus
tgaagagtttgatcatggctcagattgaacgctggcggcaggcctaacacatgcaagtcgagcggatgaaaggagcttgctcctggattcagcggcggacgggtgagtaatgcctaggaatctgcctggtagtgggggacaacgtttcgaaaggaacgctaataccgcatacgtcctacgggagaaagcaggggaccttcgggccttgcgctatcagatgagcctaggtcggattagctagttggtgaggtaatggctcaccaaggcgacgatccgtaactggtctgagaggatgatcagtcacactggaactgagacacggtccagactcctacgggaggcagcagtggggaatattggacaatgggcgaaagcctgatccagccatgccgcgtgtgtgaagaaggtcttcggattgtaaagcactttaagttgggaggaagggttgtagattaatactctgcaattttgacgttaccgacagaataagcaccggctaactctgtgccagcagccgcggtaatacagagggtgcaagcgttaatcggaattactgggcgtaaagcgcgcgtaggtggttcgttaagttggatgtgaaatccccgggctcaacctgggaactgcatccaaaactggcgagctagagtatggtagagggtggtggaatttcctgtgtagcggtgaaatgcgtagatataggaaggaacaccagtggcgaaggcgaccacctggactgatactgacactgaggtgcgaaagcgtggggagcaaacaggattagataccctggtagtccacgccgtaaacgatgtcaactagccgttgggagccttgagctcttagtggcgcagctaacgcattaagttgaccgcctggggagtacggccgcaaggttaaaactcaaatgaattgacgggggcccgcacaagcggtggagcatgtggtttaattcgaagcaacgcgaagaaccttaccaggccttgacatccaatgaactttccagagatggattggtgccttcgggaacattgagacaggtgctgcatggctgtcgtcagctcgtgtcgtgagatgttgggttaagtcccgtaacgagcgcaacccttgtccttagttaccagcacgtaatggtgggcactctaaggagactgccggtgacaaaccggaggaaggtggggatgacgtcaagtcatcatggcccttacggcctgggctacacacgtgctacaatggtcggtacaaagggttgccaagccgcgaggtggagctaatcccataaaaccgatcgtagtccggatcgcagtctgcaactcgactgcgtgaagtcggaatcgctagtaatcgcgaatcagaatgtcgcggtgaatacgttcccgggccttgtacacaccgcccgtcacaccatgggagtgggttgcaccagaagtagctagtctaaccttcggggggacggttaccacggtgtgattcatgactggggtgaagtcgtaacaaggtagccgtaggggaacctgcggctggatcacctcctt

SEQ ID NO: 1643 - DNA, 1534 bp, artificial sequence
  GCF_900187175.1_01973_Odoribacter_splanchnicus
tgaagagtttgatcatggctcagattgaacgctggcggcaggcctaacacatgcaagtcgagcggcagcacgggtacttgtacctggtggcgagcggcggacgggtgagtaatgcctaggaatctgcctggtagtgggggataacgttcggaaacgaacgctaataccgcatacgtcctacgggagaaagcaggggaccttcgggccttgcgctatcagatgagcctaggtcggattagctagttggtgaggtaatggctcaccaaggcgacgatccgtaactggtctgagaggatgatcagtcacactggaactgagacacggtccagactcctacgggaggcagcagtggggaatattggacaatgggcgaaagcctgatccagccatgccgcgtgtgtgaagaaggtcttcggattgtaaagcactttaagttgggaggaagggcagttacctaatacgtaattgttttgacgttaccgacagaataagcaccggctaactctgtgccagcagccgcggtaatacagagggtgcaagcgttaatcggaattactgggcgtaaagcgcgcgtaggtggttcgttaagttggatgtgaaatccccgggctcaacctgggaactgcattcaaaactgtcgagctagagtatggtagagggtggtggaatttcctgtgtagcggtgaaatgcgtagatataggaaggaacaccagtggcgaaggcgaccacctggactgatactgacactgaggtgcgaaagcgtggggagcaaacaggattagataccctggtagtccacgccgtaaacgatgtcaactagccgttgggagccttgagctcttagtggcgcagctaacgcattaagttgaccgcctggggagtacggccgcaaggttaaaactcaaatgaattgacgggggcccgcacaagcggtggagcatgtggtttaattcgaagcaacgcgaagaaccttaccaggccttgacatccaatgaactttccagagatggattggtgccttcgggaacattgagacaggtgctgcatggctgtcgtcagctcgtgtcgtgagatgttgggttaagtcccgtaacgagcgcaacccttgtccttagttaccagcacgtaatggtgggcactctaaggagactgccggtgacaaaccggaggaaggtggggatgacgtcaagtcatcatggcccttacggcctgggctacacacgtgctacaatggtcggtacagagggttgccaagccgcgaggtggagctaatcccataaaaccgatcgtagtccggatcgcagtctgcaactcgactgcgtgaagtcggaatcgctagtaatcgcgaatcagaatgtcgcggtgaatacgttcccgggccttgtacacaccgcccgtcacaccatgggagtgggttgcaccagaagtagctagtctaaccttcggggggacggttaccacggtgtgattcatgactggggtgaagtcgtaacaaggtagccgtaggggaacctgcggctggatcacctcctt

SEQ ID NO: 1644 - DNA, 1532 bp, artificial sequence
  GCF_900187175.1_02182_Odoribacter_splanchnicus
tgaagagtttgatcatggctcagattgaacgctggcggcaggcctaacacatgcaagtcgagcggtagagagaagcttgcttctcttgagagcggcggacgggtgagtaatgcctaggaatctgcctggtagtgggggataacgttcggaaacggacgctaataccgcatacgtcctacgggagaaagcaggggaccttcgggccttgcgctatcagatgagcctaggtcggattagctagttggtgaggtaatggctcaccaaggcgacgatccgtaactggtctgagaggatgatcagtcacactggaactgagacacggtccagactcctacgggaggcagcagtggggaatattggacaatgggcgaaagcctgatccagccatgccgcgtgtgtgaagaaggtcttcggattgtaaagcactttaagttgggaggaagggcagttacctaatacgtgattgttttgacgttaccgacagaataagcaccggctaactctgtgccagcagccgcggtaatacagagggtgcaagcgttaatcggaattactgggcgtaaagcgcgcgtaggtggttagttaagttggatgtgaaatccccgggctcaacctgggaactgcattcaaaactgactgactagagtatggtagagggtggtggaatttcctgtgtagcggtgaaatgcgtagatataggaaggaacaccagtggcgaaggcgaccacctggactgatactgacactgaggtgcgaaagcgtggggagcaaacaggattagataccctggtagtccacgccgtaaacgatgtcaactagccgttgggagccttgagctcttagtggcgcagctaacgcattaagttgaccgcctggggagtacggccgcaaggttaaaactcaaatgaattgacgggggcccgcacaagcggtggagcatgtggtttaattcgaagcaacgcgaagaaccttaccaggccttgacatccaatgaactttctagagatagattggtgccttcgggaacattgagacaggtgctgcatggctgtcgtcagctcgtgtcgtgagatgttgggttaagtcccgtaacgagcgcaacccttgtccttagttaccagcacgttatggtgggcactctaaggagactgccggtgacaaaccggaggaaggtggggatgacgtcaagtcatcatggcccttacggcctgggctacacacgtgctacaatggtcggtacagagggttgccaagccgcgaggtggagctaatcccacaaaaccgatcgtagtccggatcgcagtctgcaactcgactgcgtgaagtcggaatcgctagtaatcgcgaatcagaatgtcgcggtgaatacgttcccgggccttgtacacaccgcccgtcacaccatgggagtgggttgcaccagaagtagctagtctaaccttcggggggacggttaccacggtgtgattcatgactggggtgaagtcgtaacaaggtagccgtaggggaacctgcggctggatcacctcctt

SEQ ID NO: 1645 - DNA, 1528 bp, artificial sequence
  GCF_900454195.1_01230_Odoribacter_splanchnicus
tggagagtttgatcctggctcaggatgaacgctagcgataggcttaacacatgcaagtcgaggggcagcatgaacttagcttgctaagtttgatggcgaccggcgcacgggtgcgtaacgcgtatgcaacttgccttacagagggggataacccgttgaaagacggactaataccgcatatacttattcggttgcatgaccgggcaaggaaatatttatagctgtaagataggcatgcgtcccattagctggttggtgaggtaacggctcaccaaggcaacgatgggtaggggaactgagaggtttatcccccacactggtactgagacacggaccagactcctacgggaggcagcagtgaggaatattggtcaatgggcgagagcctgaaccagccaagtcgcgtgaaggaagactgtcctaaggattgtaaacttcttttatacgggaataacgggcgatacgcgtattgctatgaatgtaccgtaagaataagcatcggctaactccgtgccagcagccgcggtaatacggaggatgcgagcgttatccggatttattgggtttaaagggtgcgtaggttgttcggtaagtcagcggtgaaaactgagcgctcaacgttcagcgtgccgttgaaactgccgggcttgagttcagaggcggcaggcggaattcgtggtgtagcggtgaaatgcatagatatcacgaggaactccgattgcgaaggcagcttgccatactgcgactgacactgaagcacgaaggcgtgggtatcaaacaggattagataccctggtagtccacgcagtaaacgatgattactaggagtttgcgatataccgtcaagcttccacagcgaaagcgttaagtaatccacctggggagtacgccggcaacggtgaaactcaaaggaattgacgggggcccgcacaagcggaggaacatgtggtttaattcgatgatacgcgaggaaccttacccgggattgaaatgtagacgacggatggtgaaagccgtcttcccttcggggcgtctatgtaggtgctgcatggttgtcgtcagctcgtgccgtgaggtgtcggcttaagtgccataacgagcgcaacccacatcggtagttgctaacaggtttagctgaggactctaccgagactgccgtcgtaaggcgtgaggaaggtgtggatgacgtcaaatcagcacggcccttacatccggggcgacacacgtgttacaatgggagggacaaagggcagctaccgggcgaccggatgcgaatctcgaaacccttccccagttcggatcggagtctgcaactcgactccgtgaagctggattcgctagtaatcgcgcatcagccatggcgcggtgaatacgttcccgggccttgtacacaccgcccgtcaagccatgggagtcgggggtacctgaagggcgtaaccgcaaggggcgcactagggtaataccggtgactggggctaagtcgtaacaaggtagccgtaccggaaggtgcggctggaacacctccttt

SEQ ID NO: 1646 - DNA, 1482 bp, artificial sequence
  GCF_900454195.1_02156_Odoribacter_splanchnicus
cttgagagtttgatcctggctcagaacgaacgctggcggcaggcttaacacatgcaagtcgagcgccccgcaaggggagcggcagacgggtgagtaacgcgtgggaatctacccttttctacggaataacgcagggaaacttgtgctaataccgtataagcccttcgggggaaagatttatcgggaaaggatgagcccgcgttggattagctagttggtggggtaaaggcctaccaaggcgacgatccatagctggtctgagaggatgatcagccacattgggactgagacacggcccaaactcctacgggaggcagcagtggggaatattggacaatgggcgcaagcctgatccagccatgccgcgtgagtgatgaaggccctagggttgtaaagctctttcaccggtgaagataatgacggtaaccggagaagaagccccggctaacttcgtgccagcagccgcggtaatacgaagggggctagcgttgttcggaattactgggcgtaaagcgcacgtaggcggattgttaagtgaggggtgaaatcccagggctcaaccctggaactgcctttcatactggcaatctagagtccagaagaggtgagtggaattccgagtgtagaggtgaaattcgtagatattcggaggaacaccagtggcgaaggcggctcactggtctggtactgacgctgaggtgcgaaagcgtggggagcaaacaggattagataccctggtagtccacgccgtaaacgatgaatgttagccgtcgggcagtttactgttcggtggcgcagctaacgcattaaacattccgcctggggagtacggtcgcaagattaaaactcaaaggaattgacgggggcccgcacaagcggtggagcatgtggtttaattcgaagcaacgcgcagaaccttaccagcccttgacatcccgatcgcggataggagagatcctatccttcagttcggctggatcggagacaggtgctgcatggctgtcgtcagctcgtgtcgtgagatgttgggttaagtcccgcaacgagcgcaaccctcgcccttagttgccagcattcagttgggcactctaaggggactgccggtgataagccgagaggaaggtggggatgacgtcaagtcctcatggcccttacgggctgggctacacacgtgctacaatggtggtgacagtgggcagcgagaccgcgaggtcgagctaatctccaaaagccatctcagttcggattgcactctgcaactcgagtgcatgaagttggaatcgctagtaatcgcagatcagcatgctgcggtgaatacgttcccgggccttgtacacaccgcccgtcacaccatgggagttggttctacccgaaggtagtgcgctaaccgcaaggaggcagctaaccacggtagggtcagcgactggggtgaagtcgtaacaaggtagccgtaggggaacctgcggctggatcacctccttt

SEQ ID NO: 1647 - DNA, 1528 bp, artificial sequence
  GCF_900454195.1_02543_Odoribacter_splanchnicus
tggagagtttgatcctggctcaggatgaacgctagcgataggcttaacacatgcaagtcgaggggcagcatgaacttagcttgctaagtttgatggcgaccggcgcacgggtgcgtaacgcgtatgcaacttgccttacagagggggataacccgttgaaagacggactaataccgcatatacttattcggttgcatgaccgggcaaggaaatatttatagctgtaagataggcatgcgtcccattagctggttggtgaggtaacggctcaccaaggcaacgatgggtaggggaactgagaggtttatcccccacactggtactgagacacggaccagactcctacgggaggcagcagtgaggaatattggtcaatgggcgagagcctgaaccagccaagtcgcgtgaaggatgactgtcctaaggattgtaaacttcttttatacgggaataacgggcgatacgcgtattgctatgaatgtaccgtaagaataagcatcggctaactccgtgccagcagccgcggtaatacggaggatgcgagcgttatccggatttattgggtttaaagggtgcgtaggttgttcggtaagtcagcggtgaaaactgagcgctcaacgttcagcgtgccgttgaaactgccgggcttgagttcagaggcggcaggcggaattcgtggtgtagcggtgaaatgcatagatatcacgaggaactccgattgcgaaggcagcttgccatactgcgactgacactgaagcacgaaggcgtgggtatcaaacaggattagataccctggtagtccacgcagtaaacgatgattactaggagtttgcgatataccgtcaagcttccacagcgaaagcgttaagtaatccacctggggagtacgccggcaacggtgaaactcaaaggaattgacgggggcccgcacaagcggaggaacatgtggtttaattcgatgatacgcgaggaaccttacccgggattgaaatgtagacgacggatggtgaaagccgtcttcccttcggggcgtctatgtaggtgctgcatggttgtcgtcagctcgtgccgtgaggtgtcggcttaagtgccataacgagcgcaacccacatcggtagttgctaacaggtttagctgaggactctaccgagactgccgtcgtaaggcgtgaggaaggtgtggatgacgtcaaatcagcacggcccttacatccggggcgacacacgtgttacaatgggagggacaaagggcagctaccgggcgaccgggtgcgaatctcgaaacccttccccagttcggatcggagtctgcaactcgactccgtgaagctggattcgctagtaatcgcgcatcagccatggcgcggtgaatacgttcccgggccttgtacacaccgcccgtcaagccatgggagtcgggggtacctgaagggcgtaaccgcaaggggcgcactagggtaataccggtgactggggctaagtcgtaacaaggtagccgtaccggaaggtgcggctggaacacctccttt

SEQ ID NO: 1648 - DNA, 1532 bp, artificial sequence
  GCF_900454195.1_03370_Odoribacter_splanchnicus
ttaagagtttgatcctggctcagattgaacgctggcggcatgcctaacacatgcaagtcgaacggtaacaggtcttcggatgctgacgagtggcggacgggtgagtaatgcgtaggaatctgtctttgagtgggggacaacccagggaaacttgggctaataccgcataagccctgagggggaaagcgggggatcttcggacctcgcgctggaagaggagcctacgtctgattagctagttggtagggtaaaggcctaccaaggcgacgatcggtagctggtctgagaggacgaccagccacactgggactgagacacggcccagactcctacgggaggcagcagtggggaatttttcgcaatgggggcaaccctgacgaagcaatgccgcgtgaatgaagaaggccttcgggttgtaaagttctttcgtggaggacgaaaaggtgggtgctaataacgcctgctgttgacgtgaatccaagaagaagcaccggctaactccgtgccagcagccgcggtaatacggggggtgcaagcgttaatcggaatcactgggcgtaaagggtgcgtaggcggtgcattaggtctgtcgtgaaatccccgggctcaacctgggaatggcggtggaaaccggtgtactagagtatgggagagggtggtggaattccaggtgtagcggtgaaatgcgtagagatctggaggaacatcagtggcgaaggcggccacctggcccaatactgacgctgaggcacgaaagcgtggggagcaaacaggattagataccctggtagtccacgccctaaacgatgaatactagatgtttggtgccaagcgtactgagtgtcgtagctaacgcgataagtattccgcctgggaagtacggccgcaaggttaaaactcaaaggaattgacgggggcccgcacaagcggtggagcatgtggtttaattcgatgcaacgcgaagaaccttacctgggcttgacatgtctggaatcctgcagagatgcgggagtgcccttcggggaatcagaacacaggtgctgcatggctgtcgtcagctcgtgtcgtgagatgttgggttaagtcccgcaacgagcgcaacccttgtccttagttgccagcggttcggccgggcactctagggagactgccggtgacaaaccggaggaaggtggggatgacgtcaagtcctcatggcctttatgtccagggctacacacgtgctacaatggcgcgtacagagggaagccaagccgcgaggtggagcagaccccagaaagcgcgtcgtagttcggattgcagtctgcaactcgactgcatgaagtcggaatcgctagtaatcgcggatcagcatgccgcggtgaatacgttcccgggccttgtacacaccgcccgtcacaccatgggagtggattgtaccagaagccgttagcctaaccttcgggagggcgatgaccacggtatggttcatgactggggtgaagtcgtaacaaggtagccgtaggggaacctgcggctggatcacctccttt

SEQ ID NO: 1649 - DNA, 1518 bp, artificial sequence
  GCF_000158495.1_00012_Oxalobacter_formigenes
atggagagtttgatcctggctcaggacgaacgctggcggcgggtttaacacatgcaagtcgagggacgaagcccacttcggtgggtggaaaccggcgaacgggtgagtaacacgtgaggaatctacccggtacttcgggataaccgcgggaaaccgtggctaataccggatgttccgtttcggtcgcatggccggttcgggaaagctcaggcggtatcggagggcctcgcggcgtatcagcttgttggtggggtaatggcctaccaaggcgacgacgcgtagctggagtgagagctcgaacagccacactgggactgagacacggcccagactcctacgggaggcagcagtggagaatcttgcacaatgggcgcaagcctgatgcagccacgccgcgtgcgggaagaaggccttcgggtcgtaaaccgctttcaggagggaagaagcgcaagtgacggtacctccagaagaaggaccggccaactacgtgccagcagccgcggtaatacgtagggtccgagcgttgtccggaatcattgggcgtaaagcgcatgtaggcggccatgtaagtcggatgtgaaatcccgaggcttaacttcggaactgcatccggtactgcgtggcttgaggaaggtagaggagagtggaattcccggtgtagcggtggaatgcgcagatatcgggaggaacaccagcggcgaaggcggctctctgggcctttcctgacgctgagatgcgaaagcgtgggtagcgaacaggattagataccctggtagtccacgccgtaaacgatgggtgctaggtgtgggggactgttcacgtcttccgtgccgcagctaacgcgttaagcaccccgcctggggactacggccgcaaggctaaaactcaaaggaattgacgggggcccgcacaagcggcggagcatgtggcttaattcgaagcaacgcgaagaaccttacctgggcttgacatacaccgttcagccgtagagatacggtggattcgttcgaggtgtacaggtggtgcatggctgtcgtcagctcgtgtcgtgagatgttgggttaagtcccgcaacgagcgcaacccctgtcctgtgttgccagcacgtaatggtggggactcatgggagactgccggtgtcaaaccggaggaaggtggggatgacgtcaagtcatcatgccccttacgtccagggctgcacacatgctacaatggccggtacagagggctgcgatcccgtgagggggagcgaatcccaaaaagccggtctcagttcggatcgtagtctgcaactcgactgcgtgaagccggagtcgctagtaatcgtggatcagcaacgccacggtgaatacgttcccgggccttgtacacaccgcccgtcacgtcatgaaagtcggtaacacccgaagccggtggcctaacccttttgggagggagccgtcgaaggtgggattggcgattgggacgaagtcgtaacaaggtagccgtaccggaaggtgcggctggatcacctccttt

SEQ ID NO: 1650 - DNA, 1550 bp, artificial sequence
  GCF_002127965.1_02209_Oxalobacter_formigenes
tatggagagtttgatcctggctcaggatgaacgctggcggcgtgcctaatacatgcaagtcgagcgaacagataaggagcttgctcctttgacgttagcggcggacgggtgagtaacacgtgggtaacctacctataagactggaataactccgggaaaccggggctaatgccggataacatgttgaaccgcatggttctacagtgaaagacggtcttgctgtcacttatagatggacccgcgccgtattagctagttggtggggtaacggcctaccaaggcgacgatacgtagccgacctgagagggtgatcggccacactggaactgagacacggtccagactcctacgggaggcagcagtagggaatcttccgcaatgggcgaaagcctgacggagcaacgccgcgtgagtgatgaaggtcttcggatcgtaaagctctgttgttagggaagaacaaatgtgtaagtaactgtgcacatcttgacggtacctaaccagaaagccacggctaactacgtgccagcagccgcggtaatacgtaggtggcaagcgttatccggaattattgggcgtaaagcgcgcgtaggcggttttttaagtctgatgtgaaagcccacggctcaaccgtggagggtcattggaaactggaaaacttgagtgcagaagaggaaagtggaattccatgtgtagcggtgaaatgcgcagagatatggaggaacaccagtggcgaaggcggctttctggtctgcaactgacgctgatgtgcgaaagcgtggggatcaaacaggattagataccctggtagtccacgccgtaaacgatgagtgctaagtgttagggggtttccgccccttagtgctgcagctaacgcattaagcactccgcctggggagtacggtcgcaagactgaaactcaaaggaattgacggggacccgcacaagcggtggagcatgtggtttaattcgaagcaacgcgaagaaccttaccaaatcttgacatcctttgacaactctagagatagagctttcctcttcggaggacaaagtgacaggtggtgcatggttgtcgtcagctcgtgtcgtgagatgttgggttaagtcccgcaacgagcgcaacccttgaacttagttgccatcattaagttgggcactctaagttgactgccggtgacaaaccggaggaaggtggggatgacgtcaaatcatcatgccccttatgatttgggctacacacgtgctacaatggacaatacaaagggcagcgaaaccgcgaggtcaagcaaatcccataaagttgttctcagttcggattgtagtctgcaactcgactacatgaagctggaatcgctagtaatcgtagatcagcatgctacggtgaatacgttcccgggtcttgtacacaccgcccgtcacaccacgagagtttgtaacacccgaagccggtggagtaaccattttggagctagccgtcgaaggtgggacaaatgattggggtgaagtcgtaacaaggtagccgtatcggaaggtgcggctggatcacctccttt

SEQ ID NO: 1651 - DNA, 1558 bp, artificial sequence
  GCF_002127965.1_02298_Oxalobacter_formigenes
tatgagagtttgatcctggctcaggacgaacgctggcggcgtgcctaatacatgcaagtcgaacgcctcttttcccaccggagcttgctccaccgggaaaagaggagtggcgaacgggtgagtaacacgtgggtaacctgcccatcagaagggggtaacacttggaaacaggtgctaataccgtataacaatcgaaaccgcatggtttcgttttgaaaggcgctttacggtgccgctgatggatggacccgcggtgcattagctagttggtgaggtaacggctcaccaaggccacgatgcatagccgacctgagagggtgatcggccacattgggactgagacacggcccaaactcctacgggaggcagcagtagggaatcttcggcaatggacgaaagtctgaccgagcaacgccgcgtgagtgaagaaggttttcggatcgtaaaactctgttgttagagaagaacaagggtgagagtaactgttcaccccttgacggtatctaaccagaaagccacggctaactacgtgccagcagccgcggtaatacgtaggtggcaagcgttgtccggatttattgggcgtaaagcgagcgcaggcggtttcttaagtctgatgtgaaagcccccggctcaaccggggagggtcattggaaactgggagacttgagtgcagaagaggagagtggaattccatgtgtagcggtgaaatgcgtagatatatggaggaacaccagtggcgaaggcggctctctggtctgtaactgacgctgaggctcgaaagcgtggggagcaaacaggattagataccctggtagtccacgccgtaaacgatgagtgctaagtgttggagggtttccgcccttcagtgctgcagctaacgcattaagcactccgcctggggagtacgaccgcaaggttgaaactcaaaggaattgacgggggcccgcacaagcggtggagcatgtggtttaattcgaagcaacgcgaagaaccttaccaggtcttgacatcctttgaccactctagagatagagcttccccttcgggggcaaagtgacaggtggtgcatggttgtcgtcagctcgtgtcgtgagatgttgggttaagtcccgcaacgagcgcaacccttattgttagttgccatcatttagttgggcactctagcaagactgccggtgacaaaccggaggaaggtggggatgacgtcaaatcatcatgccccttatgacctgggctacacacgtgctacaatgggaagtacaacgagtcgcgaagtcgcgaggctaagctaatctcttaaagcttctctcagttcggattgtaggctgcaactcgcctacatgaagccggaatcgctagtaatcgcggatcagcacgccgcggtgaatacgttcccgggccttgtacacaccgcccgtcacaccacgagagtttgtaacacccgaagtcggtgaggtaacctttttggagccagccgcctaaggtgggatagatgattggggtgaagtcgtaacaaggtagccgtatcggaaggtgcggctggatcacctccttt

SEQ ID NO: 1652 - DNA, 1550 bp, artificial sequence; identical to SEQ ID NO: 1650
  GCF_002128345.1_02087_Oxalobacter_formigenes

SEQ ID NO: 1653 - DNA, 1550 bp, artificial sequence
  GCF_002128345.1_02177_Oxalobacter_formigenes
tatggagagtttgatcctggctcaggatgaacgctggcggcgtgcctaatacatgcaagtcgagcgaacagataaggagcttgctcctttgacgttagcggcggacgggtgagtaacacgtgggtaacctacctataagactggaataactccgggaaaccggggctaatgccggataacatgttgaaccgcatggttctacagtgaaagacggtcttgctgtcacttatagatggacccgcgccgtattagctagttggtggggtaacggcctaccaaggcgacgatacgtagccgacctgagagggtgatcggccacactggaactgagacacggtccagactcctacgggaggcagcagtagggaatcttccgcaatgggcgaaagcctgacggagcaacaccgcgtgagtgatgaaggtcttcggatcgtaaagctctgttgttagggaagaacaaatgtgtaagtaactgtgcacatcttgacggtacctaaccagaaagccacggctaactacgtgccagcagccgcggtaatacgtaggtggcaagcgttatccggaattattgggcgtaaagcgcgcgtaggcggttttttaagtctgatgtgaaagcccacggctcaaccgtggagggtcattggaaactggaaaacttgagtgcagaagaggaaagtggaattccatgtgtagcggtgaaatgcgcagagatatggaggaacaccagtggcgaaggcggctttctggtctgcaactgacgctgatgtgcgaaagcgtggggatcaaacaggattagataccctggtagtccacgccgtaaacgatgagtgctaagtgttagggggtttccgccccttagtgctgcagctaacgcattaagcactccgcctggggagtacggtcgcaagactgaaactcaaaggaattgacggggacccgcacaagcggtggagcatgtggtttaattcgaagcaacgcgaagaaccttaccaaatcttgacatcctttgacaactctagagatagagctttcctcttcggaggacaaagtgacaggtggtgcatggttgtcgtcagctcgtgtcgtgagatgttgggttaagtcccgcaacgagcgcaacccttgaacttagttgccatcattaagttgggcactctaagttgactgccggtgacaaaccggaggaaggtggggatgacgtcaaatcatcatgccccttatgatttgggctacacacgtgctacaatggacaatacaaagggcagcaaaaccgcgaggtcaagcaaatcccataaagttgttctcagttcggattgtagtctgcaactcgactacatgaagctggaatcgctagtaatcgtagatcagcatgctacggtgaatacgttcccgggtcttgtacacaccgcccgtcacaccacgagagtttgtaacacccgaagccggtggagtaaccattttggagctagccgtcgaaggtgggacaaatgattggggtgaagtcgtaacaaggtagccgtatcggaaggtgcggctggatcacctccttt

SEQ ID NO: 1654 - DNA, 1510 bp, artificial sequence
  GCF_000177075.1_00903_Prevotella_buccalis
tatggagagtttgatcctggctcagagtgaacgctggcggcgtgcctaatacatgcaagtcgaacgatgaagcaactagcttgctagttgtggattagtggcgcacgggtgagtaaggtatagttaatctgccctacacaagaggacaacagttggaaacgactgctaatactctatactcctatttaacacaagttgaatagggaaagtttttcggtgtaggatgagactatatagtatcagctagttggtgaggtaatggctcaccaaggctatgacgcttaactggtctgagaggatgatcagtcacactggaactgagacacggtccagactcctacgggaggcagcagtagggaatattgcgcaatgggggaaaccctgacgcagcaacgccgcgtggaggatgacacttttcggagcgtaaactccttttcttagggaagaattctgacggtacctaaggaataagcaccggctaactccgtgccagcagccgcggtaatacggagggtgcaagcgttactcggaatcactgggcgtaaagggcgcgtaggcggattatcaagtctcttgtgaaatccaacggcttaaccgttgaactgcttgggaaactggtaatctagagtgggggagaggcagatggaattggtggtgtaggggtaaaatccgtagatatcaccaagaatacccattgcgaaggcgatctgctggaacttaactgacgctaaggcgcgaaagcgtggggagcaaacaggattagataccctggtagtccacgccctaaacgatgtacactagttgttggggtgctagtcatctcagtaatgcagctaacgcattaagtgtaccgcctggggagtacggtcgcaagattaaaactcaaaggaatagacggggacccgcacaagcggtggagcatgtggtttaattcgaagatacgcgaagaaccttacctgggcttgatatcctaagaaccttatagagatatgagggtgctagcttgctagaacttagagacaggtgctgcacggctgtcgtcagctcgtgtcgtgagatgttgggttaagtcccgcaacgagcgcaacccacgtatttagttgctaacggttcggccgagcactctaaatagactgccttcgtaaggaggaggaaggtgtggacgacgtcaagtcatcatggcccttatgcccagggcgacacacgtgctacaatggcatatacaatgagacgcaataccgcgaggtggagcaaatctataaaatatgtcccagttcggattgttctctgcaactcgagagcatgaagccggaatcgctagtaatcgtagatcagccatgctacggtgaatacgttcccgggtcttgtactcaccgcccgtcacaccatgggagttgatttcactcgaagccggaatactaaactagttaccgtccacagtggaatcagcgactggggtgaagtcgtaacaaggtaaccgtaggagaacctgcggttggatcacctcctt

SEQ ID NO: 1655 - DNA, 1532 bp, artificial sequence
  GCF_000479005.1_01247_Prevotella_buccalis
tgaagagtttgatcatggctcagattgaacgctggcggcaggcctaacacatgcaagtcgagcggatgacgggagcttgctccttgattcagcggcggacgggtgagtaatgcctaggaatctgcctggtagtgggggacaacgtttcgaaaggaacgctaataccgcatacgtcctacgggagaaagcaggggaccttcgggccttgcgctatcagatgagcctaggtcggattagctagttggtgaggtaatggctcaccaaggcgacgatccgtaactggtctgagaggatgatcagtcacactggaactgagacacggtccagactcctacgggaggcagcagtggggaatattggacaatgggcgaaagcctgatccagccatgccgcgtgtgtgaagaaggtcttcggattgtaaagcactttaagttgggaggaagggcagtaagttaataccttgctgttttgacgttaccgacagaataagcaccggctaactctgtgccagcagccgcggtaatacagagggtgcaagcgttaatcggaattactgggcgtaaagcgcgcgtaggtggtttgttaagttggatgtgaaagccccgggctcaacctgggaactgcatccaaaactggcaagctagagtacggtagagggtggtggaatttcctgtgtagcggtgaaatgcgtagatataggaaggaacaccagtggcgaaggcgaccacctggactgatactgacactgaggtgcgaaagcgtggggagcaaacaggattagataccctggtagtccacgccgtaaacgatgtcaactagccgttggaatccttgagattttagtggcgcagctaacgcattaagttgaccgcctggggagtacggccgcaaggttaaaactcaaatgaattgacgggggcccgcacaagcggtggagcatgtggtttaattcgaagcaacgcgaagaaccttaccaggccttgacatgcagagaactttccagagatggattggtgccttcgggaactctgacacaggtgctgcatggctgtcgtcagctcgtgtcgtgagatgttgggttaagtcccgtaacgagcgcaacccttgtccttagttaccagcacgtaatggtgggcactctaaggagactgccggtgacaaaccggaggaaggtggggatgacgtcaagtcatcatggcccttacggcctgggctacacacgtgctacaatggtcggtacagagggttgccaagccgcgaggtggagctaatctcacaaaaccgatcgtagtccggatcgcagtctgcaactcgactgcgtgaagtcggaatcgctagtaatcgcgaatcagaatgtcgcggtgaatacgttcccgggccttgtacacaccgcccgtcacaccatgggagtgggttgcaccagaagtagctagtctaaccttcgggaggacggttaccacggtgtgattcatgactggggtgaagtcgtaacaaggtagccgtaggggaacctgcggctggatcacctcctt

SEQ ID NO: 1656 - DNA, 1526 bp, artificial sequence
  GCF_000759185.1_01084_Prevotella_buccalis
tggagagtttgatcctggctcagattgaacgctggcggcatgcctaacacatgcaagtcgaacgaggtgtagcaatacacctagtggcggacgggtgagtaatacgtaggaatctgcctcagagtgggggatagcccggggaaactcggattaataccgcatgatctcgcaagagcaaagcaggggaccgcaaggccttgtgctctgagaggagcctacgtctgattagctagttggcggggtaatggcccaccaaggcgacgatcagtaactggtctgagaggacgatcagtcacaccggaactgagacacggtccggactcctacgggaggcagcagtggggaatattggacaatgggcgaaagcctgatccagcaatgccgcgtgtgtgaagaaggccttcgggttgtaaagcactttagtcagggaagaaaaagctcaagctaatatcttgagtgttgacggtacctgaagaataagcaccggctaactctgtgccagcagccgcggtaatacagagggtgcgagcgttaatcggatttactgggcgtaaagcgtgtgtaggtggctgttcaagtcggttgtgaaatccccgggctcaacctgggaattgcttccgagactgagcggctagagtacggtagagggcggtggaatttccggtgtagcggtgaaatgcgtagatatcggaaggaacaccaatggcgaaggcagccgcctgggcctgtactgacactgagacacgaaagcgtggggatcaaacaggattagataccctggtagtccacgccgtaaacgatgagaacttgacgtcggcatgctctgcgtgtcggtgtcgtagctaacgcgataagttctccgcctggggagtacggccgcaaggttgaaactcaaaggaattgacgggggcccgcacaagcggtggagtatgtggtttaattcgatgcaacgcgaagaaccttacctggccttgacatgctcggaagcctgcagagatgcgggtgtgcccgcaagggaaccgagacacaggtgctgcatggctgtcgtcagctcgtgtcgtgagatgttgggttaagtcccgcaacgagcgcaacccttgcccttagttgcccccattcagttgagcactctaaggggaccgccggtgacaaaccggaggaaggtggggatgacgtcaagtcatcatggcccttatggccagggctacacacgtactacaatgggcagtacagagggtcgccaacccgcgagggggagctaatcccagaaagctgttcgtagtccggatcggagtctgcaactcgactccgtgaagtcggaatcgctagtaatcgccgatcagcatttgcggcggtgaatacgttcccgggccttgtacacaccgcccgtcacaccatggaagtctgttgcaccagaagtgggtagtctaaccgcaaggagggcgcctaccacggtgtggccgatgactggggtgaagtcgtaacaaggtagccgtaggggaacctgcggctggatcacctccttt

SEQ ID NO: 1657 - DNA, 1549 bp, artificial sequence
  GCF_000759185.1_01564_Prevotella_buccalis
tatggagagtttgatcctggctcaggatgaacgctggcggcgtgcctaatacatgcaagtcgagcgaactgacgaggagcttgctcctttgatgttagcggcggacgggtgagtaacacgtgggtaacctacctataagactggaataactccgggaaaccggggctaatgccggataacatgttgaaccgcatggttcaacagtgaaagacggtcttgctgtcacttatagatggacccgcgccgtattagctagttggtaaggtaacggcttaccaaggcgacgatacgtagccgacctgagagggtgatcggccacactggaactgagacacggtccagactcctacgggaggcagcagtagggaatcttccgcaatgggcgaaagcctgacggagcaacgccgcgtgagtgatgaaggtcttcggatcgtaaagctctgttgttagggaagaacatatgtgtaagtaactgtgcacatcttgacggtacctaaccagaaagccacggctaactacgtgccagcagccgcggtaatacgtaggtggcaagcgttatccggaattattgggcgtaaagcgcgcgtaggcggttttttaagtctgatgtgaaagcccacggctcaaccgtggagggtcattggaaactggaaaacttgagtgcagaagaggaaagtggaattccatgtgtagcggtgaaatgcgcagagatatggaggaacaccagtggcgaaggcggctttctggtctgtaactgacgctgaggtgcgaaagcgtggggatcaaacaggattagataccctggtagtccacgccgtaaacgatgagtgctaagtgttagggggtttccgccccttagtgctgcagctaacgcattaagcactccgcctggggagtacggtcgcaagactgaaactcaaaggaattgacggggacccgcacaagcggtggagcatgtggtttaattcgaagcaacgcgaagaaccttaccaaatcttgacatcttttgaccgctctagagatagagttttcctcttcggaggacaaaatgacaggtggtgcatggttgtcgtcagctcgtgtcgtgagatgttgggttaagtcccgcaacgagcgcaacccttaagcttagttgccatcattaagttgggcactctaagttgactgccggtgacaaaccggaggaaggtggggatgacgtcaaatcatcatgccccttatgatttgggctacacacgtgctacaatggacaatacaaagggtagcgaaaccgcgaggtcaagcaaatcccataaagttgttctcagttcggattgtagtctgcaactcgactacatgaagctggaatcgctagtaatcgtagatcagcatgctacggtgaatacgttcccgggtcttgtacacaccgcccgtcacaccacgagagtttgtaacacccgaagccggtggagtaaccattttggagctagccgtcgaaggtgggacaaatgattggggtgaagtcgtaacaaggtagccgtatcggaaggtgcggctggatcacctcctt

SEQ ID NO: 1658 - DNA, 1549 bp, artificial sequence
  GCF_000759185.1_01599_Prevotella_buccalis
tatggagagtttgatcctggctcaggatgaacgctggcggcgtgcctaatacatgcaagtcgagcgaactgacgaggagcttgctcctttgacgttagcggcggacgggtgagtaacacgtgggtaacctacctataagactggaataactccgggaaaccggggctaatgccggataacatgttgaaccgcatggttcaacagtgaaagacggtcttgctgtcacttatagatggacccgcgccgtattagctagttggtaaggtaacggcttaccaaggcgacgatacgtagccgacctgagagggtgatcggccacactggaactgagacacggtccagactcctacgggaggcagcagtagggaatcttccgcaatgggcgaaagcctgacggagcaacgccgcgtgagtgatgaaggtcttcggatcgtaaagctctgttgttagggaagaacatatgtgtaagtaactgtgcacatcttgacggtacctaaccagaaagccacggctaactacgtgccagcagccgcggtaatacgtaggtggcaagcgttatccggaattattgggcgtaaagcgcgcgtaggcggttttttaagtctgatgtgaaagcccacggctcaaccgtggagggtcattggaaactggaaaacttgagtgcagaagaggaaagtggaattccatgtgtagcggtgaaatgtgcagagatatggaggaacaccagtggcgaaggcggctttctggtctgtaactgacgctgaggtgcgaaagcgtggggatcaaacaggattagataccctggtagtccacgccgtaaacgatgagtgctaagtgttagggggtttccgccccttagtgctgcagctaacgcattaagcactccgcctggggagtacggtcgcaagactgaaactcaaaggaattgacggggacccgcacaagcggtggagcatgtggtttaattcgaagcaacgcgaagaaccttaccaaatcttgacatcttttgaccgctctagagatagagttttcctcttcggaggacaaaatgacaggtggtgcatggttgtcgtcagctcgtgtcgtgagatgttgggttaagtcccgcaacgagcgcaacccttaagcttagttgccatcattaagttgggcactctaagttgactgccggtgacaaaccggaggaaggtggggatgacgtcaaatcatcatgccccttatgatttgggctacacacgtgctacaatggacaatacaaagggcagcgaaaccgcgaggtcaagcaaatcccataaagttgttctcagttcggattgtagtctgcaactcgactacatgaagctggaatcgctagtaatcgtagatcagcatgctacggtgaatacgttcccgggtcttgtacacaccgcccgtcacaccacgagagtttgtaacacccgaagccggtggagtaaccattttggagctagccgtcgaaggtgggacaaatgattggggtgaagtcgtaacaaggtagccgtatcggaaggtgcggctggatcacctcctt

SEQ ID NO: 1659 - DNA, 1545 bp, artificial sequence
  GCF_000759265.1_02340_Prevotella_buccalis
ttgaagagtttgatcatggctcagattgaacgctggcggcaggcctaacacatgcaagtcgagcggaaacgagttaactgaaccttcggggaacgttaacggcgtcgagcggcggacgggtgagtaatgcctgggaaattgccctgatgtgggggataaccattggaaacgatggctaataccgcataatagcttcggctcaaagagggggaccttcgggcctctcgcgtcaggatatgccaggtgggattagctagttggtgaggtaatggctcaccaaggcgacgatccctagctggtctgagaggatgatcagccacactggaactgagacacggtccagactcctacgggaggcagcagtggggaatattgcacaatgggcgcaagcctgatgcagccatgccgcgtgtgtgaagaaggcctcgggttgtaaagcactttcagtcgtgaggaaggcggtgtagttaatagctgcatcgtttgacgttagcgacagaagaagcaccggctaactccgtgccagcagccgcggtaatacggagggtgcgagcgttaatcggaattactgggcgtaaagcgcatgcaggtggttagttaagtcagatgtgaaagcccggggctcaacctcggaactgcatttgaaactggctgactagagtactgtagaggggggtagaatttcaggtgtagcggtgaaatgcgtagagatctgaaggaataccggtggcgaaggcggccccctggacagatactgacactcagatgcgaaagcgtggggagcaaacaggattagataccctggtagtccacgccgtaaacgatgtctacttggaggttgtggccttgagccgtggctttcggagctaacgcgttaagtagaccgcctggggagtacggtcgcaagattaaaactcaaatgaattgacgggggcccgcacaagcggtggagcatgtggtttaattcgatgcaacgcgaagaaccttacctactcttgacatccagagaacttagcagagatgctttggtgccttcgggaactctgagacaggtgctgcatggctgtcgtcagctcgtgttgtgaaatgttgggttaagtcccgcaacgagcgcaacccttatccttgtttgccagcacttcgggtgggaactccagggagactgccggtgataaaccggaggaaggtggggacgacgtcaagtcatcatggcccttacgagtagggctacacacgtgctacaatggcgcatacagagggcggccaacttgcgaaagtgagcgaatcccaaaaagtgcgtcgtagtccggattggagtctgcaactcgactccatgaagtcggaatcgctagtaatcgtggatcagaatgccacggtgaatacgttccgggccttgtacacaccgcccgtcacaccatgggagtgggctgcaaaagaagtgggtagtttaaccttcgggaggacgctcaccactttgtggttcatgactggggtgaagtcgtaacaaggtagccctaggggaacctggggctggatcacctcctt

SEQ ID NO: 1660 - DNA, 1546 bp, artificial sequence
  GCF_002884635.1_01481_Prevotella_buccalis
tggagagtttgattctggctcagattgaacgctggcggcgtgcttaacacatgcaagtcgaacgcgaacggggcttcggccccaagtagagtggcgcacgggtgagtaacgcgtggacaatctgcccttatgactggaataacagttggaaacggctgctaataccggatacgctcaggaagaactttttgaggaaaggcggcctctgcttgcaagctgtcgcataaggatgagtccgcgtcccattagctagttggcggggtaacggcccaccaaggcaacgatgggtagccgatttgagaggatgatcggccacactgggactgaaacacggcccagactcctacgggaggcagcagtggggaatattgcgcaatgggcgaaagcctgacgcagcgacgccgcgtgagggatgaaggttttcggatcgtaaacctctgtcagaagggaagaaactgccgtgctctaatcatcatggcattgacggtaccttcaaaggaagcaccggctaactccgtgccagcagccgcggtaatacggagggtgcaagcgttaatcggaattactgggcgtaaagcgcacgtaggctgttgtgtaagtcaggggtgaaatcccacggctcaaccgtggaactgcctttgatactgcacgacttgaatccgggagagggtggcggaattccaggggtaggagtgaaatccgtagatatctggaggaacaccagtggcgaaggcggccacctggaccggtattgacgctgaggtgcgaaagcgtggggagcaaacaggattagataccctggtagtccacgccgtaaacgatggatgctagatgtcggggggttgccctcggtgtcgtagttaacgcgttaagcatcccgcctggggagtacggtcgcaaggctgaaactcaaagaaattgacgggggcccgcacaagcggtggagtatgtggtttaattcgatgcaacgcgaagaaccttacctgggtttgacatccacggaaccctcttgaaagagaggggtgcccttcggggagccgtgagacaggtgctgcatggctgtcgtcagctcgtgtcgtgagatgttgggttaagtcccgcaacgagcgcaacccctatgcatagttgccagcaagtaacgttgggcactctatgcagactgcccgggttaaccgggaggaaggtggggacgacgtcaagtcatcatggcccttacatccagggctacacacgtactacaatggcgcgcacaaagggaagcgagaccgcgaggtggagccaatcccaaaaaacgcgtcccagtccggattgcagtctgcaactcgactgcatgaagtcggaatcgctagtaattcgagatcagcatgcgcgggtgaatgcgttcccgggccttgtacaccccgcccgtcacaccacgaaagtcggttttacccgaagccggtaagccaaccagcaatggaggcagccgtctacggtagggccgatgattggggtgaagtcgtaacaaggtagccgtaggggaacctgcggctggatcacctccttt

SEQ ID NO: 1661 - DNA, 1529 bp, artificial sequence
  GCF_900552525.1_02061_Prochlorotrichaceae_NG20_sp1
tgaagagtttgatcctggctcagattgaacgctggcggcatgccttacacatgcaagtcgaacggcagcacgggggcaaccctggtggcgagtggcgaacgggtgagtaatacatcggaacgtgtcctgtagtgggggatagcccggcgaaagccggattaataccgcatacgatctgtggatgaaagcgggggatccttcgggacctcgcgctacaggggcggccgatggcagattagctagttggtggggtaaaggcctaccaaggcgacgatctgtagctggtctgagaggacgaccagccacactgggactgagacacggcccagactcctacgggaggcagcagtggggaattttggacaatgggcgcaagcctgatccagcaatgccgcgtgtgtgaagaaggccttcgggttgtaaagcacttttgtccggaaagaaaacctctgggttaataccctggggggatgacggtaccggaagaataagcaccggctaactacgtgccagcagccgcggtaatacgtagggtgcaagcgttaatcggaattactgggcgtaaagcgtgcgcaggcggttcgctaagacagatgtgaaatccccgggcttaacctgggaactgcatttgtgactggcgggctagagtatggcagaggggggtagaattccacgtgtagcagtgaaatgcgtagagatgtggaggaataccgatggcgaaggcagccccctgggccaatactgacgctcatgcacgaaagcgtggggagcaaacaggattagataccctggtagtccacgccctaaacgatgtcaactagttgtcgggtcttcattgacttggtaacgtagctaacgcgtgaagttgaccgcctggggagtacggtcgcaagattaaaactcaaaggaattgacggggacccgcacaagcggtggatgatgtggattaattcgatgcaacgcgaaaaaccttacctacccttgacatgtatggaatcctgctgagaggtgggagtgcccgaaagggagccataacacaggtgctgcatggctgtcgtcagctcgtgtcgtgagatgttgggttaagtcccgcaacgagcgcaacccttgtccctagttgctacgcaagagcactctagggagactgccggtgacaaaccggaggaaggtggggatgacgtcaagtcctcatggcccttatgggtagggcttcacacgtcatacaatggtcggaacagagggtcgccaacccgcgagggggagccaatcccagaaaaccgatcgtagtccggatcgcactctgcaactcgagtgcgtgaagctggaatcgctagtaatcgcggatcagcatgccgcggtgaatacgttcccgggtcttgtacacaccgcccgtcacaccatgggagtgggttttaccagaagtggctagtctaaccgcaaggaggacggtcaccacggtaggattcatgactggggtgaagtcgtaacaaggtagccgtatcggaaggtgcggctggatcacctccttt

SEQ ID NO: 1662 - DNA, 1468 bp, artificial sequence
  ERR2221306_02271_Propionibacterium_freudenreichii
ttctggttgatcctgccagaggtcactgctatcggggttcgattaagccatgcgagttgagagggttaagaccctcggcggactgctcagtaacacgtggataacctgccctaaggtggaggataaccccgggaaactggggataatactccataggttaaaggtactggaatgttctttaaccgaaagttccggcgccttaggatggatctgcggccgattaggttgttgttggggtagtggcccaacaagcctgtaatcggtacgggttgtgggagcaagagcccggagatggaatctgagacacgattccaggccctacggggcgcagcaggcgcgaaaactttacaatgcaggaaactgtgataagggaaccccgagtgcccgtatatgcgggctgtccggatgtttaaaacgcatccgaagaaagggccgggcaagaccggtgccagccgccgcggtaataccggcggctcgagtggtggccacttttattgggcttaaagcgttcgtagcttgaataataagtctcttgggaaatctgcaggcttaacctgcaggcgtttaagagaaactgttgttctaggaaccggaagaggtgagaggtactccgggggtaggagtgaaatcctgtaatccccgggggaccaccgatggcgaaggcatctcaccaggacggcttcgacagtgaggaacgaaagctgggggagcgaaccggattagatacccgggtagtcccagccgtaaacgatgtgcgttaggtgtgccggtgaccacgagtcactggggtgccgaagggaaaccgtgaaacgtaccgcctgggaagtacggtcgcaaggctgaaacttaaaggaattggcgggggagcaccacaacgggtggagcctgcggtttaattggactcaacgccggaaatctcaccggataagacagcggaatgataaccaggctgaagactttgtttgaccagctgagaggaggtgcatggccgtcgtcagttcgtactgtgaagcatcctgtttagtcaggcaacgagcgagacccacgccaacagttgccagcatgttctccggaatgatggggacactgttgggaccgcctctgctaaagaggaggaaggaatgggcaacggtaggtcagcatgccccgaattatccgggctacacgcgggctacaatggtcaggacaatgggtaacggcactgagaagtgtagtcaatcccctaaacctgtcccaagttcggattgtgggctgcaactcgcccacatgaagctggaatccgtagtaatcgcgtttcaacatagcgcggtgaatacgtccctgctccttgcacacaccgcccgtcaaaccacccgagtgaggtttggatgaggctgtggttaattgccgcagtcgaatctaggtttcgcaaggggggttaagtcgtaacaaggtagccgtaggggaatctgcggctggatcacctcct

SEQ ID NO: 1663 - DNA, 1550 bp, artificial sequence
  GCF_000091725.1_01367_Propionibacterium_freudenreichii
tatggagagtttgatcctggctcaggatgaacgctggcggcgtgcctaatacatgcaagtcgagcgaacagataaggagcttgctcctttgacgttagcggcggacgggtgagtaacacgtggataacctacctataagactgggataacttcgggaaaccggagctaataccggataacatattgaaccgcatggttcaatagtgaaaggcggctttgctgtcacttatagatggatccgcgccgtattagctagttggtaaggtaacggcttaccaaggcaacgatacgtagccgacctgagagggtgatcggccacactggaactgagacacggtccagactcctacgggaggcagcagtagggaatcttccgcaatgggcgaaagcctgacggagcaacgccgcgtgagtgatgaaggtcttcggatcgtaaaactctgttatcagggaagaacaaatgtgtaagtaactgtgcacatcttgacggtacctgatcagaaagccacggctaactacgtgccagcagccgcggtaatacgtaggtggcaagcgttatccggaattattgggcgtaaagcgcgcgtaggcggttttttaagtctgatgtgaaagcccacggctcaaccgtggagggtcattggaaactggaaaacttgagtgcagaagaggaaagtggaattccatgtgtagcggtgaaatgcgcagagatatggaggaacaccagtggcgaaggcgactttctggtctgtaactgacgctgatgtgcgaaagcgtggggatcaaacaggattagataccctggtagtccacgccgtaaacgatgagtgctaagtgttagggggtttccgccccttagtgctgcagctaacgcattaagcactccgcctggggagtacgaccgcaaggttgaaactcaaaggaattgacggggacccgcacaagcggtggagcatgtggtttaattcgaagcaacgcgaagaaccttaccaaatcttgacatcctttgaccgctctagagatagagtcttccccttcgggggacaaagtgacaggtggtgcatggttgtcgtcagctcgtgtcgtgagatgttgggttaagtcccgcaacgagcgcaacccttaagcttagttgccatcattaagttgggcactctaagttgactgccggtgacaaaccggaggaaggtggggatgacgtcaaatcatcatgccccttatgatttgggctacacacgtgctacaatggacaatacaaagggcagctaaaccgtgaggtcaagcaaatcccataaagttgttctcagttcggattgtagtctgcaactcgactacatgaagctggaatcgctagtaatcgtagatcagcatgctacggtgaatacgttcccgggtcttgtacacaccgcccgtcacaccacgagagtttgtaacacccgaagccggtggagtaaccatttatggagctagccgtcgaaggtgggacaaatgattggggtgaagtcgtaacaaggtagccgtatcggaaggtgcggctggatcacctcctt

SEQ ID NO: 1664 - DNA, 1550 bp, artificial sequence; identical to SEQ ID NO: 1663
  GCF_000091725.1_01793_Propionibacterium_freudenreichii

SEQ ID NO: 1665 - DNA, 1546 bp, artificial sequence
  GCF_000723545.1_01032_Propionibacterium_freudenreichii
tggagagtttgattctggctcagattgaacgctggcggcgtgcttaacacatgcaagtcgaacgcgaaagggacttcggtcctgagtaaagtggcgcacgggtgagtaacacgtggataatctgcccctatgatcgggataacagtcggaaacggctgctaataccggatacgctcaaaatgaactttttgaggaaaggtgacctctgcttgcatgttaccgtatagggatgagtccgcgtcccattagcttgttggtggggtaaaggcctaccaaggcaacgatgggtagccgatttgagaggatgatcggccacactgggactgaaacacggcccagactcctacgggaggcagcagtggggaatattgcgcaatgggcgaaagcctgacgcagcgacgccgcgtgagggatgaaggttttcggatcgtaaacctctgtcagaagggaagaaaccgcactgtgctaatcagcagtgtcttgacggtaccttcaaaggaagcaccggctaactccgtgccagcagccgcggtaatacggagggtgcaagcgttaatcggaattactgggcgtaaagcgcacgtaggctgctttgtaagtcaggggtgaaatcccacggctcaaccgtggaactgcctttgatactgcttagcttgaatccgggagagggtggcggaattccaggtgtaggagtgaaatccgtagatatctggaggaacatcagtggcgaaggcggccacctggaccggtattgacgctgaggtgcgaaagcgtggggagcaaacaggattagataccctggtagtccacgctgtaaacgatggatgctagatgtcggggagtactcttcggtgtcgtagttaacgcgttaagcatcccgcctggggagtacggtcgcaaggctgaaactcaaagaaattgacgggggcccgcacaagcggtggagtatgtggtttaattcgatgcaacgcgaagaaccttacctaggtttgacatccacggaacctctccgaaacgagagggtgcccttcggggagccgtgagacaggtgctgcatggctgtcgtcagctcgtgtcgtgagatgttgggttaagtcccgcaacgagcgcaacccctatggatagttgccagcaagtgatgttgggcactctattcagactgcccgggttaaccgggaggaaggtggggacgacgtcaagtcatcatggcccttacgcctagggctacacacgtactacaatggcgcgcacaaaggggagcgagaccgcgaggtggagccaatcccaaaaaacgcgtcccagtccggattgcagtctgcaactcgactgcatgaagtcggaatcgctagtaattcgagatcagcatgctcgggtgaatgcgttcccgggccttgtacacaccgcccgtcacaccacgaaagtcggttttacccgaagtcggtgagccaaccagcaatggaggcagccgcctacggtagggctgatgattggggtgaagtcgtaacaaggtagccgtaggggaacctgcggctggatcacctccttt

SEQ ID NO: 1666 - DNA, 1533 bp, artificial sequence
  GCF_000940845.1_01320_Propionibacterium_freudenreichii
tgaagagtttgatcatggctcagattgaacgctggcggcaggcttaacacatgcaagtcgagcggagtgatggtgcttgcactatcacttagcggcggacgggtgagtaatgcttaggaatctgccatttagtgggggacaacattccgaaaggaatgctaataccgcatacgtcctacgggagaaagcaggggatcttcggaccttgcgctaaatgatgagcctaagtcggattagctagttggtggggtaaaggcctaccaaggcgacgatctgtagcgggtctgagaggatgatccgccacactgggactgagacacggcccagactcctacgggaggcagcagtggggaatattggacaatgggcggaagcctgatccagccatgccgcgtgtgtgaagaaggccttttggttgtaaagcactttaagcgaggaggaggctacctagattaatactctaggatagtggacgttactcgcagaataagcaccggctaactctgtgccagcagccgcggtaatacagagggtgcgagcgttaatcggatttactgggcgtaaagcgtgcgtaggcggctgattaagtcggatgtgaaatccctgagcttaacttaggaattgcattcgatactggtcagctagagtatgggagaggatggtagaattccaggtgtagcggtgaaatgcgtagagatctggaggaataccgatggcgaaggcagccatctggcctaatactgacgctgaggtacgaaagcatggggagcaaacaggattagataccctggtagtccatgccgtaaacgatgtctactagccgttggggcctttgaggctttagtggcgcagctaacgcgataagtagaccgcctggggagtacggtcgcaagactaaaactcaaatgaattgacgggggcccgcacaagcggtggagcatgtggtttaattcgatgcaacgcgaagaaccttacctggccttgacatactagaaactttccagagatggattggtgccttcgggaatctagatacaggtgctgcatggctgtcgtcagctcgtgtcgtgagatgttgggttaagtcccgcaacgagcgcaacccttttccttatttgccagcgagtaatgtcgggaactttaaggatactgccagtgacaaactggaggaaggcggggacgacgtcaagtcatcatggcccttacggccagggctacacacgtgctacaatggtcggtacaaagggttgctacctagcgataggatgctaatctcaaaaagccgatcgtagtccggattggagtctgcaactcgactccatgaagtcggaatcgctagtaatcgcggatcagaatgccgcggtgaatacgttcccgggccttgtacacaccgcccgtcacaccatgggagtttgttgcaccagaagtaggtagtctaaccgcaaggaggacgcttaccacggtgtggccgatgactggggtgaagtcgtaacaaggtagccgtaggggaacctgcggctggatcacctcctt

SEQ ID NO: 1667 - DNA, 1533 bp, artificial sequence
  GCF_000940845.1_01762_Propionibacterium_freudenreichii
tgaagagtttgatcatggctcagattgaacgctggcggcaggcttaacacatgcaagtcgagcggagtgatggtgcttgcactatcacttagcggcggacgggggagtaatgcttaggaatctgccatttagtgggggacaacattccgaaaggaatgctaataccgcatacgtcctacgggagaaagcaggggatcttcggaccttgcgctaaatgatgagcctaagtcggattagctagttggtggggtaaaggcctaccaaggcgacgatctgtagcgggtctgagaggatgatccgccacactgggactgagacacggcccagactcctacgggaggcagcagtggggaatattggacaatgggcggaagcctgatccagccatgccgcgtgtgtgaagaaggccttttggttgtaaagcactttaagcgaggaggaggctacctagattaatactctaggatagtggacgttactcgcagaataagcaccggctaactctgtgccagcagccgcggtaatacagagggtgcgagcgttaatcggatttactgggcgtaaagcgtgcgtaggcggctgattaagtcggatgtgaaatccctgagcttaacttaggaattgcattcgatactggtcagctagagtatgggagaggatggtagaattccaggtgtagcggtgaaatgcgtagagatctggaggaataccgatggcgaaggcagccatctggcctaatactgacgctgaggtacgaaagcatggggagcaaacaggattagataccctggtagtccatgccgtaaacgatgtctactagccgttggggcctttgaggctttagtggcgcagctaacgcgataagtagaccgcctggggagtacggtcgcaagactaaaactcaaatgaattgacgggggcccgcacaagcggtggagcatgtggtttaattcgatgcaacgcgaagaaccttacctggccttgacatactagaaactttccagagatggattggtgccttcgggaatctagatacaggtgctgcatggctgtcgtcagctcgtgtcgtgagatgttgggttaagtcccgcaacgagcgcaacccttttccttatttgccagcgagtaatgtcgggaactttaaggatactgccagtgacaaactggaggaaggcggggacgacgtcaagtcatcatggcccttacggccagggctacacacgtgctacaatggtcggtacaaagggttgctacctagcgataggatgctaatctcaaaaagccgatcgtagtccggattggagtctgcaactcgactccatgaagtcggaatcgctagtaatcgcggatcagaatgccgcggtgaatacgttcccgggccttgtacacaccgcccgtcacaccatgggagtttgttgcaccagaagtaggtagtctaaccgcaaggaggacgcttaccacggtgtggccgatgactggggtgaagtcgtaacaaggtagccgtaggggaacctgcggctggatcacctcctt

SEQ ID NO: 1668 - DNA, 1375 bp, artificial sequence
  GCF_000945235.1_00013_Propionibacterium_freudenreichii
gctaataccgcatacgtcctacgggagaaagcaggggatcttcggaccttgcgctaaatgatgagcctaagtcggattagctagttggtggggtaaaggcctaccaaggcgacgatctgtagcgggtctgagaggatgatccgccacactgggactgagacacggcccagactcctacgggaggcagcagtggggaatattggacaatgggcggaagcctgatccagccatgccgcgtgtgtgaagaaggccttttggttgtaaagcactttaagcgaggaggaggctactagtactaatactactggatagtggacgttactcgcagaataagcaccggctaactctgtgccagcagccgcggtaatacagagggtgcgagcgttaatcggatttactgggcgtaaagcgtgcgtaggcggctttttaagtcggatgtgaaatccccgagcttaacttgggaattgcattcgatactgggaagctagagtatgggagaggatggtagaattccaggtgtagcggtgaaatgcgtagagatctggaggaataccgatggcgaaggcagccatctggcctaatactgacgctgaggtacgaaagcatggggagcaaacaggattagataccctggtagtccatgccgtaaacgatgtctactagccgttggggcctttgaggctttagtggcgcagctaacgcgataagtagaccgcctggggagtacggtcgcaagactaaaactcaaatgaattgacgggggcccgcacaagcggtggagcatgtggtttaattcgatgcaacgcgaagaaccttacctggccttgacatactagaaactttccagagatggattggtgccttcgggaatctagatacaggtgctgcatggctgtcgtcagctcgtgtcgtgagatgttgggttaagtcccgcaacgagcgcaacccttttccttacttgccagcatttcggatgggaactttaaggatactgccagtgacaaactggaggaaggcggggacgacgtcaagtcatcatggcccttacggccagggctacacacgtgctacaatggtcggtacaaagggttgctacctagcgataggatgctaatctcaaaaagccgatcgtagtccggattggagtctgcaactcgactccatgaagtcggaatcgctagtaatcgcggatcagaatgccgcggtgaatacgttcccgggccttgtacacaccgcccgtcacaccatgggagtttgttgcaccagaagtaggtagtctaaccgcaaggaggacgcttaccacggtgtggccgatgactggggtgaagtcgtaacaaggtagccgtaggggaacctgcggctggatcacctcctt

SEQ ID NO: 1669 - DNA, 1525 bp, artificial sequence
  GCF_001050955.1_00336_Propionibacterium_freudenreichii
atgaagagtttgatcctggctcaggatgaacgctagctacaggcttaacacatgcaagtcgaggggcatcaggaagaaagcttgctttctttgctggcgaccggcgcacgggtgagtaacacgtatccaacctgccctttactcggggatagcctttcgaaagaaagattaatacccgatgggataatcattccgcatggtttgattattaaaggattccggtaaaggatggggatgcgttccattaggttgttggtgaggtaacggcccaccaagccttcgatggataggggttctgagaggaaggtcccccacattggaactgagacacggtccaaactcctacgggaggcagcagtgaggaatattggtcaatgggcgcgagcctgaaccagccaagtagcgtgaaggatgactgccctatgggttgtaaacttcttttatattagaataaagtgcagtatgtatactgttttgtatgtataatatgaataaggatcggctaactccgtgccagcagccgcggtaatacggaggatccgagcgttatccggatttattgggtttaaagggagcgtaggtggactggtaagtcagttgtgaaagtttgcggctcaaccgtaaaattgcagttgatactgtcagtcttgagtacagtagaggtgggcggaattcgtggtgtagcggtgaaatgcttagatatcacgaagaactccgattgcgaaggcagctcactggactgcaactgacactgatgctcgaaagtgtgggtatcaaacaggattagataccctggtagtccacacagtaaacgatgaatactcgctgtttgcgatatacagtaagcggccaagcgaaagcattaagtattccacctggggagtacgccggcaacggtgaaactcaaaggaattgacgggggcccgcacaagcggaggaacatgtggtttaattcgatgatacgcgaggaaccttacccgggcttaaattgcagtggaatgatgtggaaacatgtcagtgagcaatcaccgctgtgaaggtgctgcatggttgtcgtcagctcgtgccgtgaggtgtcggcttaagtgccataacgagcgcaacccttatcttcagttactaacaggtcatgctgaggactctggagagactgccgtcgtaagatgtgaggaaggtggggatgacgtcaaatcagcacggcccttacgtccggggctacacacgtgttacaatggggggtacagaaggcagctacctggtgacaggatgctaatcccaaaagcctctctcagttcggatcgaagtctgcaacccgacttcgtgaagctggattcgctagtaatcgcgcatcagccacggcgcggtgaatacgttcccgggccttgtacacaccgcccgtcaagccatgggagccgggggtacctgaagtacgtaaccgcaaggagcgtcctagggtaaaactggtgactggggctaagtcgtaacaaggtagccgtaccggaaggtgcggctggaacacctcctt

SEQ ID NO: 1670 - DNA, 1525 bp, artificial sequence; identical to SEQ ID NO: 1669
  GCF_001050975.1_00402_Propionibacterium_freudenreichii

SEQ ID NO: 1671 - DNA, 1545 bp, artificial sequence
  GCF_001368955.1_00001_Propionibacterium_freudenreichii
aatgagagtttgatcctggctcaggacgaacgctggcggcgtgcctaatacatgcaagtagaacgctgaagactttagcttgctaaagttggaagagttgcgaacgggtgagtaacgcgtaggtaacctgcctactagcgggggataactattggaaacgatagctaataccgcataacagcatttaacccatgttagatgcttgaaaggagcaattgcttcactagtagatggacctgcgttgtattagctagttggtgaggtaacggctcaccaaggcgacgatacatagccgacctgagagggtgatcggccacactgggactgagacacggcccagactcctacgggaggcagcagtagggaatcttcggcaatgggggcaaccctgaccgagcaacgccgcgtgagtgaagaaggttttcggatcgtaaagctctgttgtaagagaagaacgtgtgtgagagtggaaagttcacacagtgacggtaacttaccagaaagggacggctaactacgtgccagcagccgcggtaatacgtaggtcccgagcgttgtccggatttattgggcgtaaagcgagcgcaggcggtttaataagtctgaagttaaaggcagtggcttaaccattgttcgctttggaaactgttagacttgagtgcagaaggggagagtggaattccatgtgtagcggtgaaatgcgtagatatatggaggaacaccggtggcgaaagcggctctctggtctgtaactgacgctgaggctcgaaagcgtggggagcaaacaggattagataccctggtagtccacgccgtaaacgatgagtgctaggtgttaggccctttccggggcttagtgccgcagctaacgcattaagcactccgcctggggagtacgaccgcaaggttgaaactcaaaggaattgacgggggcccgcacaagcggtggagcatgtggtttaattcgaagcaacgcgaagaaccttaccaggtcttgacatcccgatgctattcctagagataggaagtttcttcggaacatcggtgacaggtggtgcatggttgtcgtcagctcgtgtcgtgagatgttgggttaagtcccgcaacgagcgcaacccctattgttagttgccatcattaagttgggcactctagcgagactgccggtaataaaccggaggaaggtggggatgacgtcaaatcatcatgccccttatgacctgggctacacacgtgctacaatggttggtacaacgagtcgcgagtcggtgacggcaagcaaatctcttaaagccaatctcagttcggattgtaggctgcaactcgcctacatgaagtcggaatcgctagtaatcgcggatcagcacgccgcggtgaatacgttcccgggccttgtacacaccgcccgtcacaccacgagagtttgtaacacccgaagtcggtgaggtaaccttttaggagccagccgcctaaggtgggatagatgattggggtgaagtcgtaacaaggtagccgtatcggaaggtgcggctggatcacctcctt

SEQ ID NO: 1672 - DNA, 1544 bp, artificial sequence
  GCF_001368975.1_00874_Propionibacterium_freudenreichii
aatgagagtttgatcctggctcaggacgaacgctggcggcgtgcctaatacatgcaagtagaacgctgaagactttagcttgctaaagttggaagagttgcgaacgggtgagtaacgcgtaggtaacctgcctactagcgggggataactattggaaacgatagctaataccgcataacagcatttaacacatgttagatgcttgaaaggagcaattgcttcactagtagatggacctgcgttgtattagctagttggtgaggtaacggctcaccaaggcgacgatacatagccgacctgagagggtgatcggccacactgggactgagacacggcccagactcctacgggaggcagcagtagggaatcttcggcaatgggggcaaccctgaccgagcaacgccgcgtgagtgaagaaggttttcggatcgtaaagctctgttgtaagagaagaacgtgtgtgagagtggaaagttcacacagtgacggtaacttaccagaaagggacggctaactacgtgccagcagccgcggtaatacgtaggtcccgagcgttgtccggatttattgggcgtaaagcgagcgcaggcggtttaataagtctgaagttaaaggcagtggcttaaccattgttcgctttggaaactgttagacttgagtgcagaaggggagagtggaattccatgtgtagcggtgaaatgcgtagatatatggaggaacaccggtggcgaaagcggctctctggtctgtaactgacgctgaggctcgaaagcgtggggagcaaacaggattagataccctggtagtccacgccgtaaacgatgagtgctaggtgttaggccctttccggggcttagtgccgcagctaacgcattaagcactccgcctggggagtacgaccgcaaggttgaaactcaaaggaattgacgggggcccgcacaagcggtggagcatgtggtttaattcgaagcaacgcgaagaaccttaccaggtcttgacatcccgatgctattcctagagataggaagtttcttcggaacatcggtgacaggtggtgcatggttgtcgtcagctcgtgtcgtgagatgttgggttaagtcccgcaacgagcgcaacccctattgttagttgccatcattaagttgggcactctagcgagactgccggtaataaaccggaggaaggtggggatgacgtcaaatcatcatgccccttatgacctgggctacacacgtgctacaatggttggtacaacgagtcgcgagtcggtgacggcaagcaaatctcttaaagccaatctcagttcggattgtaggctgcaactcgcctacatgaagtcggaatcgctagtaatcgcggatcagcacgccgcggtgaatacgttcccgggccttgtacacaccgcccgtcacaccacgagagtttgtaacacccgaagtcggtgaggtaaccttttggagccagccgcctaaggtgggatagatgattggggtgaagtcgtaacaaggtagccgtatcggaaggtgcggctggatcacctcctt

SEQ ID NO: 1673 - DNA, 1341 bp, artificial sequence
  GCF_001368995.1_01028_Propionibacterium_freudenreichii
gaaaggagcaattgcttcactagtagatggacctgcgttgtattagctagttggtgaggtaacggctcaccaaggcgacgatacatagccgacctgagagggtgatcggccacactgggactgagacacggcccagactcctacgggaggcagcagtagggaatcttcggcaatgggggcaaccctgaccgagcaacgccgcgtgagtgaagaaggttttcggatcgtaaagctctgttgtaagagaagaacgtgtgtgagagtggaaagttcacacagtgacggtaacttaccagaaagggacggctaactacgtgccagcagccgcggtaatacgtaggtcccgagcgttgtccggatttattgggcgtaaagcgagcgcaggcggtttaataagtctgaagttaaaggcagtggcttaaccattgttcgctttggaaactgttagacttgagtgcagaaggggagagtggaattccatgtgtagcggtgaaatgcgtagatatatggaggaacaccggtggcgaaagcggctctctggtctgtaactgacgctgaggctcgaaagcgtggggagcaaacaggattagataccctggtagtccacgccgtaaacgatgagtgctaggtgttaggccctttccggggcttagtgccgcagctaacgcattaagcactccgcctggggagtacgaccgcaaggttgaaactcaaaggaattgacgggggcccgcacaagcggtggagcatgtggtttaattcgaagcaacgcgaagaaccttaccaggtcttgacatcccgatgctattcctagagataggaagtttcttcggaacatcggtgacaggtggtgcatggttgtcgtcagctcgtgtcgtgagatgttgggttaagtcccgcaacgagcgcaacccctattgttagttgccatcattaagttgggcactctagcgagactgccggtaataaaccggaggaaggtggggatgacgtcaaatcatcatgccccttatgacctgggctacacacgtgctacaatggttggtacaacgagtcgcgagtcggtgacggcaagcaaatctcttaaagccaatctcagttcggattgtaggctgcaactcgcctacatgaagtcggaatcgctagtaatcgcggatcagcacgccgcggtgaatacgttcccgggccttgtacacaccgcccgtcacaccacgagagtttgtaacacccgaagtcggtgaggtaaccttttaggagccagccgcctaaggtgggatagatgattggggtgaagtcgtaacaaggtagccgtatcggaaggtgcggctggatcacctcctt

SEQ ID NO: 1674 - DNA, 1545 bp, artificial sequence
  GCF_001369015.1_00010_Propionibacterium_freudenreichii
  misc_feature (994)..(1055): n is a, c, g, or t
acgagagtttgatcctggctcaggacgaacgctggcggcgtgcctaatacatgcaagtggaacgcacagatgatacgtagcttgctacaattatctgtgagtcgcgaacgggtgagtaacgcgtaggtaacctagcttatagcgggggataactattggaaacgatagctaataccgcataaaagtggttgacccatgttaaccatttaaaaggagcaacagctccactatgagatggacctgcgttgtattagctagttggtagggtaaaggcctaccaaggcgacgatacatagccgacctgagagggtgaacggccacactgggactgagacacggcccagactcctacgggaggcagcagtagggaatcttcggcaatggggggaaccctgaccgagcaacgccgcgtgagtgaagaaggttttcggatcgtaaagctctgttgttagagaagaacagtgatgggagtggaaagtccatcatttgacggtaactaaccagaaagggacggctaactacgtgccagcagccgcggtaatacgtaggtcccgagcgttgtccggatttattgggcgtaaagcgagcgcaggcggtttgataagtctgaagttaaaggcagtggcttaaccattgtatgctttggaaactgttaaacttgagtgcagaaggggagagtggaattccatgtgtagcggtgaaatgcgtagatatatggaggaacaccggtggcgaaagcggctctctggtctgtaactgacgctgaggctcgaaagcgtggggagcaaacaggattagataccctggtagtccacgccgtaaacgctgagtgctaggtgttaggccctttccggggcttagtgccgtagctaacgcattaagcactccgcctggggagtacgaccgcaaggttgaaactcaaaggaattgacgggggcccgcacaagcggtggagcatgtggtttaattcgaagcaacgcgaagaaccttaccnnnnnnnnnnnnnnnnnnnnnnnnnnnnnnnnnnnnnnnnnnnnnnnnnnnnnnnnnnnnnngcatggttgtcgtcagctcgtgtcgtgagatgttgggttaagtcccgcaacgagcgcaacccttattgttagttgccatcattaagttgggcactctagcgagactgccggtaataaaccggaggaaggtggggatgacgtcaaatcatcatgccccttatgacctgggctacacacgtgctacaatggttggtacaacgagtcgcaagccggtgacggcaagctaatctctgaaagccaatctcagttcggattgtaggctgcaactcgcctacatgaagtcggaatcgctagtaatcgcggatcagcacgccgcggtgaatacgttcccgggccttgtacacaccgcccgtcacaccacgagagtttgtaacacccgaagtcggtgaggtaaccgttaaggagccagccgcctaaggtgggatagatgattggggtgaagtcgtaacaaggtagccgtatcggaaggtgcggctggatcacctccttt

SEQ ID NO: 1675 - DNA, 1546 bp, artificial sequence
  GCF_001369035.1_01180_Propionibacterium_freudenreichii
aaagagagtttgatcctggctcaggacgaacgctggcggcgtgcctaatacatgcaagtagaacgcagaggtcaggtgcttgcactggactgatgagttgcgaacgggtgagtaacgcgtaggtaacctacctgatagcgggggataactattggaaacgatagctaataccgcataaaagccaatgacccatgtcattggcttgaaaggagcaacagctccactatgagatggacctgcgttgtattagctagttggtagggtaaaggcctaccaaggcgacgatacatagccgacctgagagggtgaacggccacactgggactgagacacggcccagactcctacgggaggcagcagtagggaatcttcggcaatggggggaaccctgaccgagcaacgccgcgtgagtgaagaaggttttcggatcgtaaagctctgttgttagagaagaacagtgatgggagtggaaagtccatcatgtgacggtaactaaccagaaagggacggctaactacgtgccagcagccgcggtaatacgtaggtcccgagcgttgtccggatttattgggcgtaaagcgagcgcaggcggtttaataagtctgaagttaaaggcagtggcttaaccattgtatgctttggaaactgttaaacttgagtgcagaaggggagagtggaattccatgtgtagcggtgaaatgcgtagatatatggaggaacaccagtggcgaaagcggctctctggtctgtaactgacgctgaggctcgaaagcgtggggagcaaacaggattagataccctggtagtccacgccgtaaacgctgagtgctaggtgttaggccctttccggggcttagtgccgtagctaacgcattaagcactccgcctggggagtacgaccgcaaggttgaaactcaaaggaattgacgggggcccgcacaagcggtggagcatgtggtttaattcgaagcaacgcgaagaaccttaccaggtcttgacatcccgatgctattcttagagataagaagttacttcggtacattggagacaggtggtgcatggttgtcgtcagctcgtgtcgtgagatgttgggttaagtcccgcaacgagcgcaacccttattgttagttgccatcattaagttgggcactctagcgagactgccggtaataaaccggaggaaggtggggatgacgtcaaatcatcatgccccttatgacctgggctacacacgtgctacaatggttggtacaacgagtcgcaagccggtgacggcaagctaatctctgaaagccaatctcagttcggattgtaggctgcaactcgcctacatgaagtcggaatcgctagtaatcgcggatcagcacgccgcggtgaatacgttcccgggccttgtacacaccgcccgtcacaccacgagagtttgtaacacccgaagtcggtgaggtaaccgttaaggagccagccgcctaaggtgggatagatgattggggtgaagtcgtaacaaggtagccgtatcggaaggtgcggctggatcacctccttt

SEQ ID NO: 1676 - DNA, 1550 bp, artificial sequence
  GCF_001369055.1_01530_Propionibacterium_freudenreichii
aagagagtttgatcctggctcaggacgaacgctggcggcgtgcctaatacatgcaagtggaacgcacagatgatacgtagcttgctacaattatctgtgagtcgcgaacgggtgagtaacgcgtaggtaacctagcttatagcgggggataactattggaaacgatagctaataccgcataaaagtggttgacccatgttaaccatttaaaaggagcaacagctccactatgagatggacctgcgttgtattagctagttggtagggtaaaggcctaccaaggcgacgatacatagccgacctgagagggtgaacggccacactgggactgagacacggcccagactcctacgggaggcagcagtagggaatcttcggcaatggggggaaccctgaccgagcaacgccgcgtgagtgaagaaggttttcggatcgtaaagctctgttgttagagaagaacagtgatgggagtggaaagtccatcatttgacggtaactaaccagaaagggacggctaactacgtgccagcagccgcggtaatacgtaggtcccgagcgttgtccggatttattgggcgtaaagcgagcgcaggcggtttgataagtctgaagttaaaggcagtggcttaaccattgtatgctttggaaactgttaaacttgagtgcagaaggggagagtggaattccatgtgtagcggtgaaatgcgtagatatatggaggaacaccggtggcgaaagcggctctctggtctgtaactgacgctgaggctcgaaagcgtggggagcaaacaggattagataccctggtagtccacgccgtaaacgctgagtgctaggtgttaggccctttccggggcttagtgccgtagctaacgcattaagcactccgcctggggagtacgaccgcaaggttgaaactcaaaggaattgacgggggcccgcacaagcggtggagcatgtggtttaattcgaagcaacgcgaagaaccttaccaggtcttgacatcccgatgctattcttagagataagaagttacttcggtacattggagacaggtggtgcatggttgtcgtcagctcgtgtcgtgagatgttgggttaagtcccgcaacgagcgcaacccttattgttagttgccatcattaagttgggcactctagcgagactgccggtaataaaccggaggaaggtggggatgacgtcaaatcatcatgccccttatgacctgggctacacacgtgctacaatggttggtacaacgagtcgcaagccggtgacggcaagctaatctctgaaagccaatctcagttcggattgtaggctgcaactcgcctacatgaagtcggaatcgctagtaatcgcggatcagcacgccgcggtgaatacgttcccgggccttgtacacaccgcccgtcacaccacgagagtttgtaacacccgaagtcggtgaggtaaccgttaaggagccagccgcctaaggtgggatagatgattggggtgaagtcgtaacaaggtagccgtatcggaaggtgcggctggatcacctccttt

SEQ ID NO: 1677 - DNA, 1546 bp, artificial sequence
  GCF_001369075.1_00741_Propionibacterium_freudenreichii
aaagagagtttgatcctggctcaggacgaacgctggcggcgtgcctaatacatgcaagtagaacgcagaggtcaggtgcttgcactggactgatgagttgcgaacgggtgagtaacgcgtaggtaacctacctgatagcgggggataactattggaaacgatagctaataccgcataaaagccaatgacccatgtcattggcttgaaagaagcaaacgcttcactatgagatggacctgcgttgtattagctagttggtagggtaaaggcctaccaaggcgacgatacatagccgacctgagagggtgaacggccacactgggactgagacacggcccagactcctacgggaggcagcagtagggaatcttcggcaatggggggaaccctgaccgagcaacgccgcgtgagtgaagaaggttttcggatcgtaaagctctgttgttagagaagaacagtgatgggagtggaaagtccatcatttgacggtaactaaccagaaagggacggctaactacgtgccagcagccgcggtaatacgtaggtcccgagcgttgtccggatttattgggcgtaaagcgagcgcaggcggtttgataagtctgaagttaaaggcagtggcttaaccattgtatgctttggaaactgttaaacttgagtgcagaaggggagagtggaattccatgtgtagcggtgaaatgcgtagatatatggaggaacaccggtggcgaaagcggctctctggtctgtaactgacgctgaggctcgaaagcgtggggagcaaacaggattagataccctggtagtccacgccgtaaacgctgagtgctaggtgttaggccctttccggggcttagtgccgtagctaacgcattaagcactccgcctggggagtacgaccgcaaggttgaaactcaaaggaattgacgggggcccgcacaagcggtggagcatgtggtttaattcgaagcaacgcgaagaaccttaccaggtcttgacatcccgatgctattcttagagataagaagttacttcggtacattggagacaggtggtgcatggttgtcgtcagctcgtgtcgtgagatgttgggttaagtcccgcaacgagcgcaacccttattgttagttgccatcattaagttgggcactctagcgagactgccggtaataaaccggaggaaggtggggatgacgtcaaatcatcatgccccttatgacctgggctacacacgtgctacaatggttggtacaacgagtcgcaagccggtgacggcaagctaatctctgaaagccaatctcagttcggattgtaggctgcaactcgcctacatgaagtcggaatcgctagtaatcgcggatcagcacgccgcggtgaatacgttcccgggccttgtacacaccgcccgtcacaccacgagagtttgtaacacccgaagtcggtgaggtaaccgttaaggagccagccgcctaaggtgggatagatgattggggtgaagtcgtaacaaggtagccgtatcggaaggtgcggctggatcacctccttt

SEQ ID NO: 1678 - DNA, 1510 bp, artificial sequence
  GCF_004153405.1_00927_Propionibacterium_freudenreichii
atgaagagtttgatcctggctcaggatgaacgctagcggcaggcttaacacatgcaagtcgaggggtataggttttcggacctagagaccggcgcacgggtgcgtaacgcgtatgcaatctacctttcacagagggatagcccagagaaatttggattaatacctcatagtatagcagtttcgcatgaaaccactattaaagatttatcggtgaaagatgagcatgcgtcccattagctagttggtaaggtaacggcttaccaaggctacgatgggtaggggtcctgagagggagatcccccacactggtactgagacacggaccagactcctacgggaggcagcagtgaggaatattggacaatgggcgcaagcctgatccagccatgccgcgtgcaggatgacggtcctatggattgtaaactgcttttgtacaggaagaaacactacttcgtgaagtagcttgacggtactgtaagaataaggatcggctaactccgtgccagcagccgcggtaatacggaggatccaagcgttatccggaatcattgggtttaaagggtccgtaggcggtttagtaagtcagtggtgaaagcccatcgctcaacggtggaacggccattgatactgctaaacttgaattattaggaagtaactagaatatgtagtgtagcggtgaaatgcttagagattacatggaataccaattgcgaaggcaggttactactaatatattgacgctgatggacgaaagcgtgggtagcgaacaggattagataccctggtagtccacgccgtaaacgatggatactagctgttgggcgcaagttcagtggctaagcgaaagtgataagtatcccacctggggagtacgttcgcaagaatgaaactcaaaggaattgacgggggcccgcacaagcggtggagcatgtggtttaattcgatgatacgcgaggaaccttaccaaggcttaaatgtagattgaccggtttggaaacagacttttcgcaagacaatttacaaggtgctgcatggttgtcgtcagctcgtgccgtgaggtgtcaggttaagtcctataacgagcgcaacccctgttgttagttgccagcgagtcatgtcgggaactctaacaagactgccagtgcaaactgtgaggaaggtggggatgacgtcaaatcatcacggcccttacgccttgggctacacacgtgctacaatggccggtacagagagcagccactgggcgaccaggagcgaatctataaaaccggtcacagttcggatcggagtctgcaactcgactccgtgaagctggaatcgctagtaatcggatatcagccatgatccggtgaatacgttcccgggccttgtacacaccgcccgtcaagccatggaagctgggggtgcctgaagtcggtgaccgcaaggagctgcctagggtaaaactggtaactagggctaagtcgtaacaaggtagccgtaccggaaggtgcggctggaacacctcctt

SEQ ID NO: 1679 - DNA, 1521 bp, artificial sequence
  GCF_005864435.1_02527_Propionibacterium_freudenreichii
acggagagtttgatcctggctcaggatgaacgctggcggcgtgcttaacacatgcaagtcgaacggtgaaggaaagcttgctttctggatcagtggcgaacgggtgagtaacacgtgagcaatctgcccctgactctgggataacagttggaaacagctgctaataccggatatgagctgcgaccgcatggtcggcagttggaaagaatttcggtcagggatgagctcgcggcctatcagcttgttggtgaggtaatggctcaccaaggcgtcgacgggtagccggcctgagagggtgaccggccacactgggactgagacacggcccagactcctacgggaggcagcagtggggaatattgcacaatgggcgcaagcctgatgcagcaacgccgcgtgagggacgacggccttcgggttgtaaacctcttttagcagggaagaagcgaaagtgacggtacctgcagaaaaagcaccggctaactacgtgccagcagccgcggtaatacgtagggtgcaagcgttatccggaattattgggcgtaaagagctcgtaggcggtttgtcgcgtctgctgtgaaaccccgaggctcaacctcgggcctgcagtgggtacgggcagactagagtgcggtaggggagattggaattcctggtgtagcggtggaatgcgcagatatcaggaggaacaccgatggcgaaggcagatctctgggccgtaactgacgctgaggagcgaaagggtggggagcaaacaggcttagataccctggtagtccaccccgtaaacgttgggaactagttgtgggggccattccacggtctccgtgacgcagctaacgcattaagttccccgcctggggagtacggccgcaaggctaaaactcaaaggaattgacggggacccgcacaagcggcggagcatgcggattaattcgatgcaacgcgaagaaccttaccaaggcttgacatatacgagaacgggctagaaatagtcaactctttggacactcgtaaacaggtggtgcatggttgtcgtcagctcgtgtcgtgagatgttgggttaagtcccgcaacgagcgcaaccctcgttctatgttgccagcacgtaatggtgggaactcatgggatactgccggggtcaactcggaggaaggtggggatgacgtcaaatcatcatgccccttatgtcttgggcttcacgcatgctacaatggccggtacaaagggctgcaataccgtaaggtggagcgaatcccaaaaagccggtcccagttcggattgaggtctgcaactcgacctcatgaagtcggagtcgctagtaatcgcagatcagcaacgctgcggtgaatacgttcccgggtcttgtacacaccgcccgtcaagtcatgaaagtcggtaacacctgaagccggtggcccaaccccttgtgggagggagccgtcgaaggtgggatcggtaattaggactaagtcgtaacaaggtagccgtaccggaaggtgcggctggatcacctccttt

SEQ ID NO: 1680 - DNA, 1547 bp, artificial sequence
  GCF_900000055.1_00641_Propionibacterium_freudenreichii
tcggagagtttgatcctggctcaggacgaacgctggcggcgtgcctaatacatgcaagtcgagcggacagatgggagcttgctccctgatgttagcggcggacgggtgagtaacacgtgggtaacctgcctgtaagactgggataactccgggaaaccggggctaataccggatgcttgtttgaaccgcatggttcaaacataaaaggtggcttcggctaccacttacagatggacccgcggcgcattagctagttggtgaggtaatggctcaccaaggcaacgatgcgtagccgacctgagagggtgatcggccacactgggactgagacacggcccagactcctacgggaggcagcagtagggaatcttccgcaatggacgaaagtctgacggagcaacgccgcgtgagtgatgaaggttttcggatcgtaaagctctgttgttagggaagaacaagtaccgttcgaatagggcggtaccttgacggtacctaaccagaaagccacggctaactacgtgccagcagccgcggtaatacgtaggtggcaagcgttgtccggaattattgggcgtaaagggctcgcaggcggtttcttaagtctgatgtgaaagcccccggctcaaccggggagggtcattggaaactggggaacttgagtgcagaagaggagagtggaattccacgtgtagcggtgaaatgcgtagagatgtggaggaacaccagtggcgaaggcgactctctggtctgtaactgacgctgaggagcgaaagcgtggggagcgaacaggattagataccctggtagtccacgccgtaaacgatgagtgctaagtgttagggggtttccgccccttagtgctgcagctaacgcattaagcactccgcctggggagtacggtcgcaagactgaaactcaaaggaattgacgggggcccgcacaagcggtggagcatgtggtttaattcgaagcaacgcgaagaaccttaccaggtcttgacatcctctgacaatcctagagataggacgtccccttcgggggcagagtgacaggtggtgcatggttgtcgtcagctcgtgtcgtgagatgttgggttaagtcccgcaacgagcgcaacccttgatcttagttgccagcattcagttgggcactctaaggtgactgccggtgacaaaccggaggaaggtggggatgacgtcaaatcatcatgccccttatgacctgggctacacacgtgctacaatggacagaacaaagggcagcgaaaccgcgaggttaagccaatcccacaaatctgttctcagttcggatcgcagtctgcaactcgactgcgtgaagctggaatcgctagtaatcgcggatcagcatgccgcggtgaatacgttcccgggccttgtacacaccgcccgtcacaccacgagagtttgtaacacccgaagtcggtgaggtaaccttttaggagccagccgccgaaggtgggacagatgattggggtgaagtcgtaacaaggtagccgtatcggaaggtgcggctggatcacctccttt

SEQ ID NO: 1681 - DNA, 1547 bp, artificial sequence; identical to SEQ ID NO: 1680
  GCF_900000065.1_00160_Propionibacterium_freudenreichii

SEQ ID NO: 1682 - DNA, 1547 bp, artificial sequence; identical to SEQ ID NO: 1680
  GCF_900000075.1_00644_Propionibacterium_freudenreichii

SEQ ID NO: 1683 - DNA, 1547 bp, artificial sequence; identical to SEQ ID NO: 1680
  GCF_900000085.1_00313_Propionibacterium_freudenreichii

SEQ ID NO: 1684 - DNA, 1547 bp, artificial sequence; identical to SEQ ID NO: 1680
  GCF_900000125.1_00126_Propionibacterium_freudenreichii

SEQ ID NO: 1685 - DNA, 1560 bp, artificial sequence
  GCF_900016155.1_00817_Propionibacterium_freudenreichii
catggagagtttgatcctggctcaggacgaacgctggcggcgtgcctaatacatgcaagtcgagcgcaggaaactgacggaactcttcggagggaaggcagtggaatgagcggcggacgggtgagtaacacgtaaggaacctgcctcaaggattgggataactccgagaaatcggagctaataccggatagttcaacggaccgcatggtccgctgatgaaaggcgcttcggcgtcaccttgagatggccttgcggtgcattagctagttggtggggtaacggcccaccaaggcgacgatgcatagccgacctgagagggtgatcggccacactgggactgagacacggcccagactcctacgggaggcagcagtagggaatcttccacaatggacgaaagtctgatggagcaacgccgcgtgagtgatgaaggttttcggatcgtaaaactctgttgtaagggaagaacacgtacgagaggtaatgctcgtaccttgacggtaccttacgagaaagccacggctaactacgtgccagcagccgcggtaatacgtaggtggcaagcgttgtccggaattattgggcgtaaagcgcgcgcaggcggccttttaagtctgatgtgaaagcccccggctcaaccggggagggccattggaaactggaaggcttgagtacagaagagaagagtggaattccacgtgtagcggtgaaatgcgtagagatgtggaggaacaccagtggcgaaggcgactctttggtctgtaactgacgctgaggcgcgaaagcgtggggagcaaacaggattagataccctggtagtccacgccgtaaacgatgagtgctaggtgttggggggtttccgcccctcagtgctgaagctaacgcattaagcactccgcctggggagtacggccgcaaggctgaaactcaaaggaattgacggggacccgcacaagcggtggagcatgtggtttaattcgaagcaacgcgaagaaccttaccaactcttgacatcccattgaccgcttgagagatcaagttttcccttcggggacaatggtgacaggtggtgcatggttgtcgtcagctcgtgtcgtgagatgttgggttaagtcccgcaacgagcgcaacccctatccttagttgccagcattgagttgggcactctagggagactgccggtgacaaaccggaggaaggtggggatgacgtcaaatcatcatgccccttatgagttgggctacacacgtgctacaatggacggtacaaagggcagcgagaccgcgaggtggagccaatcccataaagccgttcccagttcggattgcaggctgcaactcgcctgcatgaagtcggaatcgctagtaatcgcaggtcagcatactgcggtgaatacgttcccgggtcttgtacacaccgcccgtcacaccacgagagtttgcaacacccgaagccggtgaggtaaccgcaaggagccagccgtcgaaggtggggtagatgattggggtgaagtcgtaacaaggtagccgtatcggaaggtgcggctggatcacctccttt

SEQ ID NO: 1686 - DNA, 1482 bp, artificial sequence
  GCF_900016155.1_01321_Propionibacterium_freudenreichii
ctgagagtttgatcctggctcagaacgaacgctggcggcaggcctaacacatgcaagtcgaacgaattcttcggaattagtggcagacgggtgagtaacgcgtgggaaattaccttatggtagggaacaacagttggaaacgactgctaataccctatgtgccctacgggggaaagatttatcgccataagatgtgcccgcgttggattagctagttggtaaggtaatggcttaccaaggcgacgatccatagctggtctgagaggatgatcagccacactgggactgagacacggcccagactcctacgggaggcagcagtggggaatattggacaatgggcgcaagcctgatccagccatgccgcgtgtgtgatgacggccttagggttgtaaagcactttcagcagtgaagataatgacattaactgcagaagaagccccggctaacttcgtgccagcagccgcggtaatacgaagggggctagcgttgttcggaatcactgggcgtaaagcgtacgtaggcggactgataagttaggggtgaaatcccaaggctcaaccttggaactgcctttaatactgttagtcttgagatcgagagaggtgagtggaactccgagtgtagaggtgaaattcgtagatattcggaagaacaccagtggcgaaggcggctcactggctcgatactgacgctgaggtacgaaagcgtggggagcaaacaggattagataccctggtagtccacgccgtaaacgatgaatgctagttgtcaggtagcttgctatttggtgacgcagctaacgcattaagcattccgcctggggagtacggtcgcaagattaaaactcaaaggaattgacgggggcccgcacaagcggtggagcatgtggtttaattcgaagcaacgcgcagaaccttaccagcccttgacatttgacgctatatcgggagaccgatagttctcttcggagacgtcaggacaggtgctgcatggctgtcgtcagctcgtgtcgtgagatgttgggttaagtcccgcaacgagcgcaaccctcgcccttagttgccagcattaagttgggcactctagggggactgccggtgataagccggaggaaggtggggatgacgtcaagtcctcatggcccttacgggctgggctacacacgtgctacaatggcggtgacagtgggcagcgacctcgcgaggggtagctaatctctaaaagccgtctcagttcggattgttctctgcaactcgagagcatgaagttggaatcgctagtaatcgcgtaacagcatgacgcggtgaatacgttcccgggccttgtacacaccgcccgtcacaccatgggagttggttctacccgaaggcgctgcgctaacctagcaatagggggcaggcgaccacggtagggtcagcgactggggtgaagtcgtaacaaggtagccctaggggaacctggggctggatcacctccttt

SEQ ID NO: 1687 - DNA, 1532 bp, artificial sequence
  GCF_900086895.1_00520_Propionibacterium_freudenreichii
tgaagagtttgatcatggctcagattgaacgctggcggcaggcctaacacatgcaagtcgagcggtagagagaagcttgcttctcttgagagcggcggacgggtgagtaaagcctaggaatctgcctggtagtgggggataacgttcggaaacggacgctaataccgcatacgtcctacgggagaaagcaggggaccttcgggccttgcgctatcagatgagcctaggtcggattagctagttggtgaggtaatggctcaccaaggcgacgatccgtaactggtctgagaggatgatcagtcacactggaactgagacacggtccagactcctacgggaggcagcagtggggaatattggacaatgggcgaaagcctgatccagccatgccgcgtgtgtgaagaaggtcttcggattgtaaagcactttaagttgggaggaagggcagttacctaatacgtgattgttttgacgttaccgacagaataagcaccggctaactctgtgccagcagccgcggtaatacagagggtgcaagcgttaatcggaattactgggcgtaaagcgcgcgtaggtggtttgttaagttggatgtgaaatccccgggctcaacctgggaactgcattcaaaactgactgactagagtgtggtagagggtggtggaatttcctgtgtagcggtgaaatgcgtagatataggaaggaacaccagtggcgaaggcgaccacctggaccaacactgacactgaggtgcgaaagcgtggggagcaaacaggattagataccctggtagtccacgccgtaaacgatgtcaactagccgttgggagccttgagctcttagtggcgcagctaacgcattaagttgaccgcctggggagtacggccgcaaggttaaaactcaaatgaattgacgggggcccgcacaagcggtggagcatgtggtttaattcgaagcaacgcgaagaaccttaccaggccttgacatccaatgaactttctagagatagattggtgccttcgggaacattgagacaggtgctgcatggctgtcgtcagctcgtgtcgtgagatgttgggttaagtcccgtaacgagcgcaacccttgtccttagttaccagcacgttatggtgggcactctaaggagactgccggtgacaaaccggaggaaggtggggatgacgtcaagtcatcatggcccttacggcctgggctacacacgtgctacaatggtcggtacagagggttgccaagccgcgaggtggagctaatcccacaaaaccgatcgtagtccggatcgcagtctgcaactcgactgcgtgaagtcggaatcgctagtaatcgcgaatcagaatgtcgcggtgaatacgttcccgggccttgtacacaccgcccgtcacaccatgggagtgggttgcaccagaagtagctagtctaaccttcgggaggacggttaccacggtgtgattcatgactggggtgaagtcgtaacaaggtagccgtaggggaacctgcggctggatcacctcctt

SEQ ID NO: 1688 - DNA, 1532 bp, artificial sequence; identical to SEQ ID NO: 1687
  GCF_900086895.1_01766_Propionibacterium_freudenreichii

SEQ ID NO: 1689 - DNA, 1482 bp, artificial sequence; identical to SEQ ID NO: 1285
  GCF_900087025.1_00508_Propionibacterium_freudenreichii

SEQ ID NO: 1690 - DNA, 1482 bp, artificial sequence; identical to SEQ ID NO: 1285
  GCF_900087025.1_00930_Propionibacterium_freudenreichii

SEQ ID NO: 1691 - DNA, 1514 bp, artificial sequence
  GCF_900087165.1_00514_Propionibacterium_freudenreichii
atgaagagtttgatcctggctcaggatgaacgctagcggcaggcttaacacatgcaagtcgaggggtaacattgtagcttgctacagatgacgaccggcgcacgggtgcgtaacgcgtatacaatctaccttatactgagggatagcccagagaaatttggattaatacctcatagtatgtttaattggcatcaattagacattaaaggttacggtataagatgagtatgcgttctattagctagatggagtggtaacggcacaccatggcaacgatagataggggccctgagagggggatcccccacactggtactgagacacggaccagactcctacgggaggcagcagtgaggaatattggacaatggagggaactctgatccagccatgccgcgtgcaggatgactgccctatgggttgtaaactgcttttatacaggaagaaactgctctacgtgtagagatttgacggtactgtaagaataaggatcggctaactccgtgccagcagccgcggtaatacggaggatccaagcgttatccggaatcattgggtttaaagggtccgtaggtggataattaagtcaggggtgaaagtctgcagctcaactgtagaattgcccttgatactgtttatcttgagttattatgaagtagttagaatatgtagtgtagcggtgaaatgcatagatattacatagaataccaattgcgaaggcagattactaataatatactgacactgatggacgaaagcgtggggagcgaacgggattagataccccggtagtccacgccgtaaacgatggatactagctgttcggtttcgactgagtggctaagcgaaagtgataagtatcccacctggggagtacgttcgcaagaatgaaactcaaaggaattgacgggggcccgcacaagcggtggagcatgtggtttaattcgatgatacgcgaggaaccttaccagggcttaaatgtagattgacatgtttagagatagacctttcttcggacaatttacaaggtgctgcatggttgtcgtcagctcgtgccgtgaggtgtcaggttaagtcctataacgagcgcaacccctgttgttagttgccagcatttcaagatgggaactctaacaagactgccagtgcaaactgtgaggaaggtggggatgacgtcaaatcatcacggcccttacgtcctgggctacacacgtgctacaatggtagggacagagagcagccacttggcgacaaggagcgaatctataaaccctatcacagttcggatcggagtctgcaactcgactccgtgaagctggaatcgctagtaatcgcatatcagccatgatgcggtgaatacgttcccgggccttgtacacaccgcccgtcaagccatggaagctgggagtgcctgaagtccgtcaccgagaggagcggcctagggtaaaatcggtaactagggctaagtcgtaacaaggtagccgtaccggaaggtgcggctggaacacctcctt

SEQ ID NO: 1692 - DNA, 1514 bp, artificial sequence; identical to SEQ ID NO: 1691
  GCF_900087165.1_00951_Propionibacterium_freudenreichii

SEQ ID NO: 1693 - DNA, 1514 bp, artificial sequence; identical to SEQ ID NO: 1691
  GCF_900087185.1_00491_Propionibacterium_freudenreichii

SEQ ID NO: 1694 - DNA, 1514 bp, artificial sequence; identical to SEQ ID NO: 1691
  GCF_900087185.1_00915_Propionibacterium_freudenreichii

SEQ ID NO: 1695 - DNA, 1526 bp, artificial sequence
  GCF_900409735.1_00001_Propionibacterium_freudenreichii
tatggagagtttgatcctggctcaggacgaacgctggcggcgtgcctaatacatgcaagtcggacggtttagaagtgagaggcttgcctctcgcttttagacagtggcggacgggtgagtaacacgtaggcaacctgcccgtaataccgggataacctggggaaaccgaggctaagcccggataggctccttttccgcatgggagaggagggaaagggtgcgacccgattacggaggggcctgcggcgcattagctagttggtgaggtaacggcccaccaaggcgatgatgcgtagccgacctgagagggtgaccggccacactgggactgagagacggcccagactcctacgggaggcagcagtagggaatcttcggcaatgggcgaaagcctgaccgagcaacgccgcgtgagtgaggaaggccttcgggttgtaaaactctgttgtttgggaagaagggaaagggtaggccccttaggtgacggtaccaaacgagaaagccccggctaactacgtgccagcagccgcggtaatacgtagggggcgagcgttgtccggaatgattgggcgtaaagcgcgcgcaggcggtcctttaagtctgatgtgaaagcccgcggcttaaccgcggaaggtcattggaaactgggggacttgaggctaggagagggaagtggaattcctggtgtagcggtgaaatgcgtagagatcaggaggaataccgatggcgaaggcagctttctggcctagaactgacgctgaggcgcgaaagcgtggggagcaaacaggattagataccctggtagtccacgccgtaaacgatgagtgctaggtgtgaggggtttcaaggcccttcgtgccgcagtacacacaataagcactccgcctggggagtacggtcgcaagactgaaactcaaaggaattgacgggggcccgcacaagcggtggagcatgtggtttaattcgaagcaacgcgaagaaccttaccagggcttgacatccctctgacgggagtagagatacttcgtcccttcggggcagaggagacaggtggtgcatggttgtcgtcagctcgtgtcgtgagatgttgggttaagtcccgcaacgagcgcaacccttgagcttagttgccagcattcagttgggcactctaggctgactgccgcagacgatgcggaggaaggtggggatgacgtcaaatcatcatgccccttatgtcctgggctacacacgtgctacaatggccggtacagagggaggcgaaggagcgatccggagcggaacccaaaaagccggtcgtagttcggattgcaggctgcaactcgcctgcatgaagtcggaatcgctagtaatcgcggatcagcatgccgcggtgaatccgttcccgggccttgtacacaccgcccgtcacaccacgagagtcggaaacacccgaagtcgctcaggcgcctaaggtggggccgatgattggggtgaagtcgtaacaaggtatccgtaccggaaggtgcggatggatcacctccttt

SEQ ID NO: 1696 - DNA, 1530 bp, artificial sequence
  STR00530_Roseburia_faecis
atgagagtttgatcctggctcaggatgaacgctggcggcgtgcttaacacatgcaagtcgaacgaagcactctatttgattttcttcggaaatgaagattttgtgactgagtggcggacgggtgagtaacgcgtgggtaacctgcctcatacagggggataacagttggaaacgactgctaataccgcataagcgcacaggattgcatgatccggtgtgaaaaactccggtggtatgggatggacccgcgtctgattagccagttggcagggtaacggcctaccaaagcgacgatcagtagccgacctgagagggtgaccggccacattgggactgagacacggcccaaactcctacgggaggcagcagtggggaatattgcacaatgggggaaaccctgatgcagcgacgccgcgtgagcgaagaagtatttcggtatgtaaagctctatcagcaggaaagaaaaatgacggtacctgactaagaagcaccggctaaatacgtgccagcagccgcggtaatacgtatggtgcaagcgttatccggatttactgggtgtaaagggagcgcaggcggtgcggcaagtctgatgtgaaagcccggggctcaaccccggtactgcattggaaactgtcgtactagagtgtcggaggggtaagtggaattcctagtgtagcggtgaaatgcgtagatattaggaggaacaccagtggcgaaggcggcttactggacgataactgacgctgaggctcgaaagcgtggggagcaaacaggattagataccctggtagtccacgccgtaaacgatgaatactaggtgtcggggagcattgctcttcggtgccgcagcaaacgcaataagtattccacctggggagtacgttcgcaagaatgaaactcaaaggaattgacggggacccgcacaagcggtggagcatgtggtttaattcgaagcaacgcgaagaaccttaccaagtcttgacatcccgatgacagagtatgtaatgtactttctcttcggagcatcggtgacaggtggtgcatggttgtcgtcagctcgtgtcgtgagatgttgggttaagtcccgcaacgagcgcaacccctgttcttagtagccagcggttcggccgggcactctagggagactgccagggataacctggaggaaggcggggatgacgtcaaatcatcatgccccttatgacttgggctacacacgtgctacaatggcgtaaacaaagggaagcggagccgtgaggccgagcaaatctcaaaaataacgtctcagttcggactgtagtctgcaacccgactacacgaagctggaatcgctagtaatcgcagatcagaatgctgcggtgaatacgttcccgggtcttgtacacaccgcccgtcacaccatgggagttggaaatgcccgaagtcagtgacccaaccgcaaggagggagctgccgaaggcaggttcgataactggggtgaagtcgtaacaaggtagccgtatcggaaggtgcggctggatcacctccttt

SEQ ID NO: 1697 - DNA, 1247 bp, artificial sequence
  STR00969_Roseburia_faecis
atgagagtttgatcctggctcaggatgaacgctggcggcgtgcttaacacatgcaagtcgaacgaagcactctatttgattttcttcggaaatgaagattttgtgactgagtggcggacgggtgagtaacgcgtgggtaacctgcctcatacagggggataacagttggaaacgactgctaataccgcataagcgcacaggatcgcatgatccggtgtgaaaaactccggtggtatgggatggacccgcgtctgattagccagttggcagggtaacggcctaccaaagcgacgatcagtagccgacctgagagggtgaccggccacattgggactgagacacggcccaaactcctacgggaggcagcagtggggaatattgcacaatgggggaaaccctgatgcagcgacgccgcgtgagcgaagaagtatttcggtatgtaaagctctatcagcagggaagaagaatgacggtacctgactaagaagcaccggctaaatacgtgccagcagccgcggtaatacgtatggtgcaagcgttatccggatttactgggtgtaaagggagcgcaggcggtgcggcaagtctgatgtgaaagcccggggctcaaccccggtactgcattggaaactgtcgtactagagtgtcggaggggtaagtggaattcctagtgtagcggtgaaatgcgtagatattaggaggaacaccagtggcgaaggcggcttactggacgataactgacgctgaggctcgaaagcgtggggagcaaacaggattagataccctggtagtccacgccgtaaacgatgaatactaggtgtcggggagcattgctcttcggtgccgcagcaaacgcaataagtattccacctggggagtacgttcgcaagaatgaaactcaaaggaattgacggggacccgcacaagcggtggagcatgtggtttaattcgaagcaacgcgaagaaccttaccaagtcttgacatcccgatgacagggtatgtaatgtactttctcttcggagcatcggtgacaggtggtgcatggttgtcgtcagctcgtgtcgtgagatgttgggttaagtcccgcaacgagcgcaacccctgttcttagtagccagcggttcggccgggcactctagggagactgccagggataacctggaggaaggcggggatgacgtcaaatcatcatgccccttatgacttgggctacacacgtgctacaatggcgtaaacaaagggaagc

SEQ ID NO: 1698 - DNA, 1467 bp, artificial sequence
  ERR1022321_03441_Roseburia_faecis
attccggttgatcccgccggaggccactgctattgggattcgactaagccatgcgagtctatggtttcggccatggcggacggctcattaacacgtggttaacataccctcaggtgggggataaccttgggaaactgaggataataccccatagaaaaagcagtctggaacgattctttttcgaaagcatatgcgcctgaggattggactgcgctcgattaggtagttggtggggtaatggcccaccaagcctacgatcggtacgggccttgagagaggaagcccggagatggggactgagacacggccccaggccctacggggcgcagcaggcgcgaaacctccgcaatgcacgaaagtgcgacggggggatcccaagtgctcatgcacagcatgggcttttatcaagtgtaaacagcttgaggaataagggctgggcaagttcggtgccagcagccgcggtaacaccgacggcccgagtggtggccacttttattgggcctaaagcgtccgtagccggtccagtaagtccttgtttaaatcctgcggcttaaccgcaggactggcagggatactgctggacttgggaccgggagaggacaagggtacttcaggggtagcggtgaaatgtgttgatccttgaaggaccacctatggcgaaggcacttgtctggaacgggtccgacggtgagggacgaaagccaggggcgcgaaccggattagatacccgggtagtcctggccgtaaactttgcgaactaggtgttaggtgggccccgtgcccatctagtgccgaagggaagccgttaagttcgccgcctggggagtacggtcgcaagactgaaacttaaaggaattggcgggggagcaccacaacgggtggagcctgcggtttaattggattcaacgccgggcatctcaccaggagcgacagcatgatgacggccaggttgacgaccttgcctgaagcgctgagaggtggtgcatggccatcgtcagctcgtaccgcgaggcgtcctgttaagtcaggtaacgagcgagacccgtgccctatgttgctactttttcctccgggagaaaggcactcataggggaccgctggcgctaagtcagaggaaggagcgggcaacgataggtccgcatgccccgaatctcctgggctacacgcgggctacaatggctaggacaatgggccgcaaccctgaaaagggacgcaaatctcctaaacctagtcgtagttcggatcgtgggctgtaactcgcccacgtgaagctggaatccgtagtaatcgcagttcataatactgcggtgaatgtgtccctgctccttgcacacaccgcccgtcacaccacccgagttgggttgaagtgaggccttggcctttggctagggtcgaacttgggctcagcgaggggggtgaagtcgtaacaaggtagccgtaggggaacctgcggctggatcacctcct

SEQ ID NO: 1699 - DNA, 1472 bp, artificial sequence
  ERR2230155_03486_Roseburia_faecis
attccggttgatcctgccggaggccattgctatcggagtccgatttagccatgctagtcgcacgggcttagacccgtggcatatagctcagtaacacgtggccaaactaccctacagaccgcaataacctcgggaaactgaggccaatagcggatataactctcatgctggagtgcggagagttagaaatgttccggcgctgtaggatgtggctgcggccgattaggtagatggtggggtaacggcccaccatgccgataatcggtacgggttgtgagagcaagaacccggagacggtatctgagacaagataccgggccctacggggcgcagcaggcgcgaaacctttacactgcacgacagtgcgatagggggactccgagtgcgagggcatatagccctcgcttttctgtaccgtaaggtggtacaggaacaaggactgggcaagaccggtgccagccgccgcggtaataccggcagtccaagtgatggccgatattattgggcctaaagcgtccgtagccggccggacaagtccgttgggaaatcgacgcgctcaacgcgtcggcgtccagcggaaactgtccggcttggggccggaagacctgaggggtacgtccggggtaggagtgaaatcctgtaatcctggacggaccaccaatggggaaaccacctcaggaagacggacccgacggtgagggacgaaagctggggtctcgaaccggattagatacccgggtagtcctagctgtaaacgatgctcgctaggtgtgccgtaggctacgagcctgcgctgcgccctagggaagccgagaagcgagccgcctgggaagtacgtctgcaaggatgaaacttaaaggaattggcgggggagcaccacaaccggaggagcctgcggtttaattggactcaacgccggacatctcaccggtcccgacagtagtaatgacagtcaggttgacgactttactcgacgctactgagaggaggtgcatggccgccgtcagctcgtaccgtgaggcgtcctgttaagtcaggcaacgagcgagacccgcacttctagttgccagcaatacccttgaggtagttgggtacactaggaggactgccattgctaaaatggaggaaggaacgggcaacggtaggtcagtatgccccgaatggaccgggcaacacgcgggctacaatggctatgacagtgggatgcaacgccgaaaggcgacgctaatctccaaacgtagtcgtagttcggattgcgggctgaaacccgcccgcatgaagctggattcggtagtaatcgcgtgtcagaagcgcgcggtgaatacgtccctgctccttgcacacaccgcccgtcaaagcacccgagtggggtccggatgaggccgtcatgcgacggtcgaatctgggctccgcaagggggcttaagtcgtaacaaggtagccgtagaggaatctgtggctggatcacctcct

SEQ ID NO: 1700 - DNA, 1486 bp, artificial sequence; identical to SEQ ID NO: 1039
  GCF_001405615.1_02421_Roseburia_faecis

SEQ ID NO: 1701 - DNA, 1521 bp, artificial sequence
  GCF_001406815.1_02685_Roseburia_faecis
acggagagtttgatcctggctcaggacgaacgctggcggcgtgcttaacacatgcaagtcgaacgatgaagcccttcggggtggattagtggcgaacgggtgagtaacacgtgggcaatctgccctgcactctgggacaagccctggaaacggggtctaataccggatacgagcctcctgggcatctgggaggttggaaagctccggcggtgcaggatgagcccgcggcctatcagcttgttggtgaggtaacggctcaccaaggcgacgacgggtagccggcctgagagggcgaccggccacactgggactgagacacggcccagactcctacgggaggcagcagtggggaatattgcacaatgggcgaaagcctgatgcagcgacgccgcgtgagggatgacggccttcgggttgtaaacctctttcagcagggaagaagcgagagtgacggtacctgcagaagaagcgccggctaactacgtgccagcagccgcggtaatacgtagggcgcaagcgttgtccggaattattgggcgtaaagagctcgtaggcggcttgtcgcgtcgattgtgaaagcccggggcttaactccgggtctgcagtcgatacgggcaggctagagtgtggtaggggagatcggaattcctggtgtagcggtgaaatgcgcagatatcaggaggaacaccggtggcgaaggcggatctctgggccattactgacgctgaggagcgaaagcgtggggagcgaacaggattagataccctggtagtccacgccgtaaacggtgggcactaggtgttggcgacattccacgtcgtcggtgccgcagctaacgcattaagtgccccgcctggggagtacggccgcaaggctaaaactcaaaggaattgacgggggcccgcacaagcggcggagcatgtggcttaattcgacgcaacgcgaagaaccttaccaaggcttgacatacaccggaaacatccagagatgggtgcccccttgtggtcggtgtacaggtggtgcatggctgtcgtcagctcgtgtcgtgagatgttgggttaagtcccgcaacgagcgcaacccttgtcccgtgttgccagcaggcccttgtggtgctggggactcacgggagaccgccggggtcaactcggaggaaggtggggacgacgtcaagtcatcatgccccttatgtcttgggctgcacacgtgctacaatggccggtacaatgagctgcgataccgtgaggtggagcgaatctcaaaaagccggtctcagttcggattggggtctgcaactcgaccccatgaagtcggagtcgctagtaatcgcagatcagcattgctgcggtgaatacgttcccgggccttgtacacaccgcccgtcacgtcacgaaagtcggtaacacccgaagccggtggcccaacccctcggggagggagctgtcgaaggtgggactggcgattgggacgaagtcgtaacaaggtagccgtaccggaaggtgcggctggatcacctccttt

SEQ ID NO: 1702 - DNA, 1528 bp, artificial sequence; identical to SEQ ID NO: 549
  GCF_003462365.1_02556_Roseburia_faecis

SEQ ID NO: 1703 - DNA, 1527 bp, artificial sequence
  GCF_005845255.1_03251_Roseburia_faecis
tatagagtttgatcctggctcagattgaacgctggcggcatgccttacacatgcaagtcgaacggcagcacgggagcaatcctggtggcgagtggcgaacgggtgagtaatatatcggaacgtgcccagtcgtgggggataacgcagcgaaagctgtgctaataccgcatacgatctatggatgaaagcgggggatcgcaagacctcgcgcgattggagcggccgatatcagattaggtagttggtggggtaaaggctcaccaagccgacgatctgtagctggtctgagaggacgaccagccacactggaactgagacacggtccagactcctacgggaggcagcagtggggaattttggacaatgggcgcaagcctgatccagcaatgccgcgtgcaggatgaaggccttcgggttgtaaactgcttttgtacggaacgaaagggctctggttaatacctggggcatatgacggtaccgtaagaataagcaccggctaactacgtgccagcagccgcggtaatacgtagggtgcgagcgttaatcggaattactgggcgtaaagcgtgcgcaggcggtaatgcaagacagatgtgaaatccccgggcttaacctgggaactgcatttgtgactgcattgctggagtgcggcagagggggatggaattccgcgtgtagcagtgaaatgcgtagatatgcggaggaacaccgatggcgaaggcaatcccctgggcctgcactgacgctcatgcacgaaagcgtggggagcaaacaggattagataccctggtagtccacgccctaaacgatgtcaactggttgttgggtcttaactgactcagtaacgaagctaacgcgtgaagttgaccgcctggggagtacggccgcaaggttgaaactcaaaggaattgacggggacccgcacaagcggtggatgatgtggtttaattcgatgcaacgcgaaaaaccttacccacctttgacatgtatggaatccttcagagatgaaggagtgctcgaaagagagccataacacaggtgctgcatggctgtcgtcagctcgtgtcgtgagatgttgggttaagtcccgcaacgagcgcaacccttgccattagttgctacgaaagggcactctaatgggactgccggtgataaaccggaggaaggtggggatgacgtcaagtcctcatggcccttataggtggggctacacacgtcatacaatggctggtacaaagggttgccaacccgcgagggggagctaatcccataaaaccagtcgtagtccggatcgcagtctgcaactcgactgcgtgaagtcggaatcgctagtaatcgtggatcagaatgtcacggtgaatacgttcccgggtcttgtacacaccgcccgtcacaccatgggagcgggttctgccagaagtagttagcctaaccgcaaggagggcgattaccacggcagggttcgtgactggggtgaagtcgtaacaaggtagccgtatcggaaggtgcggctggatcacctccttt

SEQ ID NO: 1704 - DNA, 1521 bp, artificial sequence
  GCF_005845255.1_03383_Roseburia_faecis
tacggagagtttgatcctggctcaggatgaacgctggcggcgtgcttaacacatgcaagtcgaacggtgaagcccagcttgctgggtggatcagtggcgaacgggtgagtaacacgtgagcaacctgcccctgactctgggataagcgctggaaacggcgtctaatactggatacgagtagcgaccgcatggtcagttactggaaagatttattggttggggatgggctcgcggcctatcagcttgttggtgaggtaatggctcaccaaggcgtcgacgggtagccggcctgagagggtgaccggccacactgggactgagacacggcccagactcctacgggaggcagcagtggggaatattgcacaatgggcgcaagcctgatgcagcaacgccgcgtgagggatgacggccttcgggttgtaaacctcttttagcagggaagaagcgaaagtgacggtacctgcagaaaaagcgccggctaactacgtgccagcagccgcggtaatacgtagggcgcaagcgttatccggaattattgggcgtaaagagctcgtaggcggtttgtcgcgtctgctgtgaaatccggaggctcaacctccggcctgcagtgggtacgggcagactagagtgcggtaggggagattggaattcctggtgtagcggtggaatgcgcagatatcaggaggaacaccgatggcgaaggcagatctctgggccgtaactgacgctgaggagcgaaagggtggggagcaaacaggcttagataccctggtagtccaccccgtaaacgttgggaactagttgtggggtccattccacggattccgtgacgcagctaacgcattaagttccccgcctggggagtacggccgcaaggctaaaactcaaaggaattgacggggacccgcacaagcggcggagcatgcggattaattcgatgcaacgcgaagaaccttaccaaggcttgacatatacgagaacgggccagaaatggtcaactctttggacactcgtaaacaggtggtgcatggttgtcgtcagctcgtgtcgtgagatgttgggttaagtcccgcaacgagcgcaaccctcgttctatgttgccagcacgtaatggtgggaactcatgggatactgccggggtcaactcggaggaaggtggggatgacgtcaaatcatcatgccccttatgtcttgggcttcacgcatgctacaatggccggtacaaagggctgcaataccgcgaggtggagcgaatcccaaaaagccggtcccagttcggattgaggtctgcaactcgacctcatgaagtcggagtcgctagtaatcgcagatcagcaacgctgcggtgaatacgttcccgggtcttgtacacaccgcccgtcaagtcatgaaagtcggtaacacctgaagccggtggcctaacccttgtggagggagccgtcgaaggtgggatcggtaattaggactaagtcgtaacaaggtagccgtaccggaaggtgcggctggatcacctccttt

SEQ ID NO: 1705 - DNA, 1529 bp, artificial sequence
  STR00493_Roseburia_intestinalis
atgagagtttgatcctggctcaggatgaacgctggcggcgtgcttaacacatgcaagtcgaacgaagcactttatttgatttcttcggaatgaagattttgtgactgagtggcggacgggtgagtaacgcgtgggtaacctgcctcatacagggggataacagttggaaacgactgctaataccgcataagcgcacagggtcgcatgacctggtgtgaaaaactccggtggtatgagatggacccgcgtctgattagccagttggtggggtaacggcctaccaaagcgacgatcagtagccgacctgagagggtgaccggccacattgggactgagacacggcccaaactcctacgggaggcagcagtggggaatattgcacaatgggggaaaccctgatgcagcgacgccgcgtgagcgaagaagtatttcggtatgtaaagctctatcagcagggaagaagaaatgacggtacctgactaagaagcaccggctaaatacgtgccagcagccgcggtaatacgtatggtgcaagcgttatccggatttactgggtgtaaagggagcgcaggcggtacggcaagtctgatgtgaaagcccggggctcaaccccggtactgcattggaaactgtcggactagagtgtcggaggggtaagtggaattcctagtgtagcggtgaaatgcgtagatattaggaggaacaccagtggcgaaggcggcttactggacgattactgacgctgaggctcgaaagcgtggggagcaaacaggattagataccctggtagtccacgccgtaaacgatgaatactaggtgtcggggagcattgctcttcggtgccgcagcaaacgcaataagtattccacctggggagtacgttcgcaagaatgaaactcaaaggaattgacggggacccgcacaagcggtggagcatgtggtttaattcgaagcaacgcgaagaaccttaccaagtcttgacatcccgatgacagaacatgtaatgtgttttctcttcggagcatcggtgacaggtggtgcatggttgtcgtcagctcgtgtcgtgagatgttgggttaagtcccgcaacgagcgcaacccctattcttagtagccagcggttcggccgggcactctagggagactgccagggataacctggaggaaggtggggatgacgtcaaatcatcatgccccttatgacttgggctacacacgtgctacaatggcgtaaacaaagggaagcgagcctgcgagggggagcaaatctcaaaaataacgtctcagttcggactgcagtctgcaactcgactgcacgaagctggaatcgctagtaatcgcgaatcagaatgtcgcggtgaatacgttcccgggtcttgtacacaccgcccgtcacaccatgggagttggtaatgcccgaagtcagtgacccaaccgcaaggagggagctgccgaaggcaggatcgataactggggtgaagtcgtaacaaggtagccgtatcggaaggtgcggctggatcacctccttt

SEQ ID NO: 1706 - DNA, 1529 bp, artificial sequence; identical to SEQ ID NO: 1705
  STR00511_Roseburia_intestinalis

SEQ ID NO: 1707 - DNA, 1518 bp, artificial sequence
  STR00877_Roseburia_intestinalis
atgagagtttgatcctggctcaggatgaacgctggcggcgtgcttaacacatgcaagtcgaacgaagcactttatttgatttcttcggaatgaagattttgtgactgagtggcggacgggtgagtaacgcgtgggtaacctgcctcatacagggggataacagttggaaacgactgctaataccgcataagcgcacagggtcgcatgacctggtgtgaaaaactccggtggtatgagatggacccgcgtctgattagccagttggtggggtaacggcctaccaaagcgacgatcagtagccgacctgagagggtgaccggccacattgggactgagacacggcccaaactcctacgggaggcagcagtggggaatattgcacaatgggggaaaccctgatgcagcgacgccgcgtgagcgaagaagtatttcggtatgtaaagctctatcagcagggaagaagaaatgacggtacctgactaagaagcaccggctaaatacgtgccagcagccgcggtaatacgtatggtgcaagcgttatccggatttactgggtgtaaagggagcgcaggcggtacggcaagtctgatgtgaaagcccggggctcaaccccggtactgcattggaaactgtcggactagagtgtcggaggggtaagtggaattcctagtgtagcggtgaaatgcgtagatattaggaggaacaccagtggcgaaggcggcttactggacgattactgacgctgaggctcgaaagcgtggggagcaaacaggattagataccctggtagtccacgccgtaaacgatgaatactaggtgtcggggagcattgctcttcggtgccgcagcaaacgcaataagtattccacctggggagtacgttcgcaagaatgaaactcaaaggaattgacggggacccgcacaagcggtggagcatgtggtttaattcgaagcaacgcgaagaaccttaccaagtcttgacatcccgatgacagaacatgtaatgtgttttctcttcggagcatcggtgacaggtggtgcatggttgtcgtcagctcgtgtcgtgagatgttgggttaagtcccgcaacgagcgcaacccctattcttagtagccagcggttcggccgggcactctagggagactgccagggataacctggaggaaggtggggatgacgtcaaatcatcatgccccttatgacttgggctacacacgtgctacaatggcgtaaacaaagggaagcgagcctgcgagggggagcaaatctcaaaaataacgtctcagttcggactgcagtctgcaactcgactgcacgaagctggaatcgctagtaatcgcgaatcagaatgtcgcggtgaatacgttcccgggtcttgtacacaccgcccgtcacaccatgggagttggtaatgcccgaagtcagtgacccaaccgcaaggagggagctgccgaaggcaggatcgataactggggtgaagtcgtaacaaggtagccgtatcggaaggtgcggctgga

SEQ ID NO: 1708 - DNA, 1226 bp, artificial sequence
  STR00960_Roseburia_intestinalis
cctgagagggtgaccggccacattgggactgagacacggcccaaactcctacgggaggcagcagtggggaatattgcacaatgggggaaaccctgatgcagcgacgccgcgtgagcgaagaagtatttcggtatgtaaagctctatcagcagggaagaagaaatgacggtacctgactaagaagcaccggctaaatacgtgccagcagccgcggtaatacgtatggtgcaagcgttatccggatttactgggtgtaaagggagcgcaggcggtacggcaagtctgatgtgaaagcccggggctcaaccccggtactgcattggaaactgtcggactagagtgtcggaggggtaagtggaattcctagtgtagcggtgaaatgcgtagatattaggaggaacaccagtggcgaaggcggcttactggacgattactgacgctgaggctcgaaagcgtggggagcaaacaggattagataccctggtagtccacgccgtaaacgatgaatactaggtgtcggggagcattgctcttcggtgccgcagcaaacgcaataagtattccacctggggagtacgttcgcaagaatgaaactcaaaggaattgacggggacccgcacaagcggtggagcatgtggtttaattcgaagcaacgcgaagaaccttaccaagtcttgacatcccgatgacagaacatgtaatgtgttttctcttcggagcatcggtgacaggtggtgcatggttgtcgtcagctcgtgtcgtgagatgttgggttaagtcccgcaacgagcgcaacccctattcttagtagccagcgggtaagccgggcactctagggagactgccagggataacctggaggaaggtggggatgacgtcaaatcatcatgccccttatgacttgggctacacacgtgctacaatggcgtaaacaaagggaagcgagcctgcgagggggagcaaatctcaaaaataacgtctcagttcggactgcagtctgcaactcgactgcacgaagctggaatcgctagtaatcgcgaatcagaatgtcgcggtgaatacgttcccgggtcttgtacacaccgcccgtcacaccatgggagttggtaatgcccgaagtcagtgacccaaccgcaaggagggagctgccgaaggcaggatcgataactggggtgaagtcgtaacaaggtagccgtatcggaaggtgcggctggatcacctccttt

SEQ ID NO: 1709 - DNA, 1203 bp, artificial sequence
  STR01679_Roseburia_intestinalis
atgagagtttgatcctggctcaggatgaacgctggcggcgtgcttaacacatgcaagtcgaacgaagcactttatttgatttcttcggaatgaagattttgtgactgagtggcggacgggtgagtaacgcgtgggtaacctgcctcatacagggggataacagttggaaacgactgctaataccgcataagcgcacagggtcgcatgacctggtgtgaaaaactccggtggtatgagatggacccgcgtctgattagccagttggtggggtaacggcctaccaaagcgacgatcagtagccgacctgagagggtgaccggccacattgggactgagacacggcccaaactcctacgggaggcagcagtggggaatattgcacaatgggggaaaccctgatgcagcgacgccgcgtgagcgaagaagtatttcggtatgtaaagctctatcagcagggaagaagaaatgacggtacctgactaagaagcaccggctaaatacgtgccagcagccgcggtaatacgtatggtgcaagcgttatccggatttactgggtgtaaagggagcgcaggcggtacggcaagtctgatgtgaaagcccggggctcaaccccggtactgcattggaaactgtcggactagagtgtcggaggggtaagtggaattcctagtgtagcggtgaaatgcgtagatattaggaggaacaccagtggcgaaggcggcttactggacgattactgacgctgaggctcgaaagcgtggggagcaaacaggattagataccctggtagtccacgccgtaaacgatgaatactaggtgtcggggagcattgctcttcggtgccgcagcaaacgcaataagtattccacctggggagtacgttcgcaagaatgaaactcaaaggaattgacggggacccgcacaagcggtggagcatgtggtttaattcgaagcaacgcgaagaaccttaccaagtcttgacatcccgatgacagaacatgtaatgtgttttctcttcggagcatcggtgacaggtggtgcatggttgtcgtcagctcgtgtcgtgagatgttgggttaagtcccgcaacgagcgcaacccctattcttagtagccagcgggtaagccgggcactctagggagactgccagggataacctggaggaaggtggggatgacgtcaaatcatcatgccccttatga

SEQ ID NO: 1710 - DNA, 1529 bp, artificial sequence; identical to SEQ ID NO: 1705
  STR01692_Roseburia_intestinalis

SEQ ID NO: 1711 - DNA, 1529 bp, artificial sequence
  STR02114_Roseburia_intestinalis
atgagagtttgatcctggctcaggatgaacgctggcggcgtgcttaacacatgcaagtcgaacgaagcactttatttgatttcttcggaatgaagattttgtgactgagtggcggacgggtgagtaacgcgtgggtaacctgcctcatacagggggataacagttggaaacgactgctaataccgcataagcgcacagggtcgcatgacctggtgtgaaaaactccggtggtatgagatggacccgcgtctgattagccagttggtggggtaacggcctaccaaagcgacgatcagtagccgacctgagagggtgaccggccacattgggactgagacacggcccaaactcctacgggaggcagcagtggggaatattgcacaatgggggaaaccctgatgcagcgacgccgcgtgagcgaagaagtatttcggtatgtaaagctctatcagcagggaagaagaaatgacggtacctgactaagaagcaccggctaaatacgtgccagcagccgcggtaatacgtatggtgcaagcgttatccggatttactgggtgtaaagggagcgcaggcggtacggcaagtctgatgtgaaagcccggggctcaaccccggtactgcattggaaactgtcggactagagtgtcggaggggtaagtggaattcctagtgtagcggtgaaatgcgtagatattaggaggaacaccagtggcgaaggcggcttactggacgattactgacgctgaggctcgaaagcgtggggagcaaacaggattagataccctggtagtccacgccgtaaacgatgaatactaggtgtcggggagcattgctcttcggtgccgcagcaaacgcaataagtattccacctggggagtacgttcgcaagaatgaaactcaaaggaattgacggggacccgcacaagcggtggagcatgtggtttaattcgaagcaacgcgaagaaccttaccaagtcttgacatcccgatgacagaacatgtaatgtgttttctcttcggagcatcggtgacaggtggtgcatggttgtcgtcagctcgtgtcgtgagatgttgggttaagtcccgcaacgagcgcaacccctattcttagtagccagcgggtaagccgggcactctagggagactgccagggataacctggaggaaggtggggatgacgtcaaatcatcatgccccttatgacttgggctacacacgtgctacaatggcgtaaacaaagggaagcgagcctgcgagggggagcaaatctcaaaaataacgtctcagttcggactgcagtctgcaactcgactgcacgaagctggaatcgctagtaatcgcgaatcagaatgtcgcggtgaatacgttcccgggtcttgtacacaccgcccgtcacaccatgggagttggtaatgcccgaagtcagtgacccaaccgcaaggagggagctgccgaaggcaggatcgataactggggtgaagtcgtaacaaggtagccgtatcggaaggtgcggctggatcacctccttt

SEQ ID NO: 1712 - DNA, 1529 bp, artificial sequence; identical to SEQ ID NO: 1711
  STR02198_Roseburia_intestinalis

SEQ ID NO: 1713 - DNA, 1078 bp, artificial sequence
  STR02634_Roseburia_intestinalis
gcagggaagaagaaatgacggtacctgactaagaagcaccggctaaatacgtgccagcagccgcggtaatacgtatggtgcaagcgttatccggatttactgggtgtaaagggagcgcaggcggtacggcaagtctgatgtgaaagcccggggctcaaccccggtactgcattggaaactgtcggactagagtgtcggaggggtaagtggaattcctagtgtagcggtgaaatgcgtagatattaggaggaacaccagtggcgaaggcggcttactggacgattactgacgctgaggctcgaaagcgtggggagcaaacaggattagataccctggtagtccacgccgtaaacgatgaatactaggtgtcggggagcattgctcttcggtgccgcagcaaacgcaataagtattccacctggggagtacgttcgcaagaatgaaactcaaaggaattgacggggacccgcacaagcggtggagcatgtggtttaattcgaagcaacgcgaagaaccttaccaagtcttgacatcccgatgacagaacatgtaatgtgttttctcttcggagcatcggtgacaggtggtgcatggttgtcgtcagctcgtgtcgtgagatgttgggttaagtcccgcaacgagcgcaacccctattcttagtagccagcgggtaagccgggcactctagggagactgccagggataacctggaggaaggtggggatgacgtcaaatcatcatgccccttatgacttgggctacacacgtgctacaatggcgtaaacaaagggaagcgagcctgcgagggggagcaaatctcaaaaataacgtctcagttcggactgcagtctgcaactcgactgcacgaagctggaatcgctagtaatcgcgaatcagaatgtcgcggtgaatacgttcccgggtcttgtacacaccgcccgtcacaccatgggagttggtaatgcccgaagtcagtgacccaaccgcaaggagggagctgccgaaggcaggatcgataactggggtgaagtcgtaacaaggtagccgtatcggaaggtgcggctggatcacctccttt

SEQ ID NO: 1714 - DNA, 1472 bp, artificial sequence; identical to SEQ ID NO: 931
  ERR1022474_03849_Roseburia_intestinalis

SEQ ID NO: 1715 - DNA, 1477 bp, artificial sequence
  ERR2221171_04099_Roseburia_intestinalis
ttctggttgatcctgccagaggttactgctatcggtgttcgtctaagccatgcgagttatatgttcttcgtgaacatggcgtactgctcagtaacacgtggataacctgcccttgggtccggcataaccccgggaaactggggataataccggataacgcacatatgctggaatgctttatgcgtaaaatggattcgtctgcccaaggatgggtctgcggcctatcaggtagtagtgggtgtaatgtacctactagcctacaacgggtacgggttgtgagagcaagagcccggagatggattctgagacatgaatccaggccctacggggcgcagcaggcgcgaaaactttacaatgcgggaaaccgtgataaggggacaccgagtgctagcatcatatgctggctgtccaggtgtgtaaaatacacctgttagcaagggccgggcaagaccggtgccagccgccgcggtaacaccggcggcccgagtggtgatcgtgattattgggtctaaagggtccgtagccggtttggtcagtcctccgggaaatctgatagctcaactattaggctttcgggggatactgccagacttggaaccgggagaggtaagaggtactacaggggtaggagtgaaatcttgtaatccctgtgggaccacctgtggcgaaggcgtcttaccagaacgggttcgacggtgagggacgaaagctgggggcacgaaccggattagatacccgggtagtcccagccgtaaacgatgctcgctaggtgtcaggcatggcgcgaccgtgtctggtgccgcagggaagccgtgaagcgagccacctgggaagtacggccgcaaggctgaaacttaaaggaattggcgggggagcacaacaacgggtggagcctgcggtttaattggactcaacgccggacaactcaccgggaacgacagcaatatgtaggtcaggccgaagaccttacctgaatcgctgagaggaggtgcatggccgtcgccagttcgtactgtgaagcatcctgttaagtcaggcaacgagcgagacccgtgcccactgttaccagcatatcctccgggatgatgggtactctgtggggaccgccggtgttaaatcggaggaaggtgcgggccacggtaggtcagtatgccccgaatttcccgggctacacgcgggctacaatgaatgggacaatgggtccctcccctgaaaagggctggtaatctcacaaacccatccttagttcggatcgagggctgtaactcgccctcgtgaagctggaatccgtagtaatcgcgtttcaatatagcgcggtgaatacgtccctgctccttgcacacaccgcccgtcaaaccacccgagtgaggtatgggtgagggcacgaacatcgtgtcgtgttcgaacctgtgctttgcaaggggggttaagtcgtaacaaggtagccgtaggggaatctgcggctggatcacctcct

SEQ ID NO: 1716 - DNA, 944 bp, artificial sequence
  ERR2230070_03864_Roseburia_intestinalis
attccggttgatcctgccggaggccattgctattggagtccgatttagccatgctagttgcacgggttcagacccgtagcagatagctcagtaacacgtggccaaactaccctctggagcgcaataacctcgggaaactgaggctaatggcgcatacggctcggcacctggagtgggccgagcttgaaacgctccggcgccagaggatgtggctgcggccgattaggtagacggtggggtaacggcccaccgtgccagtaatcggtacgggttgtgagagcaagagcccggagacggtatctgagacaagataccgggccctacggggcgcagcaggcgcgaaacctttacactgcacgccagtgcgataaggggactccaagtgcgagggcatatagtcctcgcttttctggaccgtaaggtggtccaggaataagtgctgggcaagaccggtgccagccgccgcggtaataccggcagcacgagtgatggccgctcttattgggcctaaagcgtccgtagctggccgatcaagtccgtcgggaaatccgcacgcccaacgtgcgggcgtccggtggaaactgatcggcttgggaccggaagaccagaggggtacgtccggggtaggagtgaaatcccgtaatcctggacggaccaccggtggcgaaagcgcctctggaagacggatccgacggtgagggacgaaagctcgggtcacgaaccggattagatacccgggtagtccgagctgtaaacgatgtctgctaggtgtgacacaggctacgagcctgtgttgtgccgtagggaagccgtgaagcagaccgcctgggaagtacgtccgcaaggatgaaacttaaaggaattggcgggggagcactacaaccggaggagcctgcggtttaattggactcaacgccggacatctcaccagcatcgacagtagc

SEQ ID NO: 1717 - DNA, 1541 bp, artificial sequence
  GCF_000156535.1_01739_Roseburia_intestinalis
tgaagagtttgatcctggctcagagtgaacgctggcggtaggcctaacacatgcaagtcgaacggcagcacagaggagcttgctccttgggtggcgagtggcggacgggtgaggaatacatcggaatctactctttcgtgggggataacgtagggaaacttacgctaataccgcatacgcccttcgggggaaagcaggggatcgcaagaccttgcgcgattgaatgagccgatgtcggattagctagttggcggggtaacggcccaccaaggcgacgatccgtagctggtctgagaggatgatcagccacactggaactgagacacggtccagactcctacgggaggcagcagtggggaatattggacaatgggcgcaagcctgatccagccataccgcgtgggtgaagaaggccttcgggttgtaaagcccttttgttgggaaagaaaagcattcggttaatacccgagtgttctgacggtacccaaagaataagcaccggctaacttcgtgccagcagccgcggtaatacgaagggtgcaagcgttactcggaattactgggcgtaaagcgtgcgtaggtggtgatttaagtccgttgtgaaagccctgggctcaacctgggaattgcagtggatactgggtcactagagtgtggtagaggatagtggaatttccggtgtagcagtgaaatgcgtagagatcggaaggaacatctgtggcgaaggcgactatctgggccaacactgacactgaggcacgaaagcgtggggagcaaacaggattagataccctggtagtccacgccctaaacgatgcgaactggatgttgggttcaacttggaacccagtatcgaagctaacgcgttaagttcgccgcctggggagtacggtcgcaagactgaaactcaaaggaattgacgggggcccgcacaagcggtggagtatgtggtttaattcgatgcaacgcgaagaaccttacctggtcttgacatccacggaactttccagagatggattggtgccttcgggaaccgtgagacaggtgctgcatggctgtcgtcagctcgtgtcgtgagatgttgggttaagtcccgcaacgagcgcaacccttgtccttagttgccagcacgtaatggtgggaactctaaggagaccgccggtgacaaaccggaggaaggtggggatgacgtcaagtcatcatggcccttacgaccagggctacacacgtactacaatggtggggacagagggctgcaatcccgcgagggtgagccaatcccagaaaccctatctcagtccggattggagtctgcaactcgactccatgaagtcggaatcgctagtaatcgcagatcagcattgctgcggtgaatacgttcccgggccttgtacacaccgcccgtcacaccatgggagtttgttgcaccagaagcaggtagcttaaccgcaaggagggcgcttgccacggtgtggccgatgactggggtgaagtcgtaacaaggtagccgtatcggaaggtgcggctggatcacctccttt

SEQ ID NO: 1718 - DNA, 1491 bp, artificial sequence
  GCF_001406435.1_03942_Roseburia_intestinalis
atgagagtttgatcctggctcagaacgaacgctggcggcaggcctaacacatgcaagtcggacgagaaggtaccttcgggtactggagagtggcgcacgggtgagtaacgcgtggggacctacctcttagtgggggataacggttggaaacgaccgctaataccgcatacgcccttcgggggaaagatttatcgctaagagatggacccgcgttggattagatagttggtgaggtaacggctcaccaagtcagcgatccatagctggtttgagaggatgatcagccacactgggactgagacacggcccagactcctacgggaggcagcagtggggaatattggacaatgggggcaaccctgatccagccatgccgcgtgagtgaagaaggccttcgggttgtaaagctctttcagatgcgaagatgatgacggtaacatcagaagaagccccggctaatttcgtgccagcagccgcggtaatacgaaaggggctagcgttgttcggatttactgggcgtaaagggcacgcaggcggtcttgccagtcaggggtgaaagcccgaggctcaacctcggaactgcctctgatactgtaagacttgagactaggagagggtggtggaattcccagtgtagaggtgaaattcgtagatattgggaggaacaccagaggcgaaggcggccacctggactagatctgacgctcaggtgcgaaagcgtggggagcaaacaggattagataccctggtagtccacgccgtaaacgatgagtgctagttgtcgggatttcgatttcggtgacgcagctaacgcattaagcactccgcctggggagtacggtcgcaagattaaaactcaaaggaattgacgggggcccgcacaagcggtggagcatgtggtttaattcgaagcaacgcgcagaaccttaccaacccttgacatccctatcgcgattaccagagatggttttcatcagttcggctggataggtgacaggtgctgcatggctgtcgtcagctcgtgtcgtgagatgttgggttaagtcccgcaacgagcgcaacccctgttcctagttgccagcatttagttgggcactctagggagactgccggtgacaagccggaggaaggcggggatgacgtcaagtcctcatggcccttacgggttgggctacacacgtgctacaatggtaactacagagggcagcgacttagcgataagtagccaatcccaaaaagttatctcagttcggattgcactctgcaactcgagtgcatgaagttggaatcgctagtaatcgtggatcagcatgccacggtgaatacgttcccgggccttgtacacaccgcccgtcacaccatgggagttggttttacccgaagacggtgggctaaccttttaggaggcagccggccacggtaaggtcagcgactggggtgaagtcgtaacaaggtagccgtaggggaacctgcggctggatcacctccttt

SEQ ID NO: 1719 - DNA, 1513 bp, artificial sequence; identical to SEQ ID NO: 1620
  GCF_003463035.1_03527_Roseburia_intestinalis

SEQ ID NO: 1720 - DNA, 1529 bp, artificial sequence
  GCF_003467035.1_01608_Roseburia_intestinalis
tgtagagtttgatcctggctcagattgaacgctggcggcatgccttacacatgcaagtcgaacggtaacaggtcttcggatgctgacgagtggcgaacgggtgagtaatacatcggaacgtgcccgagagtgggggataacgaagcgaaagctttgctaataccgcatacgatctcaggatgaaagcaggggaccgcaaggccttgcgctcacggagcggccgatggcagattaggtagttggtgggataaaagcttaccaagccgacgatctgtagctggtctgagaggacgaccagccacactgggactgagacacggcccagactcctacgggaggcagcagtggggaattttggacaatgggcgcaagcctgatccagccatgccgcgtgcaggatgaaggccttcgggttgtaaactgcttttgtacggaacgaaaagactctggttaatacctggggtccatgacggtaccgtaagaataagcaccggctaactacgtgccagcagccgcggtaatacgtagggtgcgagcgttaatcggaattactgggcgtaaagcgtgcgcaggcggttatgtaagacagatgtgaaatccccgggctcaacctgggaactgcatttgtgactgcatagctagagtacggcagagggggatggaattccgcgtgtagcagtgaaatgcgtagatatgcggaggaacaccgatggcgaaggcaatcccctgggcctgtactgacgctcatgcacgaaagcgtggggagcaaacaggattagataccctggtagtccacgccctaaacgatgtcaactggttgttgggtcttcactgactcagtaacgaagctaacgcgtgaagttgaccgcctggggagtacggccgcaaggttgaaactcaaaggaattgacggggacccgcacaagcggtggatgatgtggtttaattcgatgcaacgcgaaaaaccttacccacctttgacatgtacggaatcctttagagatagaggagtgctcgaaagagagccgtaacacaggtgctgcatggctgtcgtcagctcgtgtcgtgagatgttgggttaagtcccgcaacgagcgcaacccttgtcattagttgctacattcagttgggcactctaatgagactgccggtgacaaaccggaggaaggtggggatgacgtcaagtcctcatggcccttataggtggggctacacacgtcatacaatggctggtacagagggttgccaacccgcgagggggagccaatcccataaagccagtcgtagtccggatcgcagtctgcaactcgactgcgtgaagtcggaatcgctagtaatcgcggatcagaatgtcgcggtgaatacgttcccgggtcttgtacacaccgcccgtcacaccatgggagcgggttctgccagaagtagttagcctaaccgtaaggagggcgattaccacggcagggttcgtgactggggtgaagtcgtaacaaggtagccgtatcggaaggtgcggctggatcacctccttt

SEQ ID NO: 1721 - DNA, 1541 bp, artificial sequence
  GCF_003467725.1_03161_Roseburia_intestinalis
ttgaagagtttgatcatggctcagattgaacgctggcggcaggcctaacacatgcaagtcgagcggtaacatttcaaaagcttgcttttgaagatgacgagcggcggacgggtgagtaatgcctagggaactgcccagtcgagggggataacagttggaaacgactgctaataccgcatacgccctacgggggaaaagaggggatcttcggaccttctgcgattggatgtacctaggtgggattagctagtaggtgaggtaatggctcacctaggcgacgatccctagctgttctgagaggatgatcagccacactgggactgagacacggcccagactcctacgggaggcagcagtggggaatattgcacaatgggcgcaagcctgatgcagccatgccgcgtgtgtgaagaaggccttcgggttgtaaagcactttcagcgaggaggaaaggttaacggttaatacccgttagctgtgacgttactcgcagaagaagcaccggctaacttcgtgccagcagccgcggtaatacgaggggtgcaagcgttaatcggaattactgggcgtaaagcgtacgcaggcggttgattaagcgagatgtgaaagccccgggcttaacctgggaactgcatttcgaactggtcaactagagtcttgtagaggggggtagaatttcaggtgtagcggtgaaatgcgtagagatctgaaggaataccggtggcgaaggcggccccctggacaaagactgacgctcaggtacgaaagcgtggggagcaaacaggattagataccctggtagtccacgccgtaaacgatgtctactcggaatttggtgtcttgaacactgggttctcaagctaacgcattaagtagaccgcctggggagtacggccgcaaggttaaaactcaaatgaattgacgggggcccgcacaagcggtggagcatgtggtttaattcgatgcaacgcgaagaaccttacctactcttgacatccagagaacttttcagagatgaattggtgccttcgggaactctgagacaggtgctgcatggctgtcgtcagctcgtgttgtgaaatgttgggttaagtcccgcaacgagcgcaacccttatccttacttgccagcgggtaatgccgggaactttagggagactgccggtgataaaccggaggaaggtggggacgacgtcaagtcatcatggcccttacgagtagggctacacacgtgctacaatggtcggtacagagggttgcgaagccgcgaggtggagctaatctcacaaagccggtcgtagtccggattggagtctgcaactcgactccatgaagtcggaatcgctagtaatcgtggatcagaatgccacggtgaatacgttcccgggccttgtacacaccgcccgtcacaccatgggagtgggctgcaccagaagtagatagcttaaccttcgggagggcgtttaccacggtgtggttcatgactggggtgaagtcgtaacaaggtagccctaggggaacctggggctggatcacctcctt

SEQ ID NO: 1722 - DNA, 1541 bp, artificial sequence; identical to SEQ ID NO: 1721
  GCF_003467725.1_03170_Roseburia_intestinalis

SEQ ID NO: 1723 - DNA, 1544 bp, artificial sequence
  GCF_003470905.1_03438_Roseburia_intestinalis
acggagagtttgatcctggctcaggacgaacgctggcggcgtgcttaacacatgcaagtggagcgacgaaccagggcttgccctggggcagagccgcgaacgggtgagtaacacgtgggtaacctaccccgatgaccgggacaacccgaggaaactcgggctaataccggatgttctcgtttctcgtaagggaaccgagtaaagatagctttggccttcgcatcgggacgggcccgcggcccattagcttgttggtgaggtaacggcttaccaaggcgacgatgggtagctggtctgagaggacgatcagccacactgggactgagacacggcccagactcctacgggaggcagcagtggggaatcttgcgcaatgggcgaaagcctgacgcagcaacgccgcgtgggggaagaaggccttcgggttgtaaacccctttcagttgggacgaagcttccagagttaatagctttgtggagtgacggtaccttcagaagaagccccggctaactacgtgccagcagccgcggtaatacgtagggggctagcgttgtccggaatcattgggcgtaaagcgcgtgtaggcggtccggtaagtccgctgtgaaagtcgggggctcaaccctcggatgccggtggatactgtcgggcttgagtacggaagaggcgagtggaattcctggtgtagcggtgaaatgcgcagatatcaggaggaacaccaattgcgaaggcagctcgctgggacgttactgacgctgagacgcgaaagcgtggggagcaaacaggattagataccctggtagtccacgctgtaaacgatgggcactaggtgtggggggtgtcgactccctccgtgccgaagctaacgcattaagtgccccgcctggggagtacggccgcaaggctaaaactcaaaggaattgacgggggcccgcacaagcagcggagcatgtggtttaattcgacgcaacgcgaagaaccttacctgggcttgacatgttcctgaccgtcctggaaacagggcttcccttcggggcaggatcacaggtggtgcatggctgtcgtcagctcgtgtcgtgagatgttgggttaagtcccgcaacgagcgcaacccccgtcgcatgttgccagcatttagttggggactcatgcgagactgccggtgacaaaccggaggaaggtggggatgacgtcaagtcatcatgccccttatgtccagggctacacacgtgctacattggcgcgtacagagggctgcgataccgcgaggtggagcgaatcccttaaagcgcgtctcggttcggattgcaggctgaaacccgcctgcatgaaggcggagttgctagtaatcgcggatcagcattgccgcggtgaatacgttcccgggccttgtacacaccgcccgtcacaccatggaagcaagtaacacccgaagccggtggcctaacccgcaagggagggagctgtcgaaggtgggactcgtgactggggtgaagtcgtaacaaggtagccgtaccggaaggtgcggctggatcacctccttt

SEQ ID NO: 1724 - DNA, 1529 bp, artificial sequence; identical to SEQ ID NO: 867
  GCF_003471045.1_01880_Roseburia_intestinalis

SEQ ID NO: 1725 - DNA, 1527 bp, artificial sequence
  GCF_003474885.1_03503_Roseburia_intestinalis
tgaagagtttgatcctggctcagattgaacgctggcggcatgccttacacatgcaagtcgaacggcagcacggagcttgctctggtggcgagtggcgaacgggtgagtaatatatcggaacgtaccctagagtgggggataacgtagcgaaagttacgctaataccgcatacgatctaaggatgaaagtgggggatcgcaagacctcatgctcgtggagcggccgatatctgattagctagttggtagggtaaaagcctaccaaggcatcgatcagtagctggtctgagaggacgaccagccacactggaactgagacacggtccagactcctacgggaggcagcagtggggaattttggacaatgggcgaaagcctgatccagcaatgccgcgtgagtgaagaaggccttcgggttgtaaagctcttttgtcagggaagaaacggtgaaagctaatatcttttgctaatgacggtacctgaagaataagcaccggctaactacgtgccagcagccgcggtaatacgtagggtgcaagcgttaatcggaattactgggcgtaaagcgtgcgcaggcggttttgtaagtctgatgtgaaatccccgggctcaacctgggaattgcattggagactgcaaggctagaatctggcagaggggggtagaattccacgtgtagcagtgaaatgcgtagatatgtggaggaacaccgatggcgaaggcagccccctgggtcaagattgacgctcatgcacgaaagcgtggggagcaaacaggattagataccctggtagtccacgccctaaacgatgtctactagttgtcgggtcttaattgacttggtaacgcagctaacgcgtgaagtagaccgcctggggagtacggtcgcaagattaaaactcaaaggaattgacggggacccgcacaagcggtggatgatgtggattaattcgatgcaacgcgaaaaaccttacctacccttgacatggctggaatccttgagagatcagggagtgctcgaaagagaaccagtacacaggtgctgcatggctgtcgtcagctcgtgtcgtgagatgttgggttaagtcccgcaacgagcgcaacccttgtcattagttgctacgaaagggcactctaatgagactgccggtgacaaaccggaggaaggtggggatgacgtcaagtcctcatggcccttatgggtagggcttcacacgtcatacaatggtacatacagagcgccgccaacccgcgagggggagctaatcgcagaaagtgtatcgtagtccggattgtagtctgcaactcgactgcatgaagttggaatcgctagtaatcgcggatcagcatgtcgcggtgaatacgttcccgggtcttgtacacaccgcccgtcacaccatgggagcgggttttaccagaagtaggtagcttaaccgcaaggagggcgcttaccacggtaggattcgtgactggggtgaagtcgtaacaaggtagccgtatcggaaggtgcggctggatcacctccttt

SEQ ID NO: 1726 - DNA, 917 bp, artificial sequence
  GCF_003475515.1_02479_Roseburia_intestinalis
acggagagtttgatcctggctcaggatgaacgctggcggtatgcttaacacatgcaagtcgaacgggctccttagggagctagtggcggacgggtgagtaacgcgtgagaatctagcttcaggttcgggacaacattgggaaaccgatgctaataccggatgtgccgagaggtgaaaggcttgctgccggaagaagagctcgcgtctgattagctagttggtggtgtaagggactaccaaggcgacgatcagtagctggtctgagaggatgatcagccacactggaactgagacacggtccagactcctacgggaggcagcagtggggaattttccgcaatgggcgaaagcctgacggagcaataccgcgtgagggaggaaggctcttgggttgtaaacctcttttctcaaggaagaagtgatgacggtacttgaggaatcagcatcggctaactccgtgccagcagccgcggtaatacggaggatgcaagcgttatccggaatgattgggcgtaaagcgtccgcaggtggttgtgtgtgtctattgtcaaagcatcatgcttaacatgataaaggcagtagaaactacacgactagagtgcgttcggggcagagggaattcctggtgtagcggtgaaatgcgtagagatcaggaagaacaccggtggcgaaagcgctctgctaggccgcaactgacactgagggacgaaagctaggggagcgaatgggattagataccccagtagtcctagccgtaaacgatggatactaggcgttgagagtatcgaccctctcagtgccgtagctaacgcgttaagtatcccgcctggggagtacgcacgcaagtgtgaaactcaaaggaattgacgggggcccgcacaagcggtggagtatgtggtttaattcgatgcaacgcg

SEQ ID NO: 1727 - DNA, 1510 bp, artificial sequence
  GCF_900537995.1_00022_Roseburia_intestinalis
tatggagagtttgatcctggctcagagtgaacgctggcggcgtgcctaatacatgcaagtcgaacgatgaagcaactagcttgctagttgtggattagtggcgcacgggtgagtaaggtatagttaatctgccctacacaagaggacaacagttggaaacgactgctaatactctatactcctatttaacataagttgagtagggaaagtttttcggtgtaggatgagactatatagtatcagctagttggtgaggtaatggctcaccaaggctatgacgcttaactggtctgagaggatgatcagtcacactggaactgagacacggtccagactcctacgggaggcagcagtagggaatattgcgcaatgggggaaaccctgacgcagcaacgccgcgtggaggatgacacttttcggagcgtaaactccttttcttagggaagaattctgacggtacctaaggaataagcaccggctaactccgtgccagcagccgcggtaatacggagggtgcaagcgttactcggaatcactgggcgtaaagggcgcgtaggcggattatcaagtctcttgtgaaatctaatggctcaaccattaaactgcttgggaaactgataatctagagtgagggagaggcagatggaattggtggtgtaggggtaaaatccgtagatatcaccaagaatacccattgcgaaggcgatctgctggaacttaactgacgctaaggcgcgaaagcgtggggagcaaacaggattagataccctggtagtccacgccctaaacgatgtacactagttgttgggatgctagtcatctcagtaatgcagctaacgcattaagtgtaccgcctggggagtacggtcgcaagattaaaactcaaaggaatagacggggacccgcacaagcggtggagcatgtggtttaattcgaagatacgcgaagaaccttacctgggcttgatatcctaagaaccttatagagatatgagggtgctagcttgctagaacttagagacaggtgctgcacggctgtcgtcagctcgtgtcgtgagatgttgggttaagtcccgcaacgagcgcaacccacgtatttagttgctaacggttaggccgagcactctaaatagactgccttcgtaaggaggaggaaggtgtggacgacgtcaagtcatcatggcccttatgcccagggcgacacacgtgctacaatggcatatacaatgagacgcaatatcgcaaggtggagcaaatctataaaatatgtcccagttcggattgttctctgcaactcgagagcatgaagccggaatcgctagtaatcgtagatcagccatgctacggtgaatacgttcccgggtcttgtactcaccgcccgtcacaccatgggagttgatttcactcgaagccggaatactaaactagttaccgtccacagtggaatcagcgactggggtgaagtcgtaacaaggtaaccgtaggagaacctgcggttggatcacctcctt

SEQ ID NO: 1728 - DNA, 1510 bp, artificial sequence; identical to SEQ ID NO: 1727
  GCF_900537995.1_00191_Roseburia_intestinalis

SEQ ID NO: 1729 - DNA, 1071 bp, artificial sequence
  GCF_900537995.1_00675_Roseburia_intestinalis
accgtgacggtacctaacgagaaagccacggctaactacgtgccagcagccgcggtaatacgtaggtggcaagcgttgtccggaattattgggcgtaaagcgcgcgcaggcggttccttaagtctgatgtgaaagcccacggctcaaccgtggagggtcattggaaactgggggacttgagtgcagaagaggagagcggaattccacgtgtagcggtgaaatgcgtagagatgtggaggaacaccagtggcgaaggcggctctctggtctgtaactgacgctgaggcgcgaaagcgtggggagcaaacaggattagataccctggtagtccacgccgtaaacgatgagtgctaagtgttagagggtatccaccctttagtgctgtagctaacgcattaagcactccgcctggggagtacgctcgcaagagtgaaactcaaaggaattgacgggggcccgcacaagcggtggagcatgtggtttaattcgaagcaacgcgaagaaccttaccaggtcttgacatcccctgacaacccgagagatcgggcgttccccttcgggggacagggtgacaggtggtgcatggttgtcgtcagctcgtgtcgtgagatgttgggttaagtcccgcaacgagcgcaacccttgaccttagttgccagcattgagttgggcactctaaggtgactgccgatgacaaatcggaggaaggtggggatgacgtcaaatcatcatgccccttatgacctgggctacacacgtgctacaatgggcggtacaaagggctgcgaacccgcgagggggagcgaatcccaaaaagccgctctcagttcggattgcaggctgcaactcgcctgcatgaagccggaatcgctagtaatcgcggatcagcatgccgcggtgaatacgttcccgggccttgtacacaccgcccgtcacaccacgagagtttgcaacacccgaagtcggtgaggtaacccttacgggagccagccgccgaaggtggggcagatgattggggtgaagtcgtaacaaggtagccgtatcggaaggtgcggctggatcacctccttt

SEQ ID NO: 1730 - DNA, 1547 bp, artificial sequence
  GCF_900537995.1_00921_Roseburia_intestinalis
tcggagagtttgatcctggctcaggacgaacgctggcggcgtgcctaatacatgcaagtcgagcggacagatgggagcttgctccctgatgttagcggcggacgggtgagtaacacgtgggtaacctgcctgtaagactgggataactccgggaaaccggggctaataccggatgcttgtttgaaccgcatggttcaaacataaaaggtggcttcggctaccacttacagatggacccgcggcgcattagctagttggtgaggtaacggctcaccaaggcaacgatgcgtagccgacctgagagggtgatcggccacactgggactgagacacggcccagactcctacgggaggcagcagtagggaatcttccgcaatggacgaaagtctgacggagcaacgccgcgtgagtgatgaaggttttcggatcgtaaagctctgttgttagggaagaacaagtaccgttcgaatagggcggtaccttgacggtacctaaccagaaagccacggctaactacgtgccagcagccgcggtaatacgtaggtggcaagcgttgtccggaattattgggcgtaaagggctcgcaggcggttccttaagtctgatgtgaaagcccccggctcaaccggggagggtcattggaaactggggaacttgagtgcagaagaggagagtggaattccacgtgtagcggtgaaatgcgtagagatgtggaggaacaccagtggcgaaggcgactctctggtctgtaactgacgctgaggagcgaaagcgtggggagcgaacaggattagataccctggtagtccacgccgtaaacgatgagtgctaagtgttagggggtttccgccccttagtgctgcagctaacgcattaagcactccgcctggggagtacggtcgcaagactgaaactcaaaggaattgacgggggcccgcacaagcggtggagcatgtggtttaattcgaagcaacgcgaagaaccttaccaggtcttgacatcctctgacaatcctagagataggacgtccccttcgggggcagagtgacaggtggtgcatggttgtcgtcagctcgtgtcgtgagatgttgggttaagtcccgcaacgagcgcaacccttgatcttagttgccagcattcagttgggcactctaaggtgactgccggtgacaaaccggaggaaggtggggatgacgtcaaatcatcatgccccttatgacctgggctacacacgtgctacaatggacagaacaaagggcagcgaaaccgcgaggttaagccaatcccacaaatctgttctcagttcggatcgcagtctgcaactcgactgcgtgaagctggaatcgctagtaatcgcggatcagcatgccgcggtgaatacgttcccgggccttgtacacaccgcccgtcacaccacgagagtttgtaacacccgaagtcggtgaggtaacctttatggagccagccgccgaaggtgggacagatgattggggtgaagtcgtaacaaggtagccgtatcggaaggtgcggctggatcacctccttt

SEQ ID NO: 1731 - DNA, 1482 bp, artificial sequence
  GCF_900537995.1_03311_Roseburia_intestinalis
atggagagtttgatcctggctcaggatgaacgctggcggtatgcctaacacatgcaagtcgaacgaagtcttcggacttagtggcggacgggtgagtaacgcgtgagaatctgccttgaggatggggacaacagttggaaacgactgctaatacccgatgtgccggaaggtgaaaattttttgcctcaagaggagctcgcgtctgattagctagttggtggggtaaaagcgtaccaaggcaacgatcagtagctggtctgagaggatgagcagccacactgggactgagacacggcccagactcctacgggaggcagcagtggggaattttccgcaatgggcgaaagcctgacggagcaataccgcgtgagggaggaaggcctttgggttgtaaacctcttttctcagggaagaagatctgacggtacctgaggaataagcatcggctaactccgtgccagcagccgcggtaatacggaggatgcaagcgttatccggaattattgggcgtaaagcgtccgcaggtggtctttcaagtctgctgtcaaagaccagagcttaactctgggcaggcggtggaaactgagagactagagttcggtaggggtagcgggaattcccagtgtagcggtgaaatgcgtagatattgggaagaacatcggtggcgaaggcgcgctactggaccgaaactgacactcagggacgaaagctagggtagcgaaagggattagatacccctgtagtcctagctgtaaacgatggaaactaggtgtggcttgtatcgacccgagccgtgccgtagccaacgcgttaagtttcccgcctggggagtacgcacgcaagtgtgaaactcaaaggaattgacgggggcccgcacaagcggtggagtatgtggtttaattcgatgcaacgcgaagaaccttaccagggcttgacatgtccggaacttttctgaaaggagaaggtgccttcgggaaccggaacacaggtggtgcatggctgtcgtcagctcgtgtcgtgagatgttgggttaagtcccgcaacgagcgcaaccctcgtctttagttgccagcattaaggtgggcactctagagagactgccggtgacaaaccggaggaaggtgaggatgacgtcaagtcagcatgccccttacgccctgggctacacacgtactacaatggttgggacaaagggcagcgaacccgcgagggagagcgaatctcatcaaacccagcctcagttcagattgctctctgcaactcgagagcatgaaggaggaatcgctagtaatcgcaggtcagcatactgcggtgaattcgttcccgggccttgtacacaccgcccgtcacaccatggaagctggtcacgcccgaagtagttaccctaactttcgagagggggactcctaaggcagggctagtgactggggtgaagtcgtaacaaggtagccgtaccggaaggtgtggctggatcacctcctt

SEQ ID NO: 1732 - DNA, 1501 bp, artificial sequence
  GCF_900537995.1_03669_Roseburia_intestinalis
atttgagagtttgatcctggctcaggatgaacgctggcggcgtgcctaacacatgcaagtcgagcgattctcttcggagaagagcggcggacgggtgagtaacgcgtgggtaacctgccctgtacacacggataacataccgaaaggtatgctaatacgggataacataagaaattcgcatgtttttcttatcaaagctccggcggtacaggatggacccgcgtctgattagctagttggtgaggtaacggctcaccaaggcgacgatcagtagccgacctgagagggtgatcggccacattggaactgagacacggtccaaactcctacgggaggcagcagtggggaatattgcacaatgggcgaaagcctgatgcagcaacgccgcgtgagcgatgaaggccttcgggtcgtaaagctctgtcctcaaggaagataatgacggtacttgaggaggaagccccggctaactacgtgccagcagccgcggtaatacgtagggggctagcgttatccggatttactgggcgtaaagggtgcgtaggcggtcttttaagtcaggagtgaaaggctacggctcaaccgtagtaagctcttgaaactggaggacttgagtgcaggagaggagagtggaattcctagtgtagcggtgaaatgcgtagatattaggaggaacaccagtagcgaaggcggctctctggactgtaactgacgctgaggcacgaaagcgtggggagcaaacaggattagataccctggtagtccacgccgtaaacgatgagtactaggtgtcgggggttacccccctcggtgccgcagctaacgcattaagtactccgcctggggagtacgctcgcaagagtgaaactcaaaggaattgacggggacccgcacaagtagcggagcatgtggtttaattcgaagcaacgcgaagaaccttacctaagcttgacatccttttgaccgatgcctaatcgcatctttcccttcggggacagaagtgacaggtggtgcatggttgtcgtcagctcgtgtcgtgagatgttgggttaagtcccgcaacgagcgcaacccttgcctttagttgccatcattaagttgggcactctagagggactgccagggataacctggaggaaggtggggatgacgtcaaatcatcatgccccttatgcttagggctacacacgtgctacaatgggtggtacagagggcagcgaagtcgtgaggccaagctaatcccttaaagccattctcagttcggattgtaggctgaaactcgcctacatgaagctggagttactagtaatcgcagatcagaatgctgcggtgaatgcgttcccgggtcttgtacacaccgcccgtcacaccatgggagttgggggcgcccgaagccggctagctaaccttttggaagcggtcgtcgaaggtgaaaccaataactggggtgaagtcgtaacaaggtagccgtatcggaaggtgcggctggatcacctccttt

SEQ ID NO: 1733 - DNA, 1526 bp, artificial sequence
  STR00672_Ruthenibacterium_lactatiformans
aatgaagagtttgatcctggctcaggacgaacgctggcggcgcgcctaacacatgcaagtcgaacggagctgttttctctgaagttttcggatggaagagagttcagcttagtggcgaacgggtgagtaacacgtgagcaacctgcctttcagtgggggacaacatttggaaacgaatgctaataccgcataagaccacagtgtcgcatggcacaggggtcaaaggatttatccgctgaaagatgggctcgcgtccgattagctagatggtgaggtaacggcccaccatggcgacgatcggtagccggactgagaggttgaacggccacattgggactgagacacggcccagactcctacgggaggcagcagtggggaatattgcacaatgggggaaaccctgatgcagcgacgccgcgtggaggaagaaggtcttcggattgtaaactcctgtcccaggggacgataatgacggtaccctgggaggaagcaccggctaactacgtgccagcagccgcggtaaaacgtagggtgcaagcgttgtccggaattactgggtgtaaagggagcgcaggcggattggcaagttgggagtgaaatctatgggctcaacccataaattgctttcaaaactgtcagtcttgagtggtgtagaggtaggcggaattcccggtgtagcggtggaatgcgtagatatcgggaggaacaccagtggcgaaggcggcctactgggcactaactgacgctgaggctcgaaagcatgggtagcaaacaggattagataccctggtagtccatgccgtaaacgatgattactaggtgtgggaggattgaccccttccgtgccgcagttaacacaataagtaatccacctggggagtacgaccgcaaggttgaaactcaaaggaattgacgggggcccgcacaagcagtggagtatgtggtttaattcgaagcaacgcgaagaaccttaccaggtcttgacatcggatgcatacctaagagattagggaagtccttcgggacatccagacaggtggtgcatggttgtcgtcagctcgtgtcgtgagatgttgggttaagtcccgcaacgagcgcaacccttatcgttagttactacgcaagaggactctagcgagactgccgttgacaaaacggaggaaggtggggatgacgtcaaatcatcatgccctttatgacctgggctacacacgtactacaatggctattaacagagagaagcgataccgcgaggtggagcaaacctcacaaaaatagtctcagttcggatcgcaggctgcaacccgcctgcgtgaagccggaattgctagtaatcgcggatcagcatgccgcggtgaatacgttcccgggccttgtacacaccgcccgtcacaccatgagagccggggggacccgaagtcggtagtctaaccgcaaggaggacgccgccgaaggtaaaactggtgattggggtgaagtcgtaacaaggtagccgtatcggaaggtgcggctggatcacctccttt

SEQ ID NO: 1734 - DNA, 1526 bp, artificial sequence
  STR00682_Ruthenibacterium_lactatiformans
aatgaagagtttgatcctggctcaggacgaacgctggcggcgcgcctaacacatgcaagtcgaacggagctgttttctctgaagttttcggatggaagagagttcagcttagtggcgaacgggtgagtaacacgtgagcaacctgcctttcagtgggggacaacatttggaaacgaatgctaataccgcataagaccacagtgtcgcatggcacaggggtcaaaggatttatccgctgaaagatgggctcgcgtccgattagctagatggtgaggtaacggcccaccatggcgacgatcggtagccggactgagaggttgaacggccacattgggactgagacacggcccagactcctacgggaggcagcagtggggaatattgcacaatgggggaaaccctgatgcagcgacgccgcgtggaggaagaaggtcttcggattgtaaactcctgtcccaggggacgataatgacggtaccctgggaggaagcaccggctaactacgtgccagcagccgcggtaaaacgtagggtgcaagcgttgtccggaattactgggtgtaaagggagcgcaggcggattggcaagttgggagtgaaatctatgggctcaacccataaattgctttcaaaactgtcagtcttgagtggtgtagaggtaggcggaattcccggtgtagcggtggaatgcgtagatatcgggaggaacaccagtggcgaaggcggcctactgggcactaactgacgctgaggctcgaaagcatgggtagcaaacaggattagataccctggtagtccatgccgtaaacgatgattactaggtgtgggaggattgaccccttccgtgccgcagttaacacaataagtaatccacctggggagtacgaccgcaaggttgaaactcaaaggaattgacgggggcccgcacaagcagtggagtatgtggtttaattcgaagcaacgcgaagaaccttaccaggtcttgacatcggatgcatacctaagagattagggaagtccttcgggacatccagacaggtggtgcatggttgtcgtcagctcgtgtcgtgagatgttgggttaagtcccgcaacgagcgcaacccttatcgttagttactacgcaagaggactctagcgagactgccgttgacaaaacggaggaaggtggggatgacgtcaaatcatcatgccctttatgacctgggctacacacgtactacaatggctattaacagagagaagcgataccgcgaggtggagcaaacctcacaaaaatagtctcagttcggatcgcaggctgcaacccgcctgcgtgaagccggaattgctagtaatcgcggatcagcatgccgcggtgaatacgttcccgggccttgtacacaccgcccgtcacaccatgagagccggggggacccgaagtcggtagtctaaccgtaaggaggacgccgccgaaggtaaaactggtgattggggtgaagtcgtaacaaggtagccgtatcggaaggtgcggctggatcacctccttt

SEQ ID NO: 1735 - DNA, 1526 bp, artificial sequence; identical to SEQ ID NO: 1734
  STR02069_Ruthenibacterium_lactatiformans

SEQ ID NO: 1736 - DNA, 1526 bp, artificial sequence
  STR02071_Ruthenibacterium_lactatiformans
aatgaagagtttgatcctggctcaggacgaacgctggcggcgcgcctaacacatgcaagtcgaacggagctgttttctctgaagttttcggatggaagagagttcagcttagtggcgaacgggtgagtaacacgtgagcaacctgcctttcagtgggggacaacatttggaaacgaatgctaataccgcataagaccacagtgtcgcatggcacaggggtcaaaggatttatccgctgaaagatgggctcgcgtccgattagctagatggtgaggtaacggctcaccatggcgacgatcggtagccggactgagaggttgaacggccacattgggactgagacacggcccagactcctacgggaggcagcagtggggaatattgcacaatgggggaaaccctgatgcagcgacgccgcgtggaggaagaaggtcttcggattgtaaactcctgtcccaggggacgataatgacggtaccctgggaggaagcaccggctaactacgtgccagcagccgcggtaaaacgtagggtgcaagcgttgtccggaattactgggtgtaaagggagcgcaggcggattggcaagttgggagtgaaatctatgggctcaacccataaattgctttcaaaactgtcagtcttgagtggtgtagaggtaggcggaattcccggtgtagcggtggaatgcgtagatatcgggaggaacaccagtggcgaaggcggcctactgggcactaactgacgctgaggctcgaaagcatgggtagcaaacaggattagataccctggtagtccatgccgtaaacgatgattactaggtgtgggaggattgaccccttccgtgccgcagttaacacaataagtaatccacctggggagtacgaccgcaaggttgaaactcaaaggaattgacgggggcccgcacaagcagtggagtatgtggtttaattcgaagcaacgcgaagaaccttaccaggtcttgacatcggatgcatacctaagagattagggaagtccttcgggacatccagacaggtggtgcatggttgtcgtcagctcgtgtcgtgagatgttgggttaagtcccgcaacgagcgcaacccttatcgttagttactacgcaagaggactctagcgagactgccgttgacaaaacggaggaaggtggggatgacgtcaaatcatcatgccctttatgacctgggctacacacgtactacaatggctattaacagagagaagcgataccgcgaggtggagcaaacctcacaaaaatagtctcagttcggatcgcaggctgcaacccgcctgcgtgaagccggaattgctagtaatcgcggatcagcatgccgcggtgaatacgttcccgggccttgtacacaccgcccgtcacaccatgagagccggggggacccgaagtcggtagtctaaccgtaaggaggacgccgccgaaggtaaaactggtgattggggtgaagtcgtaacaaggtagccgtatcggaaggtgcggctggatcacctccttt

SEQ ID NO: 1737 - DNA, 1526 bp, artificial sequence; identical to SEQ ID NO: 1734
  STR02270_Ruthenibacterium_lactatiformans

SEQ ID NO: 1738 - DNA, 1526 bp, artificial sequence; identical to SEQ ID NO: 1734
  STR02349_Ruthenibacterium_lactatiformans

SEQ ID NO: 1739 - DNA, 1552 bp, artificial sequence
  GCF_000238635.1_02106_Ruthenibacterium_lactatiformans
tatggagagtttgatcctggctcaggacgaacgctggcggcgtgcctaatacatgcaagtcgagcggacttgatgggagcttgctcctgtcaagttagcggcggacgggtgagtaacacgtgggcaacctgccctatagttggggataactccgggaaaccggggctaataccgaataacacatttcatctcctgatgaaatgttgaaagatggtttacgctatcgctataggatgggcccgcggcgcattagctagttggtggggtaacggctcaccaaggcgacgatgcgtagccgacctgagagggtgatcggccacactgggactgagacacggcccagactcctacgggaggcagcagtagggaatcttccacaatgggcgaaagcctgatggagcaacgccgcgtgagtgaagaaggttttcggatcgtaaaactctgttgtaagggaagaacaagtacagtagtaactggctgtaccttgacggtaccttattagaaagccacggctaactacgtgccagcagccgcggtaatacgtaggtggcaagcgttgtccggaattattgggcgtaaagcgcgcgcaggtggtcctttaagtctgatgtgaaagcccacggctcaaccgtggagggtcattggaaactgggggacttgagtgcagaagaggaaagtggaattccaagtgtagcggtgaaatgcgtagagatttggaggaacaccagtggcgaaggcgactttctggtctgtaactgacactgaggcgcgaaagcgtggggagcaaacaggattagataccctggtagtccacgccgtaaacgatgagtgctaagtgttagggggtttccgccccttagtgctgcagctaacgcattaagcactccgcctggggagtacggtcgcaagactgaaactcaaaggaattgacgggggcccgcacaagcggtggagcatgtggtttaattcgaagcaacgcgaagaaccttaccaggtcttgacatcccattgaccgctatggagacatagctttcccttcggggacagtggtgacaggtggtgcatggttgtcgtcagctcgtgtcgtgagatgttgggttaagtcccgcaacgagcgcaacccttgttcttagttgccatcatttagttgggcactctaaggagactgccggtgacaaaccggaggaaggtggggatgacgtcaaatcatcatgccccttatgacctgggctacacacgtgctacaatggacggtacaaacggttgccaacccgcgagggggagctaatccgataaaaccgttctcagttcggattgtaggctgcaactcgcctacatgaagccggaatcgctagtaatcgcggatcagcatgccgcggtgaatacgttcccgggccttgtacacaccgcccgtcacaccacgagagtttgtaacacccgaagccggtggggtaacccttttgggagccagccgtcgaaggtgggacagatgattggggtgaagtcgtaacaaggtagccgtatcggaaggtgcggctggatcacctccttt

SEQ ID NO: 1740 - DNA, 1527 bp, artificial sequence
  GCF_000949455.1_03852_Ruthenibacterium_lactatiformans
atggagagtttgatcctggctcaggatgaacgctggcggcatgcctaatacatgcaagtcgaacgaaccgcttttataggcggagagtggcgaacgggtgagtaacacgtagggaacctacccatgcgagggggacaacttctggaaacggaagctaataccgaataaggaaatggaaggcatcttcgatttcttaaaggaggcgtaagccttgcgcaaggatggacctgcggtgcattagctggttggtaaggtaacggcttaccaaggcgacgatgcatagccggcctgagagggcggacggccacactgggactgagacacggcccagactcctacgggaggcagcagtaaggaattttcgtcaatgggcgcaagcctgaacgagcaatgccgcgtgaacgaggaaggtcttcggatcgtaaagttctgttgacggggaaaaaagaccgggaaaggaaatgatcccggaggagatattacccgtcgaggaagtcacggctaactacgtgccagcagccgcggtaatacgtaggtggcgagcgttatccggaatgattgggcgtaaagggtgcgtaggcggtcgattaagtctggagtgaaaggtaccggctcaaccggtataggctccggaaactgatggactggagtacaggagagggtggcggaactccatgtgtagcggtaaaatgcgtagatatatggaagaacaccggtggcgaaggcggccgcccggactgtaactgacgctgaggcacgaaagcgtggggagcaaataggattagataccctagtagtccacgctgtaaacgatgaggaccaagtgttggggaagacccagtgctggcgttaacgcaatgagtcctccgcctggggagtatgcacgcaagtgtgaaactcaaaggaattgacgggggcccgcacaagcggtggagtatgtggtttaattcgaagcaacgcgaagaaccttaccaggccttgacataggatgcaaagagatagagatattttggaggctaacatccatacaggtggtgcatggttgtcgtcagctcgtgtcgtgagatgttcagttaagtctggcaacgagcgcaaccctcgtgatgtgttaccaatatcgagttagggactcacatcagactgccggtgagaaaccggaggaaggcggggatgacgtcaaatcatcatgccccttatggcctgggctacacacgtactacaatggcggcgacagagggcagcgaaccagagatggggagcgaatcccaaaaaagccgtcccagttcggattgaagtctgcaacccgacttcatgaagttggaatcgctagtaatcgcggatcagcatgccgcggtgaatacgttctcgggccttgtacacaccgcccgtcaaaccatgggagtgggcaatgcccgaagccggtggcgcaacctgaaaaggagcgagccgtcgaaggcagggccgatgactggggttaagtcgtaacaaggtatccctacgggaacgtggggatggatcacctccttt

SEQ ID NO: 1741 - DNA, 1546 bp, artificial sequence; identical to SEQ ID NO: 798
  GCF_001403575.1_00011_Ruthenibacterium_lactatiformans

SEQ ID NO: 1742 - DNA, 1543 bp, artificial sequence
  GCF_001481375.1_03670_Ruthenibacterium_lactatiformans
tgaagagtttgatcctggctcagattgaacgctagcggaatgccttacacatgcaagtcgaacggcagcataaggagagcttgcttttcttgatggcgagtggcgaacgggtgagtaaagtatcggaacgtgcccagtagcgggggataactacgcgaaagcgtagctaataccgcatacgccctgagggggaaagagggggatcagagatgaccttttactattggagcggccgatatcggattagctagttggtggggtaaaggcctaccaaggcgacgatccgtagctggtttgagaggacgaccagccacactgggactgagacacggcccagactcctacgggaggcagcagtggggaattttggacaatgggggcaaccctgatccagccattccgcgtgtgcgattgaaggccttcgggttgtaaagcacttttgtcagggaagaaaaggtttgtgttaataccatggactgctgacggtacctgaagaataagcaccggcaaactacgtgccagcagccgcggtaatacgtagggtgcgagcgttaatcggaattactgggcgtaaagcgtgcgcaggcggttcggaaagagagatgtgaaatcccagggctcaaccttggaactgcatttctaactgtcgagctagagtatgttagaggggggtagaattccacgtgtagcagtgaaatgcgtagagatgtggaggaataccgatggcgaaggcagccccctgggataatactgacgctgatgcacgaaagcgtggggagcaaacaggattagataccctggtagtccacgccctaaacgatgtcaactagctgttgggacttacgggtcttggtagcgaagccaacgcgtgaagttgaccgcctggggagtacggtcgcaagattaaaactcaaaggaattgacggggacccgcacaagcggtggatgatgtggattaattcgatgcaacgcgaaaaaccttacctacccttgacatgtttggaatcctgaagagatttaggagtgctcgcaagagaaccgaaacacaggtgctgcatggctgtcgtcagctcgtgtcgtgagatgttgggttaagtcccgcaacgagcgcaacccttgtcattagttgctacaagtaagatgggcactctaatgagactgccggtgataaaccggaggaaggtggggatgacgtcaagtcctcatggcccttatgggtagggcttcacacgtcatacaatggtcaggacagagggaagccaaaccgcgaggtggagctaatctcacaaacctgatcgtagtccggattgcaggctgcaactcgcctgcatgaagtcggaatcgctagtaatcgcggatcagcatgtcgcggtgaatacgttcccgggtcttgtacacaccgcccgtcacaccatgggagtgggttttaccagaagtagttagtctaaccgcaaggagggcgattaccacggtaggattcatgactggggtgaagtcgtaacaaggtagccgtagcggaagctgtggctggatcacctccttt

SEQ ID NO: 1743 - DNA, 1532 bp, artificial sequence
  GCF_003434475.1_03824_Ruthenibacterium_lactatiformans
tgaagagtttgatcatggctcagattgaacgctggcggcaggcctaacacatgcaagtcgagcggatgagaggagcttgctcctggattcagcggcggacgggtgagtaatgcctaggaatctgcctggtagtgggggacaacgtttcgaaaggaacgctaataccgcatacgtcctacgggagaaagcaggggaccttcgggccttgcgctatcagatgagcctaggtcggattagctagttggtgaggtaatggctcaccaaggcgacgatccgtaactggtctgagaggatgatcagtcacactggaactgagacacggtccagactcctacgggaggcagcagtggggaatattggacaatgggcgaaagcctgatccagccatgccgcgtgtgtgaagaaggtcttcggattgtaaagcactttaagttgggaggaagggttgtagattaatactctgcaattttgacgttaccgacagaataagcaccggctaactctgtgccagcagccgcggtaatacagagggtgcaagcgttaatcggaattactgggcgtaaagcgcgcgtaggtggtttgttaagttggatgtgaaatccccgggctcaacctgggaactgcatccaaaactggcaagctagagtatggtagagggtggtggaatttcctgtgtagcggtgaaatgcgtagatataggaaggaacaccagtggcgaaggcgaccacctggactgatactgacactgaggtgcgaaagcgtggggagcaaacaggattagataccctggtagtccacgccgtaaacgatgtcaactagccgttgggagccttgagctcttagtggcgcagctaacgcattaagttgaccgcctggggagtacggccgcaaggttaaaactcaaatgaattgacgggggcccgcacaagcggtggagcatgtggtttaattcgaagcaacgcgaagaaccttaccaggccttgacatccaatgaactttccagagatggattggtgccttcgggagcattgagacaggtgctgcatggctgtcgtcagctcgtgtcgtgagatgttgggttaagtcccgtaacgagcgcaacccttgtccttagttaccagcacgttatggtgggcactctaaggagactgccggtgacaaaccggaggaaggtggggatgacgtcaagtcatcatggcccttacggcctgggctacacacgtgctacaatggtcggtacagagggttgccaagccgcgaggtggagctaatcccacaaaaccgatcgtagtccggatcgcagtctgcaactcgactgcgtgaagtcggaatcgctagtaatcgcgaatcagaatgtcgcggtgaatacgttcccgggccttgtacacaccgcccgtcacaccatgggagtgggttgcaccagaagtagctagtctaaccttcgggaggacggttaccacggtgtgattcatgactggggtgaagtcgtaacaaggtagccgtaggggaacctgcggctggatcacctcctt

SEQ ID NO: 1744 - DNA, 1532 bp, artificial sequence
  GCF_003434585.1_03525_Ruthenibacterium_lactatiformans
tgaagagtttgatcatggctcagattgaacgctggcggcaggcctaacacatgcaagtcgagcggatgagaggagcttgctcctggattcagcggcggacgggtgagtaatgcctaggaatctgcctggtagtgggggacaacgtttcgaaaggaacgctaataccgcatacgtcctacgggagaaagcaggggaccttcgggccttgcgctatcagatgagcctaggtcggattagctagttggtgaggtaatggctcaccaaggcgacgatccgtaactggtctgagaggatgatcagtcacactggaactgagacacggtccagactcctacgggaggcagcagtggggaatattggacaatgggcgaaagcctgatccagccatgccgcgtgtgtgaagaaggtcttcggattgtaaagcactttaagttgggaggaagggttgtagattaatactctgcgattttgacgttaccgacagaataagcaccggctaactctgtgccagcagccgcggtaatacagagggtgcaagcgttaatcggaattactgggcgtaaagcgcgcgtaggtggtttgttaagttggatgtgaaatccccgggctcaacctgggaactgcatccaaaactggcaagctagagtatggtagagggtggtggaatttcctgtgtagcggtgaaatgcgtagatataggaaggaacaccagtggcgaaggcgaccacctggactgatactgacactgaggtgcgaaagcgtggggagcaaacaggattagataccctggtagtccacgccgtaaacgatgtcaactagccgttgggagccttgagctcttagtggcgcagctaacgcattaagttgaccgcctggggagtacggccgcaaggttaaaactcaaatgaattgacgggggcccgcacaagcggtggagcatgtggtttaattcgaagcaacgcgaagaaccttaccaggccttgacatccaatgaactttccagagatggattggtgccttcgggaacattgagacaggtgctgcatggctgtcgtcagctcgtgtcgtgagatgttgggttaagtcccgtaacgagcgcaacccttgtccttagttaccagcacgttatggtgggcactctaaggagactgccggtgacaaaccggaggaaggtggggatgacgtcaagtcatcatggcccttacggcctgggctacacacgtgctacaatggtcggtacagagggttgccaagccgcgaggtggagctaatcccacaaaaccgatcgtagtccggatcgcagtctgcaactcgactgcgtgaagtcggaatcgctagtaatcgcgaatcagaatgtcgcggtgaatacgttcccgggccttgtacacaccgcccgtcacaccatgggagtgggttgcaccagaagtagctagtctaaccttcgggaggacggttaccacggtgtgattcatgactggggtgaagtcgtaacaaggtagccgtaggggaacctgcggctggatcacctcctt

SEQ ID NO: 1745 - DNA, 1525 bp, artificial sequence
  GCF_003603335.1_03021_Ruthenibacterium_lactatiformans
tgtagagtttgatcctggctcagattgaacgctggcggcatgccttacacatgcaagtcgaacggtaacaggccgcaaggtgctgacgagtggcgaacgggtgagtaatacatcggaacgtgcccgatcgtgggggataacgcagcgaaagctgtgctaataccgcatacgatctacggatgaaagcgggggatcgcaagacctcgcgcggacggagcggccgatggcagattaggtagttggtggggtaaaggcctaccaagccgacgatctgtagctggtctgagaggacgaccagccacactgggactgagacacggcccagactcctacgggaggcagcagtggggaattttggacaatgggcgcaagcctgatccagccatgccgcgtgcaggatgaaggccttcgggttgtaaactgcttttgtacggaacgaaaaggtttcttttaatacagggaactgatgacggtaccgtaagaataagcaccggctaactacgtgccagcagccgcggtaatacgtagggtgcgagcgttaatcggaattactgggcgtaaagcgtgcgcaggcggtgatgtaagacagaggtgaaatccccgggctcaacctgggaactgcctttgtgactgcatcgctggagtgcggcagagggggatggaattccgcgtgtagcagtgaaatgcgtagatatgcggaggaacaccgatggcgaaggcaatcccctgggcctgcactgacgctcatgcacgaaagcgtggggagcaaacaggattagataccctggtagtccacgccctaaacgatgtcaactggttgttgggaattagttttctcagtaacgaagctaacgcgtgaagttgaccgcctggggagtacggccgcaaggttgaaactcaaaggaattgacggggacccgcacaagcggtggatgatgtggtttaattcgatgcaacgcgaaaaaccttacccacctttgacatgtacggaatcctttagagatagaggagtgctcgaaagagagccgtaacacaggtgctgcatggctgtcgtcagctcgtgtcgtgagatgttgggttaagtcccgcaacgagcgcaacccttgccattagttgctacgaaagggcactctaatgggactgccggtgacaaaccggaggaaggtggggatgacgtcaagtcctcatggcccttataggtggggctacacacgtcatacaatggctggtacaaagggttgccaacccgcgagggggagctaatcccataaagccagtcgtagtccggatcgcagtctgcaactcgactgcgtgaagtcggaatcgctagtaatcgtggatcagcatgtcacggtgaatacgttcccgggtcttgtacacaccgcccgtcacaccatgggagcgggttctgccagaagtaggtagcctaaccgtaaggagggcgcttaccacggcagggttcgtgactggggtgaagtcgtaacaaggtagccgtatcggaaggtgcggctggatcacctccttt

SEQ ID NO: 1746 - DNA, 1553 bp, artificial sequence
  GCF_003603875.1_02638_Ruthenibacterium_lactatiformans
tttggagagtttgatcctggctcaggacgaacgctggcggcgtgcttaacacatgcaagtcgaacggggtgtttatttcggtaaacaccaagtggcgaacgggtgagtaacgcgtaagcaatctaccttcaagatggggacaacacttcgaaaggggtgctaataccgaatgaatgtaagagtatcgcatgagacacttactaaaggaggcctctgacataagcttccgcttgaagatgagcttgcgtctgattagctagttggtgagggtaaaggcccaccaaggcgacgatcagtagccggtctgagaggatgaacggccacattgggactgagacacggcccagactcctacgggaggcagcagtggggaatcttccgcaatgggcgaaagcctgacggagcaacgccgcgtgaacgatgaaggtcttaggatcgtaaagttctgttgttagggacgaagggtaagaatcataataaggtttttatttgacggtacctaacgaggaagccacggctaactacgtgccagcagccgcggtaatacgtaggcggcaagcgttgtccggaattattgggcgtaaagggagcgcaggcgggaaactaagcggatcttaaaagtgcggggctcaaccccgtgatggggtccgaactggttttcttgagtgcaggagaggaaagcggaattcccagtgtagcggtgaaatgcgtagatattgggaagaacaccagtggcgaaggcggctttctggactgtaactgacgctgaggctcgaaagctagggtagcgaacgggattagataccccggtagtcctagccgtaaacgatggatactaggtgtgggaggtatcgaccccttccgtgccggagttaacgcaataagtatcccgcctggggagtacggccgcaaggttgaaactcaaaggaattgacgggggcccgcacaagcggtggagtatgtggtttaattcgacgcaacgcgaagaaccttaccaagacttgacattgattgaaagacttagagataagtcccttctcttcggagaacaagaaaacaggtggtgcatggctgtcgtcagctcgtgtcgtgagatgttgggttaagtcccgcaacgagcgcaacccctatactatgttgccagcattacggatgggaactcatagtagactgccgcggacaacgcggaggaaggcggggatgacgtcaagtcatcatgccccttacgtcttgggctacacacgtactacaatgggatgaacagagggaagcgaaatcgcgaggtggagcggatccctaaaagcatctctcagttcggattgtaggctgaaactcgcctacatgaagtcggaatcgctagtaatcgcaggtcagcatactgcggtgaatacgttcccgggccttgtacacaccgcccgtcacaccacgaaagtcattcacacccgaagccggctaagggcctatggtaccgaccgtctaaggtgggggcgatgattggggtgaagtcgtaacaaggtagccgtatcggaaggtgcggctggatcacctccttt

SEQ ID NO: 1747 - DNA, 1183 bp, artificial sequence
  GCF_003604025.1_00007_Ruthenibacterium_lactatiformans
cttgagagtttgatcctggctcagaacgaacgctggcggcaggcttaacacatgcaagtcgagcgccccgcaaggggagcggcagacgggtgagtaacgcgtgggaacgtaccatttgctacggaataactcagggaaacttgtgctaataccgtatgtgcccttcgggggaaagatttatcggcaaatgatcggcccgcgttggattagctagttggtggggtaaaggctcaccaaggcgacgatccatagctggtctgagaggatgatcagccacactgggactgagacacggcccagactcctacgggaggcagcagtggggaatattggacaatgggcgcaagcctgatccagccatgccgcgtgagtgatgaaggccctagggttgtaaagctctttcaccggtgaagataatgacggtaaccggagaagaagccccggctaacttcgtgccagcagccgcggtaatacgaagggggctagcgttgttcggatttactgggcgtaaagcgcacgtaggcggacttttaagtcaggggtgaaatcccggggctcaaccccggaactgcctttgatactggaagtcttgagtatggtagaggtgagtggaattccgagtgtagaggtgaaattcgtagatattcggaggaacaccagtggcgaaggcggctcactggaccattactgacgctgaggtgcgaaagcgtggggagcaaacaggattagataccctggtagtccacgccgtaaacgatgaatgttagccgtcggggtgtttacacttcggtggcgcagctaacgcattaaacattccgcctggggagtacggtcgcaagattaaaactcaaaggaattgacgggggcccgcacaagcggtggagcatgtggtttaattcgaagcaacgcgcagaaccttaccagcccttgacatcccggtcgcggttagtggagacactatccttcagttaggctggaccggagacaggtgctgcatggctgtcgtcagctcgtgtcgtgagatgttgggttaagtcccgcaacgagcgcaaccctcgcccttagttgccagcattcagttgggcactctaaggggactgccggtgataagccgagaggaaggtggggatgacgtcaagtcctcatggcccttacgggctgggctacacacgtgctacaatgg

SEQ ID NO: 1748 - DNA, 1530 bp, artificial sequence
  GCF_900683755.1_00343_Ruthenibacterium_lactatiformans
tttggagagtttgatcctggctcaggacgaacgctggcggcgtgcttaacacatgcaagtcgaacgatgaacccggagcttgctctgggggattagtggcgaacgggtgagtaacacgtgagtaacctgccctggactctgggataagcgttggaaacgacgtctaataccggataggaccctggaccgcatggtttggggtggaaagttttttcggtctgggatggactcgcggcctatcagcttgttggtgaggtaatggctcaccaaggcgtcgacgggtagccggcctgagagggtgaccggccacactgggactgagacacggcccagactcctacgggaggcagcagtggggaatattgcacaatgggcgaaagcctgatgcagcaacgccgcgtgcgggatgacggccttcgggttgtaaaccgcttttagtaaggaagaaggggagcttgctccttgacggtacttgcagaaaaaggaccggctaactacgtgccagcagccgcggtaatacgtagggtccgagcgttgtccggaattattgggcgtaaagagctcgtaggcggtttgtcgcgtctgctgtgaaatctggaggctcaacctccagcctgcagtgggtacgggcagactagagtgcggtaggggagaatggaattcctggtgtagcggtggaatgcgcagatatcaggaggaacaccgatggcgaaggcagttctctgggccgtaactgacgctgaggagcgaaagcgtggggagcgaacaggattagataccctggtagtccacgccgtaaacgttgggcgctagatgtggggacctttccacggtttccgtgtcgtagctaacgcattaagcgccccgcctggggagtacggccgcaaggctaaaactcaaaggaattgacgggggcccgcacaagcggcggagcatgcggattaattcgatgcaacgcgaagaaccttaccaaggcttgacatgaccgagaacgccgcagaaatgtggaactctttggacactcggttacaggtggtgcatggttgtcgtcagctcgtgtcgtgagatgttgggttaagtcccgcaacgagcgcaaccctcgtcgcatgttgccagcacgtaatggtgggaactcatgtgagactgccggggtcaactcggaggaaggtggggatgacgtcaaatcatcatgccccttatgtcttgggcttcacgcatgctacaatggccggtacaaagggctgcgatgtcgtaaggcggagcgaatcccaaaaagccggtctcagttcggattgaggtctgcaactcgacctcatgaagtcggagtcgctagtaatcgcagatcagcaacgctgcggtgaatacgttcccgggccttgtacacaccgcccgtcaagtcatgaaagtcggtaacacccgaagccggtggcctaacccttgtggagggagccgtcgaaggtgggatcggtgattaggactaagtcgtaacaaggtagccgtaccggaaggtgcggctggatcacctccttt

SEQ ID NO: 1749 - DNA, 1523 bp, artificial sequence
  GCF_900683755.1_01527_Ruthenibacterium_lactatiformans
acggagagtttgatcctggctcaggacgaacgctggcggcgtgcttaacacatgcaagtcgaacgatgaagcctttcggggtggattagtggcgaacgggtgagtaacacgtgggcaatctgcccttcactctgggacaagccctggaaacggggtctaataccggataatacttctgcctgcatgggcgggggttgaaagctccggcggtgaaggatgagcccgcggcctatcagcttgttggtggggtgatggcctaccaaggcgacgacgggtagccggcctgagagggcgaccggccacactgggactgagacacggcccagactcctacgggaggcagcagtggggaatattgcacaatgggcgaaagcctgatgcagcgacgccgcgtgagggatgacggccttcgggttgtaaacctctttcagcagggaagaagcgagagtgacggtacctgcagaagaagcgccggctaactacgtgccagcagccgcggtaatacgtagggcgcaagcgttgtccggaattattgggcgtaaagagctcgtaggcggcttgtcgcgtcggatgtgaaagcccggggcttaaccccgggtctgcattcgatacgggcaggctagagtgtggtaggggagatcggaattcctggtgtagcggtgaaatgcgcagatatcaggaggaacaccggtggcgaaggcggatctctgggccattactgacgctgaggagcgaaagcgtggggagcgaacaggattagataccctggtagtccacgccgtaaacgttgggaactaggtgttggcgacattccacgtcgtcggtgccgcagctaacgcattaagttccccgcctggggagtacggccgcaaggctaaaactcaaaggaattgacgggggcccgcacaagcagcggagcatgtggcttaattcgacgcaacgcgaagaaccttaccaaggcttgacatacaccggaaacggccagagatggtcgcccccttgtggtcggtgtacaggtggtgcatggctgtcgtcagctcgtgtcgtgagatgttgggttaagtcccgcaacgagcgcaacccttgttctgtgttgccagcatgcctttcggggtgatggggactcacaggagactgccggggtcaactcggaggaaggtggggacgacgtcaagtcatcatgccccttatgtcttgggctgcacacgtgctacaatggccggtacaatgagctgcgatgccgcgaggcggagcgaatctcaaaaagccggtctcagttcggattggggtctgcaactcgaccccatgaagtcggagttgctagtaatcgcagatcagcattgctgcggtgaatacgttcccgggccttgtacacaccgcccgtcacgtcacgaaagtcggtaacacccgaagccggtggcccaaccccttgtgggagggagctgtcgaaggtgggactggcgattgggacgaagtcgtaacaaggtagccgtaccggaaggtgcggctggatcacctccttt

SEQ ID NO: 1750 - DNA, 1506 bp, artificial sequence
  GCF_000269605.1_00310_Scardovia_wiggsiae
acggagagtttgatcctggctcaggatgaacgctggcggcgtgcctaacacatgcaagtcgaacgatgaaaccgccctcgggcggacatgaagtggcgaacgggtgagtaacacgtgaccaacctgcccccctctccgggacaaccttgggaaaccgaggctaataccggatactccctcccctgctcctgcaggggtcgggaaagcccaggcggagggggatggggtcgcggcccattaggtagtaggcggggtaacggcccacctagcccgcgatgggtagccgggttgagagaccgaccggccacattgggactgagatacggcccagactcctacgggaggcagcagtggggaattttgcgcaatgggggaaaccctgacgcagcaacgccgcgtgcgggacgacggccttcgggttgtaaaccgctttcagcagggaagaaattcgacggtacctgcagaagaagctccggctaactacgtgccagcagccgcggtaatacgtagggagcgagcgttatccggaatcattgggcgtaaagagcgcgtaggcggcctctcaagcgggatctctaatccgagggctcaacccccggccggatcccgaactgggaggctcgagttcggtagaggcaggcggaattcccggtgtagcggtggaatgcgcagatatcgggaagaacaccgatggcgaaggcagcctgctgggccgcaactgacgctgaggcgcgaaagctaggggagcgaacaggattagataccctggtagtcctagccgtaaacgatggatactaggtgtggggggctccgccctccgtgccgcagccaacgcattaagtatcccgcctggggagtacggccgcaaggctaaaactcaaaggaattgacgggggcccgcacaagcagcggagcatgtggcttaattcgaagcaacgcgaagaaccttaccagggcttgacatggacgtgaagccggggaaacccggtggccgagaggagcgtccgcaggtggtgcatggctgtcgtcagctcgtgtcgtgagatgttgggttaagtcccgcaacgagcgcaacccctgccccatgttgccagcattaggttggggactcatgggggactgccggcgtcaagccggaggaaggtggggacgacgtcaagtcatcatgccctttatgccctgggctgcacacgtgctacaatggccggtacaacgggctgcgagaccgcgaggtcgagcgaatccctcaaagccggccccagttcggatcggaggctgcaacccgcctccgtgaagtcggagttgctagtaatcgcggatcagcatgccgcggtgaatacgttcccgggccttgtacacaccgcccgtcacaccacccgagtcgtctgcacccgaagccgccggccgaacccgcaaggggcggaggcgtcgaaggtgtggagggtaaggggggtgaagtcgtaacaaggtagccgtaccggaaggtgcggctggatcacctccttt

SEQ ID NO: 1751 - DNA, 1522 bp, artificial sequence
  GCF_000269605.1_01293_Scardovia_wiggsiae
atggagagtttgatcctggctcaggatgaacgctggcggcgtgcctaatacatgcaagtcgaacgcttcacttcggtgaagagtggcgaacgggtgagtaatacataagtaacctggcatctacagggggataactgatggaaacgtcagctaagaccgcatatgtgtagagatcgcatgaactctatatgaaaagtgctacgggactggtagatgatggacttatggcgcattagctggttggtagggtaacggcctaccaaggcgacgatgcgtagccgacctgagagggtgaccggccacactgggactgagacacggcccagactcctacgggaggcagcagtagggaattttcggcaatgggggaaaccctgaccgagcaacgccgcgtgaaggaagaagtaattcgttatgtaaacttctgtcatagaggaagaacggtggatatagggaatgatatccaagtgacggtactctataagaaagccacggctaactacgtgccagcagccgcggtaatacgtaggtggcgagcgttatccggaattattgggcgtaaagagggagcaggcggcactaagggtctgtggtgaaagatcgaagcttaacttcggtaagccatggaaaccgtagagctagagtgtgtgagaggatcgtggaattccatgtgtagcggtgaaatgcgtagatatatggaggaacaccagtggcgaaggcgacgatctggcgcataactgacgctcagtcccgaaagcgtggggagcaaataggattagataccctagtagtccacgccgtaaacgatgagtactaagtgttgggagtcaaatctcagtgctgcagttaacgcaataagtactccgcctgagtagtacgttcgcaagaatgaaactcaaaggaattgacgggggcccgcacaagcggtggagcatgtggtttaattcgaagcaacgcgaagaaccttaccaggtcttgacatcgatctaaaggctccagagatggagagatagctatagagaagacaggtggtgcatggttgtcgtcagctcgtgtcgtgagatgttgggttaagtcccgcaacgagcgcaacccctgttgccagttgccagcattaagttggggactctggcgagactgccggtgacaagccggaggaaggcggggatgacgtcaaatcatcatgccccttatgacctgggctacacacgtgctacaatggacagagcagagggaagcgaagccgcgaggtggagcgaaacccataaaactgttctcagttcggactgcagtctgcaactcgactgcacgaagatggaatcgctagtaatcgcgaatcagcatgtcgcggtgaatacgttctcgggccttgtacacaccgcccgtcacaccatgagagtcggtaacacccgaagccggtggcctaaccgaaaggaaggagctgtctaaggtgggactgatgattggggtgaagtcgtaacaaggtatccctacgggaacgtggggatggatcacctccttt

SEQ ID NO: 1752 - DNA, 1536 bp, artificial sequence
  GCF_000275805.1_00001_Scardovia_wiggsiae
ttgaagagtttgatcatggctcagattgaacgctggcggcaggcctaacacatgcaagtcgagcggtagcacagagagcttgctctcgggtgacgagcggcggacgggtgagtaatgtctgggaaactgcctgatggagggggataactactggaaacggtagctaataccgcataacgtcgcaagaccaaagtgggggaccttcgggcctcatgccatcagatgtgcccagatgggattagctagtaggtggggtaatggctcacctaggcgacgatccctagctggtctgagaggatgaccagccacactggaactgagacacggtccagactcctacgggaggcagcagtggggaatattgcacaatgggcgcaagcctgatgcagccatgccgcgtgtatgaagaaggccttcgggttgtaaagtactttcagcgaggaggaaggcgttaaggttaataaccttggcgattgacgttactcgcagaagaagcaccggctaactccgtgccagcagccgcggtaatacggagggtgcaagcgttaatcggaattactgggcgtaaagcgcacgcaggcggtctgttaagtcagatgtgaaatccccgggctcaacctgggaactgcatttgaaactggcaggcttgagtcttgtagaggggggtagaattccaggtgtagcggtgaaatgcgtagagatctggaggaataccggtggcgaaggcggccccctggacaaagactgacgctcaggtgcgaaagcgtggggagcaaacaggattagataccctggtagtccacgctgtaaacgatgtcgacttggaggttgttcccttgaggagtggcttccggagctaacgcgttaagtcgaccgcctggggagtacggccgcaaggttaaaactcaaatgaattgacgggggcccgcacaagcggtggagcatgtggtttaattcgatgcaacgcgaagaaccttacctactcttgacatccagagaacttagcagagatgctttggtgccttcgggaactctgagacaggtgctgcatggctgtcgtcagctcgtgttgtgaaatgttgggttaagtcccgcaacgagcgcaacccttatcctttgttgccagcggttcggccgggaactcaaaggagactgccagtgataaactggaggaaggtggggatgacgtcaagtcatcatggcccttacgagtagggctacacacgtgctacaatggcatatacaaagagaagcgacctcgcgagagcaagcggacctcataaagtatgtcgtagtccggattggagtctgcaactcgactccatgaagtcggaatcgctagtaatcgtagatcagaatgctacggtgaatacgttcccgggccttgtacacaccgcccgtcacaccatgggagtgggttgcaaaagaagtaggtagcttaaccttcgggagggcgcttaccactttgtgattcatgactggggtgaagtcgtaacaaggtaaccgtaggggaacctgcggttggatcacctcctt

SEQ ID NO: 1753 - DNA, 1536 bp, artificial sequence
  GCF_000275805.1_00983_Scardovia_wiggsiae
ttgaagagtttgatcatggctcagattgaacgctggcggcaggcctaacacatgcaagtcgagcggtagcacagagagcttgctctcgggtgacgagcggcggacgggtgagtaatgtctgggaaactgcctgatggagggggataactactggaaacggtagctaataccgcataatgtcgcaagaccaaagtgggggaccttcgggcctcatgccatcagatgtgcccagatgggattagctagtaggtggggtaatggctcacctaggcgacgatccctagctggtctgagaggatgaccagccacactggaactgagacacggtccagactcctacgggaggcagcagtggggaatattgcacaatgggcgcaagcctgatgcagccatgccgcgtgtatgaagaaggccttcgggttgtaaagtactttcagcgaggaggaaggcattaaggctaataaccttagtgattgacgttactcgcagaagaagcaccggctaactccgtgccagcagccgcggtaatacggagggtgcaagcgttaatcggaattactgggcgtaaagcgcacgcaggcggtctgttaagtcagatgtgaaatccccgggctcaacctgggaactgcatttgaaactggcaggcttgagtcttgtagaggggggtagaattccaggtgtagcggtgaaatgcgtagagatctggaggaataccggtggcgaaggcggccccctggacaaagactgacgctcaggtgcgaaagcgtggggagcaaacaggattagataccctggtagtccacgctgtaaacgatgtcgacttggaggttgttcccttgaggagtggcttccggagctaacgcgttaagtcgaccgcctggggagtacggccgcaaggttaaaactcaaatgaattgacgggggcccgcacaagcggtggagcatgtggtttaattcgatgcaacgcgaagaaccttacctactcttgacatccagagaacttagcagagatgctttggtgccttcgggaactctgagacaggtgctgcatggctgtcgtcagctcgtgttgtgaaatgttgggttaagtcccgcaacgagcgcaacccttatcctttgttgccagcgattcggtcgggaactcaaaggagactgccagtgataaactggaggaaggtggggatgacgtcaagtcatcatggcccttacgagtagggctacacacgtgctacaatggcatatacaaagagaagcgacctcgcgagagcaagcggacctcataaagtatgtcgtagtccggattggagtctgcaactcgactccatgaagtcggaatcgctagtaatcgtagatcagaatgctacggtgaatacgttcccgggccttgtacacaccgcccgtcacaccatgggagtgggttgcaaaagaagtaggtagcttaaccttcgggagggcgcttaccactttgtgattcatgactggggtgaagtcgtaacaaggtaaccgtaggggaacctgcggttggatcacctcctt

SEQ ID NO: 1754 - DNA, 1536 bp, artificial sequence; identical to SEQ ID NO: 1752
  GCF_000275805.1_01176_Scardovia_wiggsiae

SEQ ID NO: 1755 - DNA, 1533 bp, artificial sequence
  GCF_003340315.1_00001_Slackia_isoflavoniconvertens
tgaagagtttgatcatggctcagattgaacgctggcggcaggcttaacacatgcaagtcgagcggggaaaggtagcttgctacctaacctagcggcggacgggggagtaatgcttaggaatctgcctattagtgggggacaacattccgaaaggaatgctaataccgcatacgtcctacgggagaaagcaggggaccttcgggccttgcgctaatagatgagcctaagtcggattagctagttggtggggtaaaggcctaccaaggcgacgatctgtagcgggtctgagaggatgatccgccacactgggactgagacacggcccagactcctacgggaggcagcagtggggaatattggacaatggggggaaccctgatccagccatgccgcgtgtgtgaagaaggccttttggttgtaaagcactttaagcgaggaggaggctactagtattaatactactggatagtggacgttactcgcagaataagcaccggctaactctgtgccagcagccgcggtaatacagagggtgcgagcgttaatcggatttactgggcgtaaagcgtgcgtaggcggctgattaagtcggatgtgaaatccctgagcttaacttaggaattgcattcgatactggtcagctagagtatgggagaggatggtagaattccaggtgtagcggtgaaatgcgtagagatctggaggaataccgatggcgaaggcagccatctggcctaatactgacgctgaggtacgaaagcatggggagcaaacaggattagataccctggtagtccatgccgtaaacgatgtctactagccgttggggcctttgaggctttagtggcgcagctaacgcgataagtagaccgcctggggagtacggtcgcaagactaaaactcaaatgaattgacgggggcccgcacaagcggtggagcatgtggtttaattcgatgcaacgcgaagaaccttacctggtcttgacatagtaagaactttccagagatggattggtgccttcgggaacttacatacaggtgctgcatggctgtcgtcagctcgtgtcgtgagatgttgggttaagtcccgcaacgagcgcaacccttttccttatttgccagcgggttaagccgggaactttaaggatactgccagtgacaaactggaggaaggcggggacgacgtcaagtcatcatggcccttacgaccagggctacacacgtgctacaatggtcggtacaaagggttgctacctagcgataggatgctaatctcaaaaagccgatcgtagtccggattggagtctgcaactcgactccatgaagtcggaatcgctagtaatcgcggatcagaatgccgcggtgaatacgttcccgggccttgtacacaccgcccgtcacaccatgggagtttgttgcaccagaagtaggtagtctaaccgcaaggaggacgcttaccacggtgtggccgatgactggggtgaagtcgtaacaaggtagccgtaggggaacctgcggctggatcacctcctt

SEQ ID NO: 1756 - DNA, 1486 bp, artificial sequence
  GCF_003725955.1_01940_Slackia_isoflavoniconvertens
cttgagagtttgatcctggctcagagcgaacgctggcggcaggcttaacacatgcaagtcgaacgggcgtagcaatacgtcagtggcagacgggtgagtaacgcgtgggaacgtaccttttggttcggaacaactgagggaaacttcagctaataccggataagcccttacggggaaagatttatcgccgaaagatcggcccgcgtctgattagctagttggtgaggtaatggctcaccaaggcgacgatcagtagctggtctgagaggatgatcagccacattgggactgagacacggcccaaactcctacgggaggcagcagtggggaatattggacaatgggggcaaccctgatccagccatgccgcgtgagtgatgaaggccctagggttgtaaagctcttttgtgcgggaagataatgacggtaccgcaagaataagccccggctaacttcgtgccagcagccgcggtaatacgaagggggctagcgttgctcggaatcactgggcgtaaagggtgcgtaggcgggtttctaagtcagaggtgaaagcctggagctcaactccagaactgcctttgatactggaagtcttgagtatggcagaggtgagtggaactgcgagtgtagaggtgaaattcgtagatattcgcaagaacaccagtggcgaaggcggctcactgggccattactgacgctgaggcacgaaagcgtggggagcaaacaggattagataccctggtagtccacgccgtaaacgatgaatgccagccgttagtgggtttactcactagtggcgcagctaacgctttaagcattccgcctggggagtacggtcgcaagattaaaactcaaaggaattgacgggggcccgcacaagcggtggagcatgtggtttaattcgacgcaacgcgcagaaccttaccagcccttgacatgtccaggaccggtcgcagagacgtgaccttctcttcggagcctggagcacaggtgctgcatggctgtcgtcagctcgtgtcgtgagatgttgggttaagtcccgcaacgagcgcaacccccgtccttagttgctaccatttagttgagcactctaaggagactgccggtgataagccgcgaggaaggtggggatgacgtcaagtcctcatggcccttacgggctgggctacacacgtgctacaatggcggtgacaatgggaagctaaggggcgacccttcgcaaatctcaaaaagccgtctcagttcggattgggctctgcaactcgagcccatgaagttggaatcgctagtaatcgtggatcagcatgccacggtgaatacgttcccgggccttgtacacaccgcccgtcacaccatgggagttggctttacctgaagacggtgcgctaaccagcaatggaggcagccggccacggtagggtcagcgactggggtgaagtcgtaacaaggtagccgtaggggaacctgcggctggatcacctccttt

SEQ ID NO: 1757 - DNA, 1373 bp, Artificial Sequence
  STR00794_Clostridium_disporicum
  misc_feature (10)..(10): n is a, c, g, or t
  misc_feature (23)..(24): n is a, c, g, or t
gcgagtggangttcttcggagcnnaagctagcggcggacgggtgagtaacacgtgggcaacctgcctcatagaggggaatagcctcccgaaagggagattaataccgcataagattgtagcttcgcatgaagtagcaattaaaggagcaatccgctatgagatgggcccgcggcgcattagctagttggtgaggtaacggctcaccaaggcgacgatgcgtagccgacctgagagggtgatcggccacattgggactgagacacggcccagactcctacgggaggcagcagtggggaatattgcacaatgggggaaaccctgatgcagcaatgccgcgtgagtgatgacggccttcgggttgtaaagctctgtcttcggggacgataatgacggtacccgaggaggaagccacggctaactacgtgccagcagccgcggtaatacgtaggtggcaagcgttgtccggatttactgggcgtaaagggagcgtaggcggatttttaagtgagatgtgaaatacccgggcttaacttgggtgctgcatttcaaactggaagtctagagtgcaggagaggagaagggaattcctagtgtagcggtgaaatgcgtagagattaggaagaacaccagtggcgaaggcgcttctctggactgtaactgacgctgaggctcgaaagcgtggggagcaaacaggattagataccctggtagtccacgccgtaaacgatgaatactaggtgtaggggttgtcatgacctctgtgccgccgctaacgcattaagtattccgcctggggagtacggtcgcaagattaaaactcaaaggaattgacgggggcccgcacaagcagcggagcatgtggtttaattcgaagcaacgcgaagaatcttacctagacttgacgtctcctgaattacccgtaactggggaagtcgcttcggcgacaggaagacaggtggtgcatggttgtcgtcagctcgtgtcgtgagatgttgggttaagtcccgcaacgagcgcaacccttattgttagttgctaccatttagttgagcactctagcgagactgcccgggttaaccgggaggaaggtggggatgacgtcaaatcatcatgccccttatgtctagggctacacacgtgctacaatggcaagtacaaagagaagcaagaccgcgaggtggagcaaaactcaaaaacttgtctcagttcggattgtaggctgaaactcgcctacatgaagctggagttgctagtaatcgcgaatcagcatgtcgcggtgaatacgttcccgggccttgtacacaccgcccgtcacaccatgagagttggcaatacccaaagtgcgtgatctaactcgcaagagaggaagcgc

SEQ ID NO: 1758 - DNA, 1338 bp, Artificial Sequence
  STR00849_Flavonifractor_plautii
caacggattgagttacctagtggcggacgggtgagtaacgcgtgaggaacctgccttggagaggggaataacactccgaaaggagtgctaataccgcatgatgcagttgggtcgcatggctctgactgccaaagatttatcgctctgagatggcctcgcgtctgattagctagtaggcggggtaacggcccacctaggcgacgatcagtagccggactgagaggttgaccggccacattgggactgagacacggcccagactcctacgggaggcagcagtggggaatattgggcaatgggcgcaagcctgacccagcaacgccgcgtgaaggaagaaggctttcgggttgtaaacttcttttgtcggggacgaaacaaatgacggtacccgacgaataagccacggctaactacgtgccagcagccgcggtaatacgtaggtggcaagcgttatccggatttactgggtgtaaagggcgtgtaggcgggattgcaagtcagatgtgaaaactgggggctcaacctccagctgcatttgaaactgtagttcttgagtgctggagaggcaatcggaattccgtgtgtagcggtgaaatgcgtagatatacggaggaacaccagtggcgaaggcggattgctggacagtaactgacgctgaggcgcgaaagcgtggggagcaaacaggattagataccctggtagtccacgccgtaaacgatggatactaggtgtggggggtctgaccccctccgtgccgcagttaacacaataagtatcccacctggggagtacgatcgcaaggttgaaactcaaaggaattgacgggggcccgcacaagcggtggagtatgtggtttaattcgaagcaacgcgaagaaccttaccaggtgtagttctccagtgatggagaggcaatcggatttcggtctgtagggggaaagtggagacaggtggtgcatggttgtcgtcagctcgtgtcgtgagatgttgggttaagtcccgcaacgagcgcaacccttattgttagttgctacgcaagagcactctagcgagactgccgttgacaaaacggaggaaggtggggacgacgtcaaatcatcatgccccttatgtcctgggccacacacgtactacaatggtggttaacagagggaggcaataccgcgaggtggagcaaatccctaaaagccatcccagttcggattgcaggctgaaacccgcctgtatgaagttggaatcgctagtaatcgcggatcagcatgccgcggtgaatacgttcccgggccttgtacacaccgcccgtcacaccatgagagtcgggaacacccgaagtccgtag

SEQ ID NO: 1759 - DNA, 1373 bp, Artificial Sequence
  STR00985_Turicibacter_sanguinis
gcgaaccacttcggtggtgagcggcgaacgggtgagtaacacgtaggttatctgcccatcagacggggacaacgattggaaacgatcgctaataccggataggacgaaagtttaaaggtgcttcggcaccactgatggatgagcctgcggcgcattagctagttggtagggtaaaggcctaccaaggcgacgatgcgtagccgacctgagagggtgaacggccacactgggactgagacacggcccagactcctacgggaggcagcagtagggaatcttcggcaatgggcgaaagcctgaccgagcaacgccgcgtgaatgatgaaggccttcgggttgtaaaattctgttataagggaagaatggctctagtaggaaatggctagagtgtgacggtaccttatgagaaagccacggctaactacgtgccagcagccgcggtaatacgtaggtggcgagcgttatccggaattattgggcgtaaagagcgcgcaggtggttgattaagtctgatgtgaaagcccacggcttaaccgtggagggtcattggaaactggtcaacttgagtgcagaagagggaagtggaattccatgtgtagcggtgaaatgcgtagagatatggaggaacaccagtggcgaaggcggcttcctggtctgtaactgacactgaggcgcgaaagcgtggggagcaaacaggattagataccctggtagtccacgccgtaaacgatgagtgctaagtgttgggggtcgaacctcagtgctgaagttaacgcattaagcactccgcctggggagtacggtcgcaagactgaaactcaaaggaattgacggggacccgcacaagcggtggagcatgtggtttaattcgaagcaacgcgaagaaccttaccaggtcttgacataccagtgaccgtcctagagataggattttcccttcggggaaagcgcacggcttagccgtgggggttcattggacacgtgtcgagatgtgtggagaaaagtcccgcaacgagcgcaacccctgtcgttagttgccagcattcagttggggactctaacgagactgccagtgacaaactggaggaaggtggggatgacgtcaaatcatcatgccccttatgacctgggctacacacgtgctacaatggttggtacaaagagaagcgaagcggtgacgtggagcaaacctcataaagccaatctcagttcggattgtaggctgcaactcgcctacatgaagttggaatcgctagtaatcgcgaatcagcatgtcgcggtgaatacgttcccgggtcttgtacacaccgcccgtcacaccacgagagtttacaacacccgaagtcagtggcctaaccgcaaggagggagctg

SEQ ID NO: 1760 - DNA, 1335 bp, Artificial Sequence
  STR01042_Cellulosilyticum_lentocellum
tgcgaggagcttgctcctcaaagttagtggcggacgggtgagtaacgcgtgggtaacctgccctatgcagggggataacgtttggaaacgaacgctaataccgcataacctagttggttcgcatgaactgactagcaaagatttatcggcataggatggacccgcgttagattagctagttggtgagataacagcccaccaaggcaacgatctatagccggcctgagagggtgaacggccacactgggactgagacacggcccagactcctacgggaggcagcagtggggaatattgcacaatgggcgcaagcctgatgcagcgacgccgcgtgaaggatgaaggtcttcggatcgtaaacttctatcagcagggaagaataccatgacggtacctgataagaagccccggctaactacgtgccagcagccgcggtaatacgtagggggcaagcgtcggaattactgggtgtaaagggtgcgtaggtggcgatttaagtcagatgtgaaaactcagggctcaaccttgagactgcatctgaaactgagttgctagagtgcaggagaggaaagcggaattccgagtgtagcggtgaaatgcgtagatattcggaggaacaccagtagcgaaggcggctttctggactgtaactgacactgaggcacgaaagcgtggggagcgaacaggattagataccctggtagtccacgccgtaaacgatgaatactaggtgtcggggctcacgggtctcggtgccgcagctaacgcattaagtattccacctgggaagtacgaccgcaaggttgaaactcaaaggaattgacggggacccgcacaagcggtggagcatgtggtttaattcgaagcaacgcgaagaaccttacctaaacttgacatccttttgaccgatccttaatcggatctttactagcttgctagtacagagcaggagaggagagcatggttgtcgtcagctcgtgtcgtgagatgttgggttaagtcccgcaacgagcgcaacccctatctttagtagccatcattcagttgggcactctagagagactgccagggataacctggaggaaggtggggatgacgtcaaatcatcatgccccttatgtttagggctacacacgtgctacaatgggtgctacaaagggaagcaaaaccgcgaggtcaagcaaatcccaaaaaggcactcccagttcggattgtagtctgcaactcgactacatgaagttggaatcgctagtaatcgcgaatcagaatgtcgcggtgaatacgttcccgggtcttgtacacaccgcccgtcacaccacgggagttgggggggcc

SEQ ID NO: 1761 - DNA, 1377 bp, Artificial Sequence
  STR01056_ErysipelatoClostridium_ramosum
acgcgagcacttgtgctcgagtggcgaacgggtgagtaatacataagtaacctgccctagacagggggataactattggaaacgatagctaagaccgcataggtacggacactgcatggtgaccgtattaaaagtgcctcaaagcactggtagaggatggacttatggcgcattagctggttggcggggtaacggcccaccaaggcgacgatgcgtagccgacctgagagggtgaccggccacactgggactgagacacggcccagactcctacgggaggcagcagtagggaattttcggcaatgggggaaaccctgaccgagcaacgccgcgtgaaggaagaaggttttcggattgtaaacttctgttataaaggaagaacggcggctacaggaaatggtagccgagtgacggtactttattagaaagccacggctaactacgtgccagcagccgcggtaatacgtaggtggcaagcgttatccggaattattgggcgtaaagagggagcaggcggcagcaagggtctgtggtgaaagcctgaagcttaacttcagtaagccatagaaaccaggcagctagagtgcaggagaggatcgtggaattccatgtgtagcggtgaaatgcgtagatatatggaggaacaccagtggcgaaggcgacgatctggcctgcaactgacgctcagtcccgaaagcgtggggagcaaataggattagataccctagtagtccacgccgtaaacgatgagtactaagtgttggatgtcaaagttcagtgctgcagttaacgcaataagtactccgcctgagtagtacgttcgcaagaatgaaactcaaaggaattgacgggggcccgcacaagcggtggatcatgtggtttaattcgaagcaacgcgaagaaccttaccgggtcttgacatactcataaaggctccagagatggagagatagctatatgagatacaggtggtgcatggttgtcgtcagctcgtgtcgtgagatgttgggttaagtcccgcaacgagcgcaacccttatcgttagttaccatcattaagttggggactctagcgagactgccagtgacaagctggaggaaggcggggatgacgtcaaatcatcatgccccttatgacctgggctacacacgtgctacaatggatggtgcagagggaagcgaagccgcgaggtgaagcaaaacccataaaaccattctcagttcggattgtagtctgcaactcgactacatgaagttggaatcgctagtaatcgcgaatcagcatgtcgcggtgaatacgttctcgggccttgtacacaccgcccgtcacaccacgagagttgataacacccgaagccggtggcctaaccgcaaggaa

SEQ ID NO: 1762 - DNA, 1382 bp, Artificial Sequence
  STR01229_Dorea_longicatena
cgagcgaagcacttaagtctgattcttcggatgaagacttttgtgactgagcggcggacgggtgagtaacgcgtgggtaacctgcctcatacagggggataacagttagaaatgactgctaataccgcataagaccacggtaccgcatggtacagtggtaaaaactccggtggtatgagatggacccgcgtctgattaggtagttggtggggtaacggcctaccaagccgacgatcagtagccgacctgagagggtgaccggccacattgggactgagacacggcccagactcctacgggaggcagcagtggggaatattgcacaatggaggaaactctgatgcagcgacgccgcgtgaaggatgaagtatttcggtatgtaaacttctatcagcaggaagaaaatgacggtacctgctaagaagccccggctaactacgtgccagcagccgcggtaatacgtagggggcaagcgttatccggatttactgggtgtaaagggagcgtagacggcacggcaagccagatgtgaaagcccggggctcaaccccgggactgcatttggaactgctgagctagagtgtcggagaggcaagtggaattcctagtgtagcggtgaaatgcgtagatattaggaggaacaccagtggcgaaggcggcttgctggacgatgactgacgttgaggctcgaaagcgtggggagcaaacaggattagataccctggtagtccacgccgtaaacgatgactgctaggtgtcgggtggcaaagccattcggtgccgcagctaacgcaataagcagtccacctggggagtacgttcgcaagaatgaaactcaaaggaattgacggggacccgcacaagcggtggagcatgtggtttaattcgaagcaacgcgaagaaccttacctgatcttgacatcccgatgaccgcttcgtaatgtaagcttttcttcggaacatcggtgacaggtggtgcatggcggtcgtcagctcgtgtcgtgagatgttgggttaagtcccgcaacgagcgcaacccctatcttcagtagccagcaggttaagctgggcactctggagagactgccagggataacctggaggaaggtggggatgacgtcaaatcatcatgccccttatgaccagggctacacacgtgctacaatggcgtaaacaaagagaagcgaactcgcgagggtaagcaaatctcaaaaataacgtctcagttcggattgtagtctgcaactcgactacatgaagctggaatcgctagtaatcgcagatcagaatgctgcggtgaatacgttcccgggtcttgtacacaccgcccgtcacaccatgggagtcagtaacgcccgaagtcagtgacccaaccgtaagga

SEQ ID NO: 1763 - DNA, 1319 bp, Artificial Sequence
  STR01277_[Clostridium]_aldenense
  misc_feature (27)..(27): n is a, c, g, or t
  misc_feature (250)..(250): n is a, c, g, or t
ggatggattcctggttgagtgagtggnggacgggtgagtaacgcgtggataacctgcctcacactgggggataacagttaaaagtgggtgctaataccgcataagcgcacagtaccgcgtggtacggtgtgaaaaacccgggtggtgtgagatggatccgcgtctgattacccaggtgggggggtagcggccccccaaagcgacgatcagtacccgacctgagagggtgaccggccattttgggactganacacggcccaaactcctacgggaggcagcagtggggaatattgcacagtgggcggaaccctgatgcagcgaccccgcgtgagtgaaaaaatatctcggtatgtaaagctctatcagcggggaaaaaaatgacggcacctgactaaaaacccccggctaactacgtccccgggaggggatcgatttactgggtgtaaagggagcgtaacggcacgcagtctggagtgaaagcccggggcccaaccccgggactgctttgaaactgtgctgctggagtgcagagaggtaagtggaattcctagtgtagcggtgaatgcgtaatattagagaacaccagtggcaagcgcttactggactgtactgacttgagctcgaaagcgtggggagcaaacaggattagataccctggtagtccacgccgtaaacgatgaatgctaggtgtcggggggcaaagcccttcggtgccgccgctaacgcaataagcattccacctggggagtacgttcgcaagaatgaaactcaaaggaattgacggggacccgcacaagcggtggagcatgtggtttaattcgaagcaacgcgaagaaccttaccaagtcttgacatccccctgaccggcgcgtaacggtgcccttccttcgggacaggggagacaggtggtgcatggttgtcgtcagctcgtgtcgtgagatgttgggttaagtcccgcaacgagcgcaacccttatccttagtagccagcacgtcgtggtgggcactctagggagactgccagggataacctggaggaaggtggggatgacgtcaaatcatcatgccccttatgatttgggctacacacgtgctacaatggcgtaaacaaagggaggcgaccctgcgaaggtaagcaaatcccaaaaataacgtcccagttcggactgtagtctgcaacccgactacacgaagctggaatcgctagtaatcgcggatcagaatgccgcggtgaatacgttcccgggtcttgtacacaccgcccgtcacaccatgggagtcagcaacgcccgaagtcagtgacccaaccttaacaggagg

SEQ ID NO: 1764 - DNA, 1253 bp, Artificial Sequence
  STR00326_[Clostridium]_bolteae
  misc_feature (207)..(207): n is a, c, g, or t
cgtgtataccctgcctcactgtgggggataacagttaaaagtgagtgctaataccgcataagcgcacagtaccgcgtggtacggtgtgaaaaactccggtggtgtgagatggatccgcgtctgattaccctggtgggggggtaacggccccccaaagcgactatcaatacccgacctgagagggtgaccggccactttgggactganacacggcccactctcctacgggaggcagcagtggggaatattgcacagtgggagaaagcctgatgcagccaccccgcgtgagtgaaaatttcgaaggaaaaaatgacggcctgataaaaccccggctaactacgtgccagcaccgcggtaatactagggggcaagcgttatccggatttactgggtgtaaagggagcgtaacggcaacagtctgaagtgaaaacccgggctcaccctggactgctttggaaactgttttgctagagtgtcgagaggtaagtgattcctagtgtagcggtgatgcgtaatattagagaacaccagtggcagcggcttactgtacgataactgacattgacgctcaagagcgtggagagcaaacgagattaaataccctggtaatccacgccgtacaccatgagtgctacgtgttggggggcaaagcccttcggtgccgtcgcaaacgcagtaagcattccacctggggagtacgttcgcaagaatgaaactcaaaggaattgacggggacccgcacaagcggtggagcatgtggtttaattcgaagcaacgcgaagaaccttaccaagtcttgacatcctcttgaccggcgtgtaacggcgccttcccttcggggcaagagagacaggtggtgcatggttgtcgtcagctcgtgtcgtgagatgttgggttaagtcccgcaacgagcgcaacccttatccttagtagccagcaggtagagctgggcactctagggagactgccagggataacctggaggaaggtggggatgacgtcaaatcatcatgccccttatgatttgggctacacacgtgctacaatggcgtaaacaaagggaagcaagacagtgatgtggagcaaatcccaaaaataacgtcccagttcggactgtagtctgcaacccgactacacgaagctggaatcgctagtaatcgcgaatcagaatgtcgcggtgaatacgttcccgggtcttgtacacaccgcccgtcacaccatgggagtcagcaacgcccgaagtcagtgaccca

SEQ ID NO: 1765 - DNA, 1361 bp, Artificial Sequence
  STR00203_[Clostridium]_innocuum
agcttgcttccaaagagacttagtggcgaacgggtgagtaacacgtaggtaacctgcccatgtgtccgggataactgctggaaacggtagctaaaaccggataggtatacagagcgcatgctcagtatattaaagcgcccttcaaggcgtgaacatggatggacctgcggcgcattagctagttggtgaggtaacggcccaccaaggcaatgatgcgtagccggcctgagagggtaaacggccacattgggactgagacacggcccaaactcctacgggaggcagcagtagggaattttcgtcaatgggggaaaccctgaacgagcaatgccgcgtgagtgaagaaggtcttcggatcgtaaagctctgttgtaagtgaagaacggctcatagaggaaatgctatgggagtgacggtagcttaccagaaagccacggctaactacgtgccagcagccgcggtaatacgtaggtggcaagcgttatccggaatcattgggcgtaaagggtgcgtaggtggcgtactaagtctgtagtaaaaggcaatggctcaaccattgtaagctatggaaactggtatgctggagtgcagaagagggcgatggaattccatgtgtagcggtaaaatgcgtagatatatggaggaacaccagtggcgaaggcggtcgcctggtctgtaactgacactgaggcacgaaagcgtggggagcaaataggattagataccctagtagtccacgccgtaaacgatgagaactaagtgttggaggaattcagtgctgcagttaacgcaataagttctccgcctggggagtatgcacgcaagtgtgaaactcaaaggaattgacgggggcccgcacaagcggtggagtatgtggtttaattcgaagcaacgcgaagaatcttaccaggccttgacatggaaacaaataccctagagatagggggataattatggatcacacaggtggtgcatggttgtcgtcagctcgtgtcgtgagatgttgggttaagtcccgcaacgagcgcaacccttgtcgcatgttaccagcatcaagttggggactcatgcgagactgccggtgacaaaccggaggaaggtggggatgacgtcaaatcatcatgccccttatggcctgggctacacacgtactacaatggcgaccacaaagagcagcgacacagtgatgtgaagcgaatctcataaaggtcgtctcagttcggattgaagtctgcaactcgacttcatgaagtcggaatcgctagtaatcgcagatcagcatgctgcggtgaatacgttctcgggccttgtacacaccgcccgtcaaaccatgggagtcagtaatacccgaagccggtggc

SEQ ID NO: 1766 - DNA, 1363 bp, Artificial Sequence
  STR01757_Eisenbergiella_tayi
  misc_feature (149)..(149): n is a, c, g, or t
agttttcggatggaatccgtataacttagtggcggacgggtgagtaacgcgtgggaaacctgccctgtaccgggggataacacttagaaataggtgctaataccgcataagcgcacggaaccgcatggttctgtgtgaaaaactccggnggtacaggatggtcccgcgtctgattagccagttggcagggtaacggcctaccaaagcgacgatcagtagccggcctgagagggtgaacggccacattgggactgagacacggcccaaactcctacgggaggcagcagtggggaatattgcacaatgggggaaaccctgatgcagcgacgccgcgtgagtgaagaagtatttcggtatgtaaagctctatcagcagggaagaaaatgacggtacctgactaagaagccccggctaactacgtgccagcagccgcggtaatacgtagggggcaagcgttatccggatttactgggtgtaaagggagcgtagacggcatggcaagccagatgtgaaaacccagggctcaaccttgggattgcatttggaactgccaggctggagtgcaggagaggtaagcggaattcctagtgtagcggtgaaatgcgtagatattaggaggaacaccagtggcgaaggcggcttactggactgtaactgacgttgaggctcgaaagcgtggggagcaaacaggattagataccctggtagtccacgcggtaaacgatgattgctaggtgtaggtgggtatggacccatcggtgccgcagctaacgcaataagcaatccacctggggagtacgttcgcaagaatgaaactcaaaggaattgacggggacccgcacagcggtggagcatgtgtttaattcgaagcaacgcgaagaaccttaccaagtcttgacatcccaatgacgcacctgtaaagaggtgttcccttcggggcaatggagacaggtggtgcatggttgtcgtcagctcgtgtcgtgagatgttgggttaagtcccgcaacgagcgcaacccttattcttagtagccagcaggtaaagctgggcactctaaggagactgccggggataacccggaggaaggcggggatgacgtcaaatcatcatgccccttatgatttgggctacacacgtgctacaatggcgtaaacaaagggaagcgagacagtgatgtggagcaaatcccagaaataacgtctcagttcggattgtagtctgcaactcgactacatgaagctggaatcgctagtaatcgcgaatcagcatgtcgcggtgaatacgttcccgggtcttgtacacaccgcccgtcacaccatgggagttggaaatgcccgaagtctgtgacctaaccgaaagggag

SEQ ID NO: 1767 - DNA, 910 bp, Artificial Sequence
  STR02586_Blautia_obeum
  misc_feature (105)..(105): n is a, c, g, or t
  misc_feature (158)..(158): n is a, c, g, or t
agccgcggtaatacgtagggggcaagcgttatccggatttactgggtgtaaagggagcgtagacggactggcaagtctgatgtgaaaggcgggggctcaaccccnggactgcattggaaactgttagtcttgagtgccggagaggtaagcggaattcntagtgtagcggtgaaatgcgtagatattaggaggaacaccagtggcgaaggcggcttactggacggtaactgacgttgaggctcgaaagcgtggggagcaaacaggattagataccctggtagtccacgccgtaaacgatgaatactaggtgttggggagcaaagctcttcggtgccgccgcaaacgcattaagtattccacctggggagtacgttcgcaagaatgaaactcaaaggaattgacggggacccgcacaagcggtggagcatgtggtttaattcgaagcaacgcgaagaaccttaccaagtcttgacatccctctgaccgactcttaaccgagtctttccttcgggacaggggagacaggtggtgcatggttgtcgtcagctcgtgtcgtgagatgttgggttaagtcccgcaacgagcgcaacccctatccccagtagccagcggttcggccgggcactctgaggagactgccagggataacctggaggaaggcggggatgacgtcaaatcatcatgccccttatgatttgggctacacacgtgctacaatggcgtaaacaaagggaagcaagcctgcgaaggtaagcaaatcccaaaaataacgtcccagttcggactgcagtctgcaactcgactgcacgaagctggaatcgctagtaatcgcggatcagaatgccgcggtgaatacgttcccgggtcttgtacacaccgcccgtcacaccatgggagtcagtaacgcccg

SEQ ID NO: 1768 - DNA, 951 bp, Artificial Sequence
  STR02351_[Clostridium]_scindens
  misc_feature (54)..(54): n is a, c, g, or t
agccccggctaactacgtgccagcagccgcggtaatacgtagggggcaagcgtnatccggatttactgggtgtaaagggagcgtagacggcgatgcaagccagatgtgaaagcccggggctcaaccccgggactgcatttggaactgcgtggctggagtgtcggagaggcaggcggaattcctagtgtagcggtgaaatgcgtagatattaggaggaacaccagtggcgaaggcggcctgctggacgatgactgacgttgaggctcgaaagcgtggggagcaaacaggattagataccctggtagtccacgccgtaaacgatgactactaggtgtcgggtggcaaggccattcggtgccgcagcaaacgcaataagtagtccacctggggagtacgttcgcaagaatgaaactcaaaggaattgacggggacccgcacaagcggtggagcatgtggtttaattcgaagcaacgcgaagaaccttacctgatcttgacatcccgatgccaaagcgcgtaacgcgctctttcttcggaacatcggtgacaggtggtgcatggttgtcgtcagctcgtgtcgtgagatgttgggttaagtcccgcaacgagcgcaacccctatcttcagtagccagcatttcggatgggcactctggagagactgccagggacaacctggaggaaggtggggatgacgtcaaatcatcatgccccttatgaccagggctacacacgtgctacaatggcgtaaacaaagggaggcgaacccgcgagggtgggcaaatcccaaaaataacgtctcagttcggattgtagtctgcaactcgactacatgaagctggaatcgctagtaatcgcgaatcagaatgtcgcggtgaatacgttcccgggtcttgtacacaccgcccgtcacaccatgggagtcagtaacgcccgaagccggtgacccaacc

SEQ ID NO: 1769 - DNA, 1346 bp, Artificial Sequence
  STR00363_Eubacterium_callanderi
  misc_feature (417)..(417): n is a, c, g, or t
aagaaccttcgggggaataagtgattggaaagtggcgaacgggtgagtaacgcgtgggtaacctgccctatggaaaggaatagcctcgggaaactgggagtaaagccttatattatggagagatcgcatggtcatttcatgaaaactccggtgccataggatggacccgcgtcccattagctagttggtgagataacagcccaccaaggcgacgatgggtaaccggtctgagagggcgaacggtcacactggaactgagacacggtccagactcctacgggaggcagcagtggggaatattgcgcaatgggggcaaccctgacgcagcaataccgcgtgagtgaagaaggttttcggatcgtaaagctctgttattggggaagaaaacatgacggtacccaatgaggaagtcccggnctaactacgtgccagcagccgcggtaatacgtaggggacaagcgttgtccggaatgactgggcgtaaagggcgcgtaggcggtctgataagtcagatgtgaaaggtaccggctcaaccggtgacgtgcatttgaaactgtcagacttgagtattggagaggcaagtggaattcctagtgtagcggtgaaatgcgtagatattaggaggaacaccagtggcgaaggcggcttgctggacaaatactgacgctgaggtgcgaaagcgtggggagcgaacaggattagataccctggtagtccacgccgtaaacgatgaatgctaggtgttggggaaactcagtgccgcagttaacacaataagcattccgcctggggagtacgaccgcaaggttgaaactcaaaggaattgacggggacccgcacaagcagcggagcatgtggtttaattcgaagcaacgcgaagaaccttaccaggtcttgacatcctctgacaatcccagagatgggacgtttccttcgggaacagagagacaggtggtgcatggttgtcgtcagctcgtgtcgtgagatgttgggttaagtcccgcaacgagcgcaacccctgcctttagttgccagcattgagttgggcactctagagggactgccgtagacaatacggaggaaggtggggatgacgtcaaatcatcatgccccttatgacctgggctacacacgtgctacaatggtctgaacagagggccgcgaaaccgcgaggtgaagcaaatcccttaaaacagatcccagttcggattgcaggctgcaactcgcctgcatgaagttggagttgctagtaatcgcggatcagaatgccgcggtgaatgcgttcccgggtcttgtacacaccgcccgtcacaccacgagagttggcaacacccgaagcctgtgag

SEQ ID NO: 1770 - DNA, 1322 bp, Artificial Sequence
  STR00239_Terrisporobacter_petrolearius
cggcggacgggtgagtaacgcgtgggtaacctgcctcatacacatggataacataccgaaaggtatgctaatacaggataacataagagattcgcatgtttctcttatcaaagctccggcggtatgagatggacccgcgtctgattagctagttggtaaggtaatggcttaccaaggcgacgatcagtagccgacctgagagggtgatcggccacattggaactgagacacggtccaaactcctacgggaggcagcagtggggaatattgcacaatgggcgaaagcctgatgcagcaacgccgcgtgagtgatgaaggccttcgggtcgtaaaactctgtcctcaaggaagataatgacggtacttgaggaggaagccccggctaactacgtgccagcagccgcggtaatacgtagggggctagcgttatccggatttactgggcgtaaagggtgcgtaggtggtttcttaagtcaggagtgaaaggctacggcttaaccgtagtaagctcttgaaactgggaaacttgagtgcaggagaggaaagtggaattcctagtgtagcggtgaaatgcgtagatattaggaggaacaccagtagcgaaggcggctttctggactgtaactgacactgaggcacgaaagcgtggggagcaaacaggattagataccctggtagtccacgccgtaaacgatgagtactaggtgtcgggggttacccccctcggtgccgcagctaacgcattaagtactccgcctggggagtacgctcgcaagagtgaaactcaaaggaattgacggggacccgcacaagtagcggagcatgtggtttaattcgaagcaacgcgaagaaccttacctaagcttgacatccttttgaccgatgcctaatcgcatttttcccttcggggacagaagtgacaggtggtgcatggttgtcgtcagctcgtgtcgtgagatgttgggttaagtcccgcaacgagcgcaacccttgcctttagttgccagcattaagttgggcactctagagggactgccagggataacctggaggaaggtggggatgacgtcaaatcatcatgccccttatgcttagggctacacacgtgctacaatgggtggtacagagggcagccaagtcgtgaggccgagctaatcccttaaagccattctcagttcggattgtaggctgaaactcgcctacatgaagctggagttactagtaatcgcagatcagaatgctgcggtgaatgcgttcccgggtcttgtacacaccgcccgtcacaccacggaagttgggggcgcccgaagccacttagctaa

SEQ ID NO: 1771 - DNA, 1382 bp, Artificial Sequence
  STR00988_Faecalicatena_contorta_STR0ain
tcgagcgaagcgctttacttagatttcttcggattgaagagttttgcgactgagcggcggacgggtgagtaacgcgtgggtaacctgcctcatacagggggataacagttagaaatgactgctaataccgcataagaccacggtaccgcatggtacagtgggaaaaactccggtggtatgagatggacccgcgtctgattagctagttggtaaggtaacggcttaccaaggcgacgatcagtagccgacctgagagggtgaccggccacattgggactgagacacggcccaaactcctacgggaggcagcagtggggaatattgcacaatgggggaaaccctgatgcagcgacgccgcgtgaaggatgaagtatttcggtatgtaaacttctatcagcagggaagaaaatgacggtacctgactaagaagccccgggctaactacgtgccagcagccgcggtaatacgtagggggcaagcgttatccggatttactgggtgtaaagggagcgtagacggttatgtaagtctgatgtgaaaacccggggctcaaccccgggactgcattggaaactatgtaactagagtgtcggagaggtaagtggaattcctagtgtagcggtgaaatgcgtagatattaggaggaacaccagtggcgaaggcggcttactggacgatgactgacgttgaggctcgaaagcgtggggagcaaacaggattagataccctggtagtccacgccgtaaacgatgcatactaggtgtcgggtggcaaagccattcggtgccgcagcaaacgcaataagtatgccacctggggagtacgttcgcaagaatgaaactcaaaggaattgacggggacccgcacaagcggtggagcatgtggtttaattcgaagcaacgcgaagaaccttacctgctcttgacatccccctgaccggcgcgtaatggtgcctttccttcgggacaggggagacaggtggtgcatggttgtcgtcagctcgtgtcgtgagatgttgggttaagtcccgcaacgagcgcaacccttatctttagtagccagcggttcggccgggcactctagagagactgccagggataacctggaggaaggtggggatgacgtcaaatcatcatgccccttatgagcagggctacacacgtgctacaatggcgtaaacaaagggaggcgaagccgcgaggtggagcaaatcccaaaaataacgtctcagttcggattgtagtctgcaactcgactacatgaagctggaatcgctagtaatcgcgaatcagaatgtcgcggtgaatacgttcccgggtcttgtacacaccgcccgtcacaccatgggagttggtaacgcccgaagtcagtgacccaaccgt

SEQ ID NO: 1772 - DNA, 1504 bp, Artificial Sequence
  STR00225_Escherichia_fergusonii
agagtttgatcatggctcagattgaacgctggcggcaggcctaacacatgcaagtcgaaggtaacaggaagcagcttgcttctttgctgacgagtggcggacgggtgagtaatgtctggaaactgcctgatggagggggataactactggaaacggtagctaataccgcataacgtccaagaccaaagagggggaccttcgggcctcttgccatcggatgtgcccagatgggattactagtaggtggggtaacggctcacctaggcgacgatccctagctggtctgagaggatgacagccacactggaactgagacacggtccagactcctacgggaggcagcagtggggaatatgcacaatgggcgcaagcctgatgcagccatgccgcgtgtatgaagaaggccttcgggtgtaaagtactttcagcggggaggaagggagtaaagttaatacctttgctcattgacgttcccgcagaagaagcaccggctaactccgtgccagcagccgcggtaatacggagggtgcagcgttaatcggaattactgggcgtaaagcgcacgcaggcggtttgttaagtcagatgtgaatccccgggctcaacctgggaactgcatctgatactggcaagcttgagtctcgtagagggggtagaattccaggtgtagcggtgaaatgcgtagagatctggaggaataccggtggcaaggcggccccctggacgaagactgacgctcaggtgcgaaagcgtggggagcaaacaggttagataccctggtagtccacgccgtaaacgatgtcgacttggaggttgtgcccttgagcgtggcttccggagctaacgcgttaagtcgaccgcctggggagtacggccgcaaggttaaactcaaatgaattgacgggggcccgcacaagcggtggagcatgtggtttaattcgatgaacgcgaagaaccttacctggtcttgacatccacggaagttttcagagatgggtttgtgcttcgggaactgtgagacaggtgctgcatggctgtcgtcagctcgtgttgtgaaatgttggttaagtcccgcaacgagcgcaacccttatcctttgttgccagcggtccggccgggaatcaaaggagactgccagtgataaactggaggaaggtggggatgacgtcaagtcatcatgcccttacgaccagggctacacacgtgctacaatggcgcatacaaagagaagcgacctcggagagcaagcggacctcataaagtgcgtcgtagtccggattggagtctgcaactcgactcatgaagtcggaatcgctagtaatcgtggatcagaatgccacggtgaatacgttcccggccttgtacacaccgcccgtcacaccatgggagtgggttgcaaaagaagtaggtagcttaccttcgggagggcgcttaccactttgtgattcatgactggggtgaagtcgtaacaaggtaccgtaggggaacctgcggttggatcacc

SEQ ID NO: 1773 - DNA, 808 bp, Artificial Sequence
  STR00249_Bifidobacterium_dentium
atggcgaaggcaggtctctgggccgtcactgacgctgaggagcgaaagcgtggggagcgacaggattagataccctggtagtccacgccgtaaacggtggatgctggatgtggggcccttccacgggttccgtgtcggagctaacgcgttaagcatcccgcctggggagtacggccgaaggctaaaactcaaagaaattgacgggggcccgcacaagcggcggagcatgcggattattcgatgcaacgcgaagaaccttacctgggcttgacatgttcccgacggccgtagagattggcctcccttcggggcgggttcacaggtggtgcatggtcgtcgtcagctcgtgtcgtggatgttgggttaagtcccgcaacgagcgcaaccctcgccctgtgttgccagcacgtcatgtgggaactcacgggggaccgccggggtcaactcggaggaaggtggggatgacgtcagacatcatgccccttacgtccagggcttcacgcatgctacaatggccggtacagcgggatggacatggcgacatggagcggatccctgaaaaccggtctcagttcggattggagtctgcacccgactccatgaaggcggagtcgctagtaatcgcggatcagcaacgccgcggtgaatggttcccgggccttgtacacaccgcccgtcaagtcatgaaagtgggcagcacccgaagccgtggcctaaccccttgtgggatggagccgtctaaggtgaggctcgtgattgggactaagcgtaacaaggtagccgtaccggaaggtgcggctggatcacc

SEQ ID NO: 1774 - DNA, 1496 bp, Artificial Sequence
  STR02240_[Clostridium]_spiroforme
atggagagtttgatcctggctcaggatgaacgctggcggcgtgcctaatacatgcaagtgaacgcttcacttcggtgaagagtggcgaacgggtgagtaatacataagtaacctggcactacagggggataactgatggaaacgtcagctaagaccgcataggtgtagagatcgcataactctatatgaaaagtgctacgggactggtagatgatggacttatggcgcattagctgttggtagggtaacggcctaccaaggcgacgatgcgtagccgacctgagagggtgaccggcacactgggactgagacacggcccagactcctacgggaggcagcagtagggaattttcgcaatgggggaaaccctgaccgagcaacgccgcgtgaaggaagaagtaattcgttatgtaacttctgtcatagaggaagaacggtggatatagggaatgatatccaagtgacggtactcataagaaagccacggctaactacgtgccagcagccgcggtaatacgtaggtggcgagcgtatccggaattattgggcgtaaagagggagcaggcggcactaagggtctgtggtgaaagtcgaagcttaacttcggtaagccatggaaaccgtagagctagagtgtgtgagaggatcgggaattccatgtgtagcggtgaaatgcgtagatatatggaggaacaccagtggcgaagggacgatctggcgcataactgacgctcagtcccgaaagcgtggggagcaaataggattagtaccctagtagtccacgccgtaaacgatgagtactaagtgttgggagtcaaatctcagtctgcagttaacgcaataagtactccgcctgagtagtacgttcgcaagaatgaaactcaaggaattgacgggggcccgcacaagcggtggagcatgtggtttaattcgaagcaacgcgagaaccttaccaggtcttgacatcgatctaaaggctccagagatggagagatagctataggaagacaggtggtgcatggttgtcgtcagctcgtgtcgtgagatgttgggttaagtccccaacgagcgcaacccctgttgccagttgccagcattaagttggggactctggcgagactccggtgacaagccggaggaaggcggggatgacgtcaaatcatcatgccccttatgacctggctacacacgtgctacaatggacagagcagagggaagcgaagccgcgaggtggagcgaacccataaaactgttctcagttcggactgcagtctgcaactcgactgcacgaagatggatcgctagtaatcgcgaatcagcatgtcgcggtgaatacgttctcgggccttgtacacacgcccgtcacaccatgagagtcggtaacacccgaagccggtggcctaaccgcaaggaagggctgtctaaggtgggactgatgattggggtgaagtcgtaacaaggtatccctacgggaagtggggatggatcacctcctt

SEQ ID NO: 1775 - DNA, 1502 bp, Artificial Sequence
  STR02244_Roseburia_hominis
atgagagtttgatcctggctcaggatgaacgctggcggcgtgcttaacacatgcaagtcaacgaagcactttaattgatttcttcggaatgaagtttttgtgactgagtggcggacggtgagtaacgcgtgggtaacctgcctcatacagggggataacagttggaaacgactgctataccgcataagcgcacaggattgcatgatccagtgtgaaaaactccggtggtatgagatgacccgcgtctgattagccagttggcggggtaacggcccaccaaagcgacgatcagtagcgacctgagagggtgaccggccacattgggactgagacacggcccaaactcctacgggagcagcagtggggaatattgcacaatgggggaaaccctgatgcagcgacgccgcgtgagcaagaagtatttcggtatgtaaagctctatcagcagggaagaagaatgacggtacctgacaagaagcaccggctaaatacgtgccagcagccgcggtaatacgtatggtgcaagcgttaccggatttactgggtgtaaagggagcgcaggcggtacggcaagtctgatgtgaaatcccgggctcaaccccggtactgcattggaaactgtcggactagagtgtcggaggggtaagtgaattcctagtgtagcggtgaaatgcgtagatattaggaggaacaccagtggcgaaggcgcttactggacgattactgacgctgaggctcgaaagcgtggggagcaaacaggattagatccctggtagtccacgccgtaaacgatgaatactaggtgtcggggagcattgctcttcgggccgcagcaaacgcaataagtattccacctggggagtacgttcgcaagaatgaaactcaaggaattgacggggacccgcacaagcggtggagcatgtggtttaattcgaagcaacgcgagaaccttaccaagtcttgacatcccactgacaaagtatgtaatgtactttctcttcgggcagtggtgacaggtggtgcatggttgtcgtcagctcgtgtcgtgagatgttgggttaatcccgcaacgagcgcaacccctattcttagtagccagcggttcggccgggcactctaggagactgccagggataacctggaggaaggtggggatgacgtcaaatcatcatgccccttagacttgggctacacacgtgctacaatggcgtaaacaaagggaagcaatcccgcgaggggagcaaatctcaaaaataacgtctcagttcggactgtagtctgcaactcgactacacgaactggaatcgctagtaatcgcgaatcagaatgtcgcggtgaatacgttcccgggtcttgtcacaccgcccgtcacaccatgggagttggtaatgcccgaagtcagtgacccaaccgcaagagggagctgccgaaggcaggactgataactggggtgaagtcgtaacaaggtagccgtacggaaggtgcggctggatcacctcctt

SEQ ID NO: 1776 - DNA, 1507 bp, Artificial Sequence
  STR02300_Holdemania_filiformis
atggagagtttgatcctggctcaggatgaacgctggcggcgtgcctaatacatgcaagtgaacgcttgcttgaggacttgtcttcaagcgggagtggcgaacgggtgagtaatacatagcaatctgcccatcggcctgggataacagttggaaacgactgctaataccggataggtgtagggaggcatctctcgatcattaaagttgggatacaacacggatggatgagcttatgggtattagctagtaggtgaggtaacggctcacctaggcgatgatacgtagccgacctgaggggtgaccggccacattgggactgagacacggcccaaactcctacgggaggcagcagtaggaattttcggcaatgggcgaaagcctgaccgagcaacgccgcgtgagtgaagaaggcctcgggttgtaaagctctgttgtgaaggaagaacggctcatacagggaatggtatgggaggacggtactttaccagaaagccacggctaactacgtgccagcagccgcggtaatacgtagtggcgagcgttatccggaattattgggcgtaaagggtgcgcaggcggttttttaagttaaggtgaaagcgtggggcttaaccccatatagccttagaaactgagagactagagtacagagagggcaatggaattccatgtgtagcggtaaaatgcgtagatatatggaggaacaccgtggcgaaggcggttgcctggcctgtaactgacgctcatgcacgaaagcgtggggagcaataggattagataccctagtagtccacgccgtaaacgatgagaactaagtgttggggaactcagtgctgcagttaacgcaataagttctccgcctggggagtatgcacgcaagtgtgaactcaaaggaattgacgggggcccgcacaagcggtggagtatgtggtttaattcgacgcacgcgaagaaccttaccaggtcttgacatcccctgcaaagacatagagatatgttggagttatcagggagacaggtggtgcatggttgtcgtcagctcgtgtcgtgagatgttgggttagtcccgcaacgagcgcaacccttgtctttagttactaacattgagttgaggactctaggagactgccggtgacaaaccggaggaaggtggggatgacgtcaaatcatcatgcccctttgacctgggctacacacgtactacaatggcggatacaacgagaagcaagacagtgatgtgagcaaaactcagaaagtccgtctcagttcggattgaagtctgcaacccgacttcatgagccggaatcgctagtaatcgcggatcagcatgccgcggtgaatacgttctcgggccttgacacaccgcccgtcaaaccatgagagttggcaatacccgaagccggtggcctaacctcgaagaggagggagccgtcgaaggtagggctgatgattggggttaagtcgtaacaaggtatcctacgggaacgtggggatggatcacctcctt

SEQ ID NO: 1777 - DNA, 1501 bp, Artificial Sequence
  STR02347_[Clostridium]_symbiosum
atgagagtttgatcctggctcaggatgaacgctggcggcgtgcctaacacatgcaagtcaacgaagcgatttaacggaagttttcggatggaagttgaattgactgagtggcggacggtgagtaacgcgtgggtaacctgccttgtactgggggacaacagttagaaatgactgctataccgcataagcgcacagtatcgcatgatacagtgtgaaaaactccggtggtacaagatgacccgcgtctgattagctagttggtaaggtaacggcttaccaaggcgacgatcagtagcgacctgagagggtgaccggccacattgggactgagacacggcccaaactcctacgggagcagcagtggggaatattgcacaatgggcgaaagcctgatgcagcgacgccgcgtgagtaagaagtatttcggtatgtaaagctctatcagcagggaagaaaatgacggtacctgactagaagccccggctaactacgtgccagcagccgcggtaatacgtagggggcaagcgttatcggatttactgggtgtaaagggagcgtagacggtaaagcaagtctgaagtgaaagcccgggctcaactgcgggactgctttggaaactgtttaactggagtgtcggagaggtaagtggattcctagtgtagcggtgaaatgcgtagatattaggaggaacaccagtggcgaaggcgattactggacgataactgacgttgaggctcgaaagcgtggggagcaaacaggattagatacctggtagtccacgccgtaaacgatgaatactaggtgttggggagcaaagctcttcggtccgtcgcaaacgcagtaagtattccacctggggagtacgttcgcaagaatgaaactcaaggaattgacggggacccgcacaagcggtggagcatgtggtttaattcgaagcaacgcgagaaccttaccaggtcttgacatcgatccgacgggggagtaacgtccccttcccttcgggcggagaagacaggtggtgcatggttgtcgtcagctcgtgtcgtgagatgttgggttaagcccgcaacgagcgcaacccttattctaagtagccagcggttcggccgggaactcttggggactgccagggataacctggaggaaggtggggatgacgtcaaatcatcatgccccttatatctgggctacacacgtgctacaatggcgtaaacaaagagaagcaagaccgcgaggtgggcaaatctcaaaaataacgtctcagttcggactgcaggctgcaactcgcctgcacgaagtggaatcgctagtaatcgcgaatcagaatgtcgcggtgaatacgttcccgggtcttgtaacaccgcccgtcacaccatgggagtcagtaacgcccgaagtcagtgacccaaccgcaagagggagctgccgaaggcgggaccgataactggggtgaagtcgtaacaaggtagccgtatggaaggtgcggctggatcacctcctt

SEQ ID NO: 1778 - DNA, 1503 bp, Artificial Sequence
  STR02362_Oscillibacter_valericigenes
tatagagagtttgatcctggctcaggacgaacgctggcggcgtgcttaacacatgcaagcgaacggagcacccttgactgaggtttcggccaaatgataggaatgcttagtggcggacggtgagtaacgcgtgaggaacctaccttccagagggggacaacagttggaaacgactgcaataccgcatgacgcatgaccggggcatcccgggcatgtcaaagattttatcgctggaaatggcctcgcgtctgattagctagatggtggggtaacagcccaccatggcgacgatcagagccggactgagaggttgaccggccacattgggactgagatacggcccagactcctacggaggcagcagtggggaatattgggcaatggacgcaagtctgacccagcaacgccgcgtgaggaagaaggctttcgggttgtaaacttcttttgtcagggaagagtagaagacggtaccgacgaataagccacggctaactacgtgccagcagccgcggtaatacgtaggtggcaagcttgtccggatttactgggtgtaaagggcgtgcagccgggccggcaagtcagatgtgaaactggaggcttaacctccaaactgcatttgaaactgtaggtcttgagtaccggagaggtttcggaattccttgtgtagcggtgaaatgcgtagatataaggaagaacaccagtggcgaagcggataactggacggcaactgacggtgaggcgcgaaagcgtggggagcaaacaggattgataccctggtagtccacgctgtaaacgatggatactaggtgtgcggggactgacccccgcgtgccgcagttaacacaataagtatcccacctggggagtacgatcgcaaggttgaaatcaaaggaattgacgggggcccgcacaagcggtggattatgtggtttaattcgaagcaagcgaagaaccttaccagggcttgacatcctactaacgaagtagagatacatcaggtgccttcggggaaagtagagacaggtggtgcatggttgtcgtcagctcgtgtcgtgagatgttggttaagtcccgcaacgagcgcaacccctattgttagttgctacgcaagagcactctaggagactgccgttgacaaaacggaggaaggtggggacgacgtcaaatcatcatgcccctttgtcctgggctacacacgtaatacaatggcggtcaacagagggaggcaaagccgcgaggagagcaaacccccaaaagccgtcccagttcggatcgcaggctgcaacccgcctgcgtgagtcggaatcgctagtaatcgcggatcagcatgccgcggtgaatacgttcccgggccttgacacaccgcccgtcacaccatgagagtcgggaacacccgaagtccgtagcctaaccgcaggagggcgcggccgaaggtgggttcgataattggggtgaagtcgtaacaaggtagccgttcggaaggtgcggctggatcacctcctt

SEQ ID NO: 1779 - DNA, 1522 bp, Artificial Sequence
  STR02436_[Clostridium]_leptum
tttagagagtttgatcctggctcaggacgaacgctggcggcgtgcctaacacatgcaagcgaacggagttaaattcgacacccgagtatccggccgggaggcggggtgctgggggttgatttaacttagtggcggacgggtgagtaacgcgtgagtaacctgcctttcagagggggaaacgttctgaaaagaacgctaataccgcataacatcaatttatcgcatgataggttgataaaggagcaatccgctggaagatggactcgcgtccgattagctagttggcggggtaacgcccaccaaagcgacgatcggtagccggactgagaggttgaacggccacattgggactgaacacggcccagactcctacgggaggcagcagtgggggatattgcacaatgggggaaacctgatgcagcaacgccgcgtgagggaagaaggttttcggattgtaaacctctgttcttaggacgataatgacggtagctaaggagaaagctccggctaactacgtgccagcagccgcggaatacgtagggagcgagcgttgtccggatttactgggtgtaaagggtgcgtaggcggcgggcaagtcaggcgtgaaatctatgggcttaacccataaactgcgcttgaaactgtcttgttgagtgaagtagaggtaggcggaattcccggtgtagcggtgaaatgcgtagagatcggaggaacaccagtggcgaaggcggcctactgggctttaactgacgctgaagcacgaaagctgggtagcaaacaggattagataccctggtagtccatgccgtaaacgatgattactagggtggggggtctgaccccctccgtgccgcagttaacacaataagtaatccacctggggagacggccgcaaggttgaaactcaaaggaattgacgggggcccgcacaagcagtggagtattggtttaattcgaagcaacgcgaagaaccttaccaggtcttgacatccgtctaacgaagagagatgcattaggtgcccttcggggaaaggcgagacaggtggtgcatggttgtcgtcactcgtgtcgtgagatgttgggttaagtcccgcaacgagcgcaacccttgtttctagttgtacgcaagagcactctagagagactgccgttgacaaaacggaggaaggtggggacgacgcaaatcatcatgccccttatgacctgggccacacacgtactacaatggctgtaaacagaggaagcaaagccgcgaggcggagcaaaaccctaaaagcagtcccagttcggatcgcaggtgcaacccgcctgcgtgaagtcggaattgctagtaatcgcggatcagcatgccgcggtgatacgttcccgggccttgtacacaccgcccgtcacaccatgggagccggtaatacccgagccagtagttcaaccgcaaggagagcgctgtcgaaggtaggattggcgactggggtgaatcgtaacaaggtagccgtatcggaaggtgcggctggatcacctcctt

What is claimed is:

1. A therapeutic composition comprising an effective amount of a purified or isolated population of bacteria selected from Intestinimonas butyriciproducens and Anaerotruncus colihominis or bacteria having a 16S rDNA sequence having at least 97%, 98%, 98.7% or 99% sequence identity to any one 16S rDNA sequence thereof.

2. The therapeutic composition of claim 1, wherein the 16S rDNA sequence of Intestinimonas butyriciproducens is selected from SEQ ID NOs: 1369, 1370, 1371, 1372, 1373, 1374, 1375, 1376, 1377, 1378, 1379, 1380, 1381, 1382, 1383, 1384, 1385, 1386, 1387, 1388, 1389, 1390, 1391, 1392, 1393, and 1394, and the 16S rDNA sequence of Anaerotruncus colihominis is selected from SEQ ID NOs: 1066, 1067, 1068, 1069, 1070, 1071, 1072, 1073, 1074, 1075, 1076, 1077, 1078, 1079, 1080, 1081, 1082, 1083, 1084, and 1085.

3. A therapeutic composition comprising an effective amount of a purified or isolated population of bacteria selected from Murimonas intestini and Faecalicatena orotica or bacteria having a 16S rDNA sequence having at least 97%, 98%, 98.7% or 99% sequence identity to any one 16S rDNA sequence thereof.

4. The therapeutic composition of claim 1, wherein the 16S rDNA sequence of Murimonas intestini is SEQ ID NO: 1621 and the 16S rDNA sequence of Faecalicatena orotica is selected from SEQ ID NOs: 800, 801, 802, 803, 804, 805, 806, 807, 808, 809, and 810.

5. A therapeutic composition comprising an effective amount of a purified or isolated population of bacteria comprising one or more bacteria selected from Anaerostipes hadrus, Christensenella timonensis, Desulfovibrio desulfuricans, Dialister invisus, Lachnoclostridium edouardi, Lachnospira pectinoschiza, Lachnospiraceae NG18_sp7, Lawsonibacter sp7, Merdimonas faecis, Negativibacillus sp1, Odoribacter splanchnicus, Roseburia faecis, Roseburia intestinalis, Ruminococcaceae NG11_sp5, Ruthenibacterium lactatiformans, or bacteria having 16S rDNA having at least 94.5%, 95%, 97%, 98%, 98.7% or 99% sequence identity to any one of the 16S rDNA thereof.

6. The therapeutic composition of claim 5, wherein the 16S rDNA sequence of Anaerostipes hadrus is selected from SEQ ID NOs: 1018, 1019, 1020, 1021, 1022, 1023, 1024, 1025, 1026, 1027, 1028, 1029, 1030, 1031, 1032, 1033, 1034, 1035, 1036, 1037, 1038, 1039, 1040, 1041, 1042, 1043, 1044, 1045, 1046, 1047, 1048, 1049, 1050, 1051, 1052, 1053, 1054, 1055, 1056, and 1057, the 16S rDNA sequence of Christensenella timonensis is selected from SEQ ID NOs: 1283, 1284, and 1285, the 16S rDNA sequence of Desulfovibrio desulfuricans is selected from SEQ ID NOs: 1293, 1294, 1295, and 1296, the 16S rDNA sequence of Dialister invisus is selected from SEQ ID NOs: 1297, 1298, and 1299, the 16S rDNA sequence of Lachnoclostridium edouardi is selected from SEQ ID NOs: 1405, 1406, 1407, 1408, 1409, and 1410, the 16S rDNA sequence of Lachnospira pectinoschiza is selected from SEQ ID NOs: 1411, 1412, 1413, 1414, 1415, and 1416, the 16S rDNA sequence of Lachnospiraceae NG18_sp7 is selected from SEQ ID NOs: 1419, 1420, 1421, 1422, 1423, 1424, 1425, and 1426, the 16S rDNA sequence of Lawsonibacter sp7 is selected from SEQ ID NOs: 1608, 1609, 1610, 1611, 1612, 1613, 1614, and 1615, the 16S rDNA sequence of Merdimonas faecis is SEQ ID NO: 1010, the 16S rDNA sequence of Odoribacter splanchnicus is selected from SEQ ID NOs: 1622, 1623, 1624, 1625, 1626, 1627, 1628, 1629, 1630, 1631, 1632, 1633, 1634, 1635, 1636, 1637, 1638, 1639, 1640, 1641, 1642, 1643, 1644, 1645, 1646, 1647, and 1648, the 16S rDNA sequence of Roseburia faecis is selected from SEQ ID NOs: 1696, 1697, 1698, 1699, 1700, 1701, 1702, 1703, and 1704, the 16S rDNA sequence of Roseburia intestinalis is selected from SEQ ID NOs: 1705, 1706, 1707, 1708, 1709, 1710, 1711, 1712, 1713, 1714, 1715, 1716, 1717, 1718, 1719, 1720, 1721, 1722, 1723, 1724, 1725, 1726, 1727, 1728, 1729, 1730, 1731, and 1732, or the 16S rDNA sequence of Ruthenibacterium lactatiformans is selected from SEQ ID NOs: 1733, 1734, 1735, 1736, 1737, 1738, 1739, 1740, 1741, 1742, 1743, 1744, 1745, 1746, 1747, 1748, and 1749.

7. The therapeutic composition of claim 5, wherein the bacteria comprises one or more bacteria selected from Anaerostipes hadrus, Dialister invisus, Merdimonas faecis, Roseburia faecis, Roseburia intestinalis, Ruminococcaceae NG11_sp5, or bacteria having 16S rDNA having at least 94.5%, 95%, 97%, 98%, 98.7% or 99% sequence identity to any one of the 16S rDNA thereof.

8. The therapeutic composition of claim 7, wherein the 16S rDNA sequence of Anaerostipes hadrus is selected from SEQ ID NOs: 1018, 1019, 1020, 1021, 1022, 1023, 1024, 1025, 1026, 1027, 1028, 1029, 1030, 1031, 1032, 1033, 1034, 1035, 1036, 1037, 1038, 1039, 1040, 1041, 1042, 1043, 1044, 1045, 1046, 1047, 1048, 1049, 1050, 1051, 1052, 1053, 1054, 1055, 1056, and 1057, the 16S rDNA sequence of Dialister invisus is selected from SEQ ID NOs: 1297, 1298, and 1299, the 16S rDNA sequence of Merdimonas faecis is SEQ ID NO: 1010, the 16S rDNA sequence of Roseburia faecis is selected from SEQ ID NOs: 1696, 1697, 1698, 1699, 1700, 1701, 1702, 1703, and 1704, or the 16S rDNA sequence of Roseburia intestinalis is selected from SEQ ID NOs: 1705, 1706, 1707, 1708, 1709, 1710, 1711, 1712, 1713, 1714, 1715, 1716, 1717, 1718, 1719, 1720, 1721, 1722, 1723, 1724, 1725, 1726, 1727, 1728, 1729, 1730, 1731, and 1732.

9. The therapeutic composition of claim 5, wherein the bacteria comprises one or more bacteria selected from Desulfovibrio desulfuricans, Roseburia intestinalis, or bacteria having 16S rDNA having at least 94.5%, 95%, 97%, 98%, 98.7% or 99% sequence identity to any one of the 16S rDNA thereof.

10. The therapeutic composition of claim 9, wherein the 16S rDNA sequence of Desulfovibrio desulfuricans is selected from SEQ ID NOs: 1293, 1294, 1295, and 1296 or the 16S rDNA sequence of Roseburia intestinalis is selected from SEQ ID NOs: 1705, 1706, 1707, 1708, 1709, 1710, 1711, 1712, 1713, 1714, 1715, 1716, 1717, 1718, 1719, 1720, 1721, 1722, 1723, 1724, 1725, 1726, 1727, 1728, 1729, 1730, 1731, and 1732.

11. The therapeutic composition of claim 5, wherein the bacteria comprises one or more bacteria selected from Lachnoclostridium edouardi, Lachnospira pectinoschiza, Lawsonibacter sp7, Odoribacter splanchnicus, Ruthenibacterium lactatiformans, or bacteria having 16S rDNA having at least 94.5%, 95%, 97%, 98%, 98.7% or 99% sequence identity to any one of the 16S rDNA thereof.

12. The therapeutic composition of claim 11, wherein the 16S rDNA sequence of Lachnoclostridium edouardi is selected from SEQ ID NOs: 1405, 1406, 1407, 1408, 1409, and 1410, the 16S rDNA sequence of Lachnospira pectinoschiza is selected from SEQ ID NOs: 1411, 1412, 1413, 1414, 1415, and 1416, the 16S rDNA sequence of Lawsonibacter sp7 is selected from SEQ ID NOs: 1608, 1609, 1610, 1611, 1612, 1613, 1614, and 1615, the 16S rDNA sequence of Odoribacter splanchnicus is selected from SEQ ID NOs: 1622, 1623, 1624, 1625, 1626, 1627, 1628, 1629, 1630, 1631, 1632, 1633, 1634, 1635, 1636, 1637, 1638, 1639, 1640, 1641, 1642, 1643, 1644, 1645, 1646, 1647, and 1648, or the 16S rDNA sequence of Ruthenibacterium lactatiformans is selected from SEQ ID NOs: 1733, 1734, 1735, 1736, 1737, 1738, 1739, 1740, 1741, 1742, 1743, 1744, 1745, 1746, 1747, 1748, and 1749.

13. A therapeutic composition comprising an effective amount of a purified or isolated population of bacteria comprising one or more bacteria selected from Anaerotignum lactatifermentans, Anaerotruncus colihominis, Angelakisella sp1, Bacteroides cellulosilyticus, Bacteroides gallinarum, Bacteroides plebeius, Blautia coccoides group, Christensenella minuta, Christensenellaceae NG16_sp1, Clostridium hylemonae, Collinsella bouchesdurhonensis, Coprobacter secundus group, Eisenbergiella massiliensis, Emergencia timonensis, Faecalicatena orotica, Fusicatenibacter sp1, Intestinimonas butyriciproducens, Intestinimonas timonensis, Lachnospiraceae NG17_sp3, Lawsonibacter sp3, Oxalobacter formigenes, Peptoniphilaceae NG4_sp2, Prochlorotrichaceae NG20_sp1, or bacteria having a 16S rDNA sequence having at least 97%, 98%, 98.7% or 99% sequence identity to any one 16S rDNA sequence thereof.

14. The therapeutic composition of claim 13, wherein the 16S rDNA sequence of Anaerotignum lactatifermentans is selected from SEQ ID NOs: 1058, 1059, 1060, 1061, 1062, 1063, 1064, and 1065, the 16S rDNA sequence of Anaerotruncus colihominis is selected from SEQ ID NOs: 1066, 1067, 1068, 1069, 1070, 1071, 1072, 1073, 1074, 1075, 1076, 1077, 1078, 1079, 1080, 1081, 1082, 1083, 1084, and 1085, the 16S rDNA sequence of Bacteroides cellulosilyticus is selected from SEQ ID NOs: 1086, 1087, 1088, 1089, 1090, 1091, 1092, 1093, 1094, 1095, 1096, 1097, 1098, 1099, 1100, 1101, 1102, 1103, 1104, 1105, and 1106, the 16S rDNA sequence of Bacteroides gallinarum is selected from SEQ ID NOs: 1128 and 1129, the 16S rDNA sequence of Bacteroides plebeius is selected from SEQ ID NOs: 1136, 1137, 1138, 1139, 1140, 1141, 1142, 1143, 1144, 1145, 1146, 1147, 1148, 1149, 1150, 1151, 1152, 1153, 1154, and 1155, the 16S rDNA sequence of Blautia coccoides group is selected from SEQ ID NOs: 1219, 1220, 1221, 1222, 1223, 1224, 1225, 1226, 1227, 1228, 1229, 1230, 1231, 1232, 1233, 1234, 1235, 1236, 1237, 1238, 1239, 1240, 1241, 1242, 1243, 1244, 1245, 1246, 1247, 1248, 1249, 1250, 1251, 1252, 1253, 1254, 1255, 1256, 1257, 1258, 1259, 1260, 1261, 1262, 1263, 1264, 1265, 1266, 1267, 1268, 1269, 1270, 1271, and 1272, the 16S rDNA sequence of Christensenella minuta is selected from SEQ ID NOs: 1275, 1276, 1277, 1278, 1279, 1280, 1281, and 1282, the 16S rDNA sequence of Christensenellaceae NG16_sp1 is selected from SEQ ID NOs: 1286, 1287, and 1288, the 16S rDNA sequence of Clostridium hylemonae is selected from SEQ ID NOs: 790, 791, 792, 793, 794, 795, and 796, the 16S rDNA sequence of Collinsella bouchesdurhonensis is selected from SEQ ID NOs: 1289, 1290, 1291, and 1292, the 16S rDNA sequence of Coprobacter secundus group is selected from SEQ ID NOs: 797, 798, and 799, the 16S rDNA sequence of Eisenbergiella massiliensis is selected from SEQ ID NOs: 1300, 1301, 1302, 1303, 1304, 1305, 1306, 1307, and 1308, the 16S rDNA sequence of Emergencia timonensis is selected from SEQ ID NOs: 1309, 1310, 1311, 1312, 1313, 1314, 1315, 1316, 1317, 1318, 1319, and 1320, the 16S rDNA sequence of Faecalicatena orotica is selected from SEQ ID NOs: 800, 801, 802, 803, 804, 805, 806, 807, 808, 809, and 810, the 16S rDNA sequence of Fusicatenibacter sp1 is selected from SEQ ID NOs: 1350, 1351, 1352, 1353, 1354, and 1355, the 16S rDNA sequence of Intestinimonas butyriciproducens is selected from SEQ ID NOs: 1369, 1370, 1371, 1372, 1373, 1374, 1375, 1376, 1377, 1378, 1379, 1380, 1381, 1382, 1383, 1384, 1385, 1386, 1387, 1388, 1389, 1390, 1391, 1392, 1393, and 1394, the 16S rDNA sequence of Intestinimonas timonensis is selected from SEQ ID NOs: 1403 and, 1404, the 16S rDNA sequence of Lachnospiraceae NG17_sp3 is selected from SEQ ID NOs: 1417 and 1418, the 16S rDNA sequence of Lawsonibacter sp3 is selected from SEQ ID NOs: 1604, 1605, 1606, and 1607, the 16S rDNA sequence of Oxalobacter formigenes is selected from SEQ ID NOs: 1649, 1650, 1651, 1652, and 1653, the 16S rDNA sequence of Peptoniphilaceae NG4_sp2 is SEQ ID NO: 172, or the 16S rDNA sequence of Prochlorotrichaceae NG20_sp1 is SEQ ID NO: 1661.

15. The therapeutic composition of any of claims 1-14, wherein the therapeutic composition comprises two, three, four, five, six, seven, eight, nine, ten, eleven, twelve, thirteen, fourteen, fifteen, sixteen, seventeen, eighteen or more bacterial species.

16. The therapeutic composition of any of claims 1-15, wherein the therapeutic composition does not comprise one or more bacteria selected from Actinomycetaceae_NG7 sp1, Allisonella histaminiformans, Bacteroides coprocola, Bacteroides faecis, Bacteroides massiliensis, Bifidobacterium animalis, Clostridium asparagiforme group, Desulfovibrionaceae NG5_sp1, Faecalibacterium prausnitzii, Gemmiger sp2, Granulicatella adiacens, Intestinimonas massiliensis, Lactobacillus delbrueckii, Lactobacillus paracasei, Lactobacillus reuteri, Lactococcus lactis, Marvinbryantia sp5, Prevotella buccalis, Propionibacterium freudenreichii, Ruminococcaceae NG18_sp7, Scardovia wiggsiae, Slackia isoflavoniconvertens, Thermodesulfobiaceae NG1_sp1, or bacteria having 16S rDNA having at least 94.5%, 95%, 97%, 98%, 98.7% or 99% sequence identity to any one of the 16S rDNA thereof.

17. The therapeutic composition of claim 16, wherein the 16S rDNA sequence of Actinomycetaceae_NG7 sp1 is selected from SEQ ID NOs: 1011, 1012, 1013, 1014, 1015, 1016, and 1017, the 16S rDNA sequence of Allisonella histaminiformans is SEQ ID NO: 774, the 16S rDNA sequence of Bacteroides coprocola is selected from SEQ ID NOs: 1107, 1108, 1109, 1110, 1111, and 1112, the 16S rDNA sequence of Bacteroides faecis is selected from SEQ ID NOs: 1113, 1114, 1115, 1116, 1117, 1118, 1119, 1120, 1121, 1122, 1123, 1124, 1125, 1126, and 1127, the 16S rDNA sequence of Bacteroides massiliensis is selected from SEQ ID NOs: 1130, 1131, 1132, 1133, 1134, and 1135, the 16S rDNA sequence of Bifidobacterium animalis is selected from SEQ ID NOs: 1156, 1157, 1158, 1159, 1160, 1161, 1162, 1163, 1164, 1165, 1166, 1167, 1168, 1169, 1170, 1171, 1172, 1173, 1174, 1175, 1176, 1177, 1178, 1179, 1180, 1181, 1182, 1183, 1184, 1185, 1186, 1187, 1188, 1189, 1190, 1191, 1192, 1193, 1194, 1195, 1196, 1197, 1198, 1199, 1200, 1201, 1202, 1203, 1204, 1205, 1206, 1207, 1208, 1209, 1210, 1211, 1212, 1213, 1214, 1215, 1216, 1217, and 1218, the 16S rDNA sequence of Clostridium asparagiforme group is selected from SEQ ID NOs: 775, 776, 777, 778, 779, 780, 781, 782, 783, 784, 785, 786, 787, 788, and 789, the 16S rDNA sequence of Faecalibacterium prausnitzii is selected from SEQ ID NOs: 1321, 1322, 1323, 1324, 1325, 1326, 1327, 1328, 1329, 1330, 1331, 1332, 1333, 1334, 1335, 1336, 1337, 1338, 1339, 1340, 1341, 1342, 1343, 1344, 1345, 1346, 1347, 1348, and 1349, the 16S rDNA sequence of Gemmiger sp2 is selected from SEQ ID NOs: 1356, 1357, 1358, 1359, 1360, 1361, and 1362, the 16S rDNA sequence of Granulicatella adiacens is selected from SEQ ID NOs: 1363, 1364, 1365, 1366, 1367, and 1368, the 16S rDNA sequence of Intestinimonas massiliensis is selected from SEQ ID NOs: 1395, 1396, 1397, 1398, 1399, 1400, 1401, and 1402, the 16S rDNA sequence of Lactobacillus delbrueckii is selected from SEQ ID NOs: 1427, 1428, 1429, 1430, 1431, 1432, 1433, 1434, 1435, 1436, 1437, 1438, 1439, 1440, 1441, 1442, 1443, 1444, 1445, 1446, 1447, 1448, 1449, 1450, 1451, 1452, 1453, 1454, 1455, 1456, 1457, 1458, 1459, 1460, 1461, 1462, 1463, 1464, 1465, 1466, 1467, 1468, 1469, 1470, 1471, 1472, 1473, 1474, 1475, 1476, 1477, 1478, 1479, 1480, 1481, 1482, 1483, 1484, 1485, 1486, 1487, 1488, 1489, 1490, 1491, 1492, 1493, 1494, 1495, 1496, 1497, 1498, 1499, 1500, 1501, 1502, 1503, 1504, and 1505, the 16S rDNA sequence of Lactobacillus reuteri is selected from SEQ ID NOs: 931, 932, 933, 934, 935, 936, 937, 938, 939, 940, 941, 942, 943, 944, 945, 946, 947, 948, 949, 950, 951, 952, 953, 954, 955, 956, 957, 958, 959, 960, 961, 962, 963, 964, 965, 966, 967, 968, 969, 970, 971, 972, 973, 974, 975, 976, 977, 978, 979, 980, 981, 982, 983, 984, 985, 986, 987, 988, 989, 990, 991, 992, 993, 994, 995, 996, 997, 998, 999, 1000, 1001, 1002, 1003, 1004, 1005, 1006, 1007, 1008, and 1009, the 16S rDNA sequence of Lactococcus lactis is selected from SEQ ID NOs: 1506, 1507, 1508, 1509, 1510, 1511, 1512, 1513, 1514, 1515, 1516, 1517, 1518, 1519, 1520, 1521, 1522, 1523, 1524, 1525, 1526, 1527, 1528, 1529, 1530, 1531, 1532, 1533, 1534, 1535, 1536, 1537, 1538, 1539, 1540, 1541, 1542, 1543, 1544, 1545, 1546, 1547, 1548, 1549, 1550, 1551, 1552, 1553, 1554, 1555, 1556, 1557, 1558, 1559, 1560, 1561, 1562, 1563, 1564, 1565, 1566, 1567, 1568, 1569, 1570, 1571, 1572, 1573, 1574, 1575, 1576, 1577, 1578, 1579, 1580, 1581, 1582, 1583, 1584, 1585, 1586, 1587, 1588, 1589, 1590, 1591, 1592, 1593, 1594, 1595, 1596, 1597, 1598, 1599, 1600, 1601, 1602, and 1603, the 16S rDNA sequence of Marvinbryantia sp5 is selected from SEQ ID NOs: 1616, 1617, 1618, 1619, and 1620, the 16S rDNA sequence of Prevotella buccalis is selected from SEQ ID NOs: 1654, 1655, 1656, 1657, 1658, 1659, and 1660, the 16S rDNA sequence of Propionibacterium freudenreichii is selected from SEQ ID NOs: 1662, 1663, 1664, 1665, 1666, 1667, 1668, 1669, 1670, 1671, 1672, 1673, 1674, 1675, 1676, 1677, 1678, 1679, 1680, 1681, 1682, 1683, 1684, 1685, 1686, 1687, 1688, 1689, 1690, 1691, 1692, 1693, 1694, and 1695, the 16S rDNA sequence of Scardovia wiggsiae is selected from SEQ ID NOs: 1750, 1751, 1752, 1753, and 1754, or the 16S rDNA sequence of Slackia isoflavoniconvertens is selected from SEQ ID NOs: 1755 and 1756.

18. The therapeutic composition of any of claims 1-15, wherein the therapeutic composition does not comprise Allisonella histaminiformans, Bacteroides faecis, Bacteroides massiliensis, Desulfovibrionaceae NG5_sp1, Gemmiger sp2, Intestinimonas massiliensis, Marvinbryantia sp5, Propionibacterium freudenreichii, Slackia isoflavoniconvertens, Thermodesulfobiaceae NG1_sp1, or bacteria having 16S rDNA having at least 94.5%, 95%, 97%, 98%, 98.7% or 99% sequence identity to any one of the 16S rDNA thereof.

19. The therapeutic composition of claim 18, wherein the 16S rDNA sequence of Allisonella histaminiformans is SEQ ID NO: 774, the 16S rDNA sequence of Bacteroides faecis is selected from SEQ ID NOs: 1113, 1114, 1115, 1116, 1117, 1118, 1119, 1120, 1121, 1122, 1123, 1124, 1125, 1126, and 1127, the 16S rDNA sequence of Bacteroides massiliensis is selected from SEQ ID NOs: 1130, 1131, 1132, 1133, 1134, and 1135, the 16S rDNA sequence of Gemmiger sp2 is selected from SEQ ID NOs: 1356, 1357, 1358, 1359, 1360, 1361, and 1362, the 16S rDNA sequence of Intestinimonas massiliensis is selected from SEQ ID NOs: 1395, 1396, 1397, 1398, 1399, 1400, 1401, and 1402, the 16S rDNA sequence of Marvinbryantia sp5 is selected from SEQ ID NOs: 1616, 1617, 1618, 1619, and 1620, the 16S rDNA sequence of Propionibacterium freudenreichii is selected from SEQ ID NOs: 1662, 1663, 1664, 1665, 1666, 1667, 1668, 1669, 1670, 1671, 1672, 1673, 1674, 1675, 1676, 1677, 1678, 1679, 1680, 1681, 1682, 1683, 1684, 1685, 1686, 1687, 1688, 1689, 1690, 1691, 1692, 1693, 1694, and 1695, or the 16S rDNA sequence of Slackia isoflavoniconvertens is selected from SEQ ID NOs: 1755 and 1756.

20. The therapeutic composition of any of claims 1-15, wherein the therapeutic composition does not comprise Bifidobacterium animalis, Faecalibacterium prausnitzii, or bacteria having 16S rDNA having at least 94.5%, 95%, 97%, 98%, 98.7% or 99% sequence identity to any one of the 16S rDNA thereof.

21. The therapeutic composition of claim 20, wherein the 16S rDNA sequence of Bifidobacterium animalis is selected from SEQ ID NOs: 1156, 1157, 1158, 1159, 1160, 1161, 1162, 1163, 1164, 1165, 1166, 1167, 1168, 1169, 1170, 1171, 1172, 1173, 1174, 1175, 1176, 1177, 1178, 1179, 1180, 1181, 1182, 1183, 1184, 1185, 1186, 1187, 1188, 1189, 1190, 1191, 1192, 1193, 1194, 1195, 1196, 1197, 1198, 1199, 1200, 1201, 1202, 1203, 1204, 1205, 1206, 1207, 1208, 1209, 1210, 1211, 1212, 1213, 1214, 1215, 1216, 1217, and 1218, or the 16S rDNA sequence of Faecalibacterium prausnitzii is selected from SEQ ID NOs: 1321, 1322, 1323, 1324, 1325, 1326, 1327, 1328, 1329, 1330, 1331, 1332, 1333, 1334, 1335, 1336, 1337, 1338, 1339, 1340, 1341, 1342, 1343, 1344, 1345, 1346, 1347, 1348, and 1349.

22. The therapeutic composition of any of claims 1-15, wherein the therapeutic composition does not comprise Granulicatella adiacens, Lactococcus lactis, Scardovia wiggsiae, or bacteria having 16S rDNA having at least 94.5%, 95%, 97%, 98%, 98.7% or 99% sequence identity to any one of the 16S rDNA thereof.

23. The therapeutic composition of claim 22, wherein the 16S rDNA sequence of Granulicatella adiacens is selected from SEQ ID NOs: 1363, 1364, 1365, 1366, 1367, and 1368, the 16S rDNA sequence of Lactococcus lactis is selected from SEQ ID NOs: 1506, 1507, 1508, 1509, 1510, 1511, 1512, 1513, 1514, 1515, 1516, 1517, 1518, 1519, 1520, 1521, 1522, 1523, 1524, 1525, 1526, 1527, 1528, 1529, 1530, 1531, 1532, 1533, 1534, 1535, 1536, 1537, 1538, 1539, 1540, 1541, 1542, 1543, 1544, 1545, 1546, 1547, 1548, 1549, 1550, 1551, 1552, 1553, 1554, 1555, 1556, 1557, 1558, 1559, 1560, 1561, 1562, 1563, 1564, 1565, 1566, 1567, 1568, 1569, 1570, 1571, 1572, 1573, 1574, 1575, 1576, 1577, 1578, 1579, 1580, 1581, 1582, 1583, 1584, 1585, 1586, 1587, 1588, 1589, 1590, 1591, 1592, 1593, 1594, 1595, 1596, 1597, 1598, 1599, 1600, 1601, 1602, and 1603, or the 16S rDNA sequence of Scardovia wiggsiae is selected from SEQ ID NOs: 1750, 1751, 1752, 1753, and 1754.

24. A therapeutic composition comprising an effective amount of a purified or isolated population of bacteria that have 16S rDNA sequence identity of at least 94.5% to 16S rDNA sequences of species belonging to one or more of the families Sutterellaceae, Coriobacteriaceae, Akkermansiaceae, Desulfovibrionaceae, Odoribacteraceae, or Rikenellaceae.

25. The therapeutic composition of claim 24, wherein the bacteria have 16S rDNA sequence identity of at least 95%, 97%, 98%, 98.7% or 99% to 16S rDNA sequences of species belonging to one or more of the families Sutterellaceae, Coriobacteriaceae, Akkermansiaceae, Desulfovibrionaceae, Odoribacteraceae, or Rikenellaceae.

26. The therapeutic composition of claim 24 or 25, wherein the therapeutic composition comprises bacteria belonging to two, three, four or more families.

27. A therapeutic composition comprising an effective amount of a purified or isolated population of bacteria comprising one or more bacteria selected from Akkermansia muciniphila, Dysosmobacter welbionis, Anaerobutyricum hallii, Blautia caecimuris, Holdemania filiformis, Acetatifactor sp1, Ruminococcaceae NG14 sp1, Hungatella sp2, Bifidobacterium catenulatum group, Blautia wexlerae, Hungatella sp1, Intestinibacter bartlettii, Lachnospiraceae NG31 sp1, Lactonifactor longoviformis, Leuconostoc gelidum, Sutterella wadsworthensis, [Extibacter] muris, Alistipes onderdonkii, Collinsella intestinalis, Collinsella stercoris, Muricomes sp1, Neobitarella massiliensis, Prevotellamassilia sp2, Ruminococcaceae NG33 sp1, [Adlercreutzia] equolifaciens group, [Anaerotruncus] rubiinfantis, [Romboutsia] timonensis, Alistipes finegoldii, Alistipes indistinctus, Alistipes obesi, Alistipes putredinis, Alistipes shahii, Anaerofustis stercorihominis, Anaeromassilibacillus sp3, Barnesiella intestinihominis, Bilophila wadsworthia, Blautia faecis, Coriobacteriaceae NG5 sp1, Frisingicoccus sp3, Gordonibacter pamelaeae, Harryflintia acetispora, Lachnospiraceae NG29 sp1, Marvinbryantia sp8, Massilimaliae massiliensis, Massilimaliae timonensis, Neglecta timonensis, Parabacteroides merdae, Peptoniphilaceae NG4 sp1, Peptoniphilaceae NG4 sp3, Pseudoflavonifractor capillosus, Ruminococcaceae NG12 sp1, Ruminococcaceae NG15 sp3, Ruminococcaceae NG17 sp3, Ruthenibacterium sp1, Anaerostipes hadrus, Christensenella timonensis, Desulfovibrio desulfuricans, Dialister invisus, Lachnoclostridium edouardi, Lachnospira pectinoschiza, Lachnospiraceae NG18_sp7, Lawsonibacter sp7, Merdimonas faecis, Negativibacillus sp1, Odoribacter splanchnicus, Roseburia faecis, Roseburia intestinalis, Ruminococcaceae NG11_sp5, Ruthenibacterium lactatiformans, or bacteria having 16S rDNA having at least 94.5%, 95%, 97%, 98%, 98.7% or 99% sequence identity to any one of the 16S rDNA thereof.

28. The therapeutic composition of claim 27, wherein the bacteria comprises one or more bacteria selected from Akkermansia muciniphila, Dysosmobacter welbionis, Anaerobutyricum hallii, Blautia caecimuris, Holdemania filiformis, or bacteria having 16S rDNA having at least 94.5%, 95%, 97%, 98%, 98.7% or 99% sequence identity to any one of the 16S rDNA thereof.

29. The therapeutic composition of claim 27, wherein the bacteria comprises one or more bacteria selected from Acetatifactor sp1, Blautia wexlerae, Ruminococcaceae NG14 sp1, Hungatella sp2, Holdemania filiformis, or bacteria having 16S rDNA having at least 94.5%, 95%, 97%, 98%, 98.7% or 99% sequence identity to any one of the 16S rDNA thereof.

30. The therapeutic composition of claim 27, wherein the bacteria comprises one or more bacteria selected from Bifidobacterium catenulatum group, Blautia wexlerae, Hungatella sp1, Intestinibacter bartlettii, Lachnospiraceae NG31 sp1, Lactonifactor longoviformis, Leuconostoc gelidum, Sutterella wadsworthensis, Anaerostipes hadrus, Dialister invisus, Merdimonas faecis, Roseburia faecis, Roseburia intestinalis, Ruminococcaceae NG11_sp5, or bacteria having 16S rDNA having at least 94.5%, 95%, 97%, 98%, 98.7% or 99% sequence identity to any one of the 16S rDNA thereof.

31. The therapeutic composition of claim 27, wherein the bacteria comprises one or more bacteria selected from [Extibacter] muris, Alistipes onderdonkii, Collinsella intestinalis, Collinsella stercoris, Muricomes sp1, Neobitarella massiliensis, Prevotellamassilia sp2, Ruminococcaceae NG33 sp1, Desulfovibrio desulfuricans, Roseburia intestinalis, or bacteria having 16S rDNA having at least 94.5%, 95%, 97%, 98%, 98.7% or 99% sequence identity to any one of the 16S rDNA thereof.

32. The therapeutic composition of claim 27, wherein the bacteria comprises one or more bacteria selected from [Adlercreutzia] equolifaciens group, [Anaerotruncus] rubiinfantis, [Romboutsia] timonensis, Alistipes finegoldii, Alistipes indistinctus, Alistipes obesi, Alistipes putredinis, Alistipes shahii, Anaerofustis stercorihominis, Anaeromassilibacillus sp3, Barnesiella intestinihominis, Bilophila wadsworthia, Blautia faecis, Coriobacteriaceae NG5 sp1, Frisingicoccus sp3, Gordonibacter pamelaeae, Harryflintia acetispora, Lachnospiraceae NG29 sp1, Marvinbryantia sp8, Massilimaliae massiliensis, Massilimaliae timonensis, Neglecta timonensis, Parabacteroides merdae, Peptoniphilaceae NG4 sp1, Peptoniphilaceae NG4 sp3, Pseudoflavonifractor capillosus, Ruminococcaceae NG12 sp1, Ruminococcaceae NG15 sp3, Ruminococcaceae NG17 sp3, Ruthenibacterium sp1, Lachnoclostridium edouardi, Lachnospira pectinoschiza, Lawsonibacter sp7, Odoribacter splanchnicus, Ruthenibacterium lactatiformans, or bacteria having 16S rDNA having at least 94.5%, 95%, 97%, 98%, 98.7% or 99% sequence identity to any one of the 16S rDNA thereof.

33. A therapeutic composition comprising a purified population of bacteria, wherein the purified or isolated population of bacteria comprises one or more bacteria having a 16S rDNA sequence that is at least 85%, at least 90%, at least 95%, at least 96%, at least 97%, at least 98%, at least 99%, or 100% identical to a 16S rDNA sequence set forth in SEQ ID NOs: 1, 2, 3, 4, 5, 6, 7, 8, 9, 10, 11, 12, 13, 14, 15, 16, 17, 18, 19, 20, 21, 22, 23, 24, 25, 26, 27, 28, 29, 30, 31, 32, 33, 34, 35, 36, 37, 38, 39, 40, 41, 42, 43, 44, 45, 46, 47, 48, 49, 50, 51, 52, 53, 54, 55, 56, 57, 58, 59, 60, 61, 62, 63, 64, 65, 66, 67, 68, 69, 70, 71, 72, 73, 74, 75, 76, 77, 78, 79, 80, 81, 82, 83, 84, 85, 86, 87, 88, 89, 90, 91, 92, 93, 94, 95, 96, 97, 98, 99, 100, 101, 102, 103, 104, 105, 106, 107, 108, 109, 110, 111, 112, 113, 114, 115, 116, 117, 118, 119, 120, 121, 122, 123, 124, 125, 126, 127, 128, 129, 130, 131, 132, 133, 134, 135, 136, 137, 138, 139, 140, 141, 142, 143, 144, 145, 146, 147, 148, 149, 150, 151, 152, 153, 154, 155, 156, 157, 158, 159, 160, 161, 162, 163, 164, 165, 166, 167, 168, 169, 170, 171, 172, 173, 174, 175, 176, 177, 178, 179, 180, 181, 182, 183, 184, 185, 186, 601, 602, 603, 604, 605, 606, 607, 613, 614, 615, 616, 617, 618, 619, 622, 623, 640, 641, 643, 662, 663, 664, 665, 666, 667, 675, 676, 681, 688, 690, 691, 693, 696, 697, 699, 700, 702, 703, 704, 705, 706, 707, 708, 709, 710, 711, 712, 713, 714, 715, 716, 717, 718, 719, 720, 721, 722, 723, 724, 725, 726, 727, 728, 729, 730, 732, 733, 734, 735, 736, 737, 738, 739, 740, 741, 742, 743, 744, 746, 747, 748, 749, 750, 751, 752, 753, 754, 755, 756, 757, 758, 759, 760, 761, 762, 763, 765, 766, 767, 768, 769, 770, 771, 772 773, 1018, 1019, 1020, 1021, 1022, 1023, 1024, 1025, 1026, 1027, 1028, 1029, 1030, 1031, 1032, 1033, 1034, 1035, 1036, 1037, 1038, 1039, 1040, 1041, 1042, 1043, 1044, 1045, 1046, 1047, 1048, 1049, 1050, 1051, 1052, 1053, 1054, 1055, 1056, 1057, 1283, 1284, 1285, 1293, 1294, 1295, 1296, 1297, 1298, 1299, 1405, 1406, 1407, 1408, 1409, 1410, 1411, 1412, 1413, 1414, 1415, 1416, 1419, 1420, 1421, 1422, 1423, 1424, 1425, 1426, 1608, 1609, 1610, 1611, 1612, 1613, 1614, 1615, 1010, 1622, 1623, 1624, 1625, 1626, 1627, 1628, 1629, 1630, 1631, 1632, 1633, 1634, 1635, 1636, 1637, 1638, 1639, 1640, 1641, 1642, 1643, 1644, 1645, 1646, 1647, 1648, 1696, 1697, 1698, 1699, 1700, 1701, 1702, 1703, 1704, 1705, 1706, 1707, 1708, 1709, 1710, 1711, 1712, 1713, 1714, 1715, 1716, 1717, 1718, 1719, 1720, 1721, 1722, 1723, 1724, 1725, 1726, 1727, 1728, 1729, 1730, 1731, 1732, 1733, 1734, 1735, 1736, 1737, 1738, 1739, 1740, 1741, 1742, 1743, 1744, 1745, 1746, 1747, 1748, 1749.

34. The therapeutic composition of claim 33, wherein the bacteria comprises one or more bacteria having a 16S rDNA sequence that is at least 85%, at least 90%, at least 95%, at least 96%, at least 97%, at least 98%, at least 99%, or 100% identical to a 16S rDNA sequence set forth in SEQ ID NOs: 605, 613, 640, 641, 643, 662, 663, 664, 665, 666, 667, 681, 688, 690, 703, 732, 733, 736, 737, 738, 739, 740, 741, 742, 743, 744, 749, 754, 755, 756, 758, 765, 766, 767 and 773.

35. The therapeutic composition of claim 33, wherein the bacteria comprises one or more bacteria having a 16S rDNA sequence that is at least 85%, at least 90%, at least 95%, at least 96%, at least 97%, at least 98%, at least 99%, or 100% identical to a 16S rDNA sequence set forth in SEQ ID NOs: 601, 602, 603, 604, 606, 607, 613, 614, 615, 616, 617, 618, 619, 622, 623, 675, 676, 681, 691, 693, 696, 697, 699, 700, 702, 704, 705, 706, 707, 708, 709, 710, 711, 712, 713, 714, 715, 716, 717, 718, 719, 720, 721, 722, 723, 724, 725, 726, 727, 728, 729, 730, 734, 735, 736, 746, 747, 748, 749, 750, 751, 752, 753, 757, 759, 760, 761, 762, 763, 768, 769, 770, 771 and 772.

36. The therapeutic composition of claim 33, wherein the bacteria comprises one or more bacteria having a 16S rDNA sequence that is at least 85%, at least 90%, at least 95%, at least 96%, at least 97%, at least 98%, at least 99%, or 100% identical to a 16S rDNA sequence set forth in SEQ ID NOs: 2, 3, 6, 10, 12, 13, 19, 20, 21, 22, 23, 24, 34, 37, 38, 39, 42, 43, 44, 45, 46, 47, 48, 50, 51, 52, 55, 57, 58, 59, 64, 65, 66, 67, 73, 74, 75, 80, 82, 83, 84, 85, 86, 87, 88, 89, 90, 91, 92, 93, 94, 95, 96, 97, 98, 99, 100, 101, 104, 105, 106, 107, 108, 109, 110, 111, 112, 114, 115, 116, 120, 123, 129, 135, 136, 138, 139, 140, 141, 142, 143, 145, 146, 148, 153, 156, 157, 158, 161, 168, 169, 170, 173, 176, 178, 180, 182, 1018, 1019, 1020, 1021, 1022, 1023, 1024, 1025, 1026, 1027, 1028, 1029, 1030, 1031, 1032, 1033, 1034, 1035, 1036, 1037, 1038, 1039, 1040, 1041, 1042, 1043, 1044, 1045, 1046, 1047, 1048, 1049, 1050, 1051, 1052, 1053, 1054, 1055, 1056, 1057, 1297, 1298, 1299, 1010, 1696, 1697, 1698, 1699, 1700, 1701, 1702, 1703, 1704, 1705, 1706, 1707, 1708, 1709, 1710, 1711, 1712, 1713, 1714, 1715, 1716, 1717, 1718, 1719, 1720, 1721, 1722, 1723, 1724, 1725, 1726, 1727, 1728, 1729, 1730, 1731, and 1732.

37. The therapeutic composition of claim 33, wherein the bacteria comprises one or more bacteria having a 16S rDNA sequence that is at least 85%, at least 90%, at least 95%, at least 96%, at least 97%, at least 98%, at least 99%, or 100% identical to a 16S rDNA sequence set forth in SEQ ID NOs: 16, 17, 18, 53, 54, 60, 77, 79, 81, 103, 119, 125, 132, 133, 134, 164, 175, 179, 184, 1293, 1294, 1295, 1296, 1705, 1706, 1707, 1708, 1709, 1710, 1711, 1712, 1713, 1714, 1715, 1716, 1717, 1718, 1719, 1720, 1721, 1722, 1723, 1724, 1725, 1726, 1727, 1728, 1729, 1730, 1731, and 1732.

38. The therapeutic composition of claim 33, wherein the bacteria comprises one or more bacteria having a 16S rDNA sequence that is at least 85%, at least 90%, at least 95%, at least 96%, at least 97%, at least 98%, at least 99%, or 100% identical to a 16S rDNA sequence set forth in SEQ ID NOs: 1, 4, 5, 7, 8, 9, 11, 14, 15, 25, 26, 27, 28, 29, 30, 31, 32, 33, 35, 36, 40, 41, 61, 62, 68, 69, 70, 71, 72, 76, 78, 117, 118, 121, 122, 124, 127, 128, 130, 131, 137, 144, 147, 149, 150, 151, 152, 154, 155, 159, 160, 162, 163, 165, 166, 167, 171, 174, 177, 181, 183, 186, 1405, 1406, 1407, 1408, 1409, 1410, 1411, 1412, 1413, 1414, 1415, 1416, 1608, 1609, 1610, 1611, 1612, 1613, 1614, 1615, 1622, 1623, 1624, 1625, 1626, 1627, 1628, 1629, 1630, 1631, 1632, 1633, 1634, 1635, 1636, 1637, 1638, 1639, 1640, 1641, 1642, 1643, 1644, 1645, 1646, 1647, 1648, 1733, 1734, 1735, 1736, 1737, 1738, 1739, 1740, 1741, 1742, 1743, 1744, 1745, 1746, 1747, 1748, and 1749.

39. The therapeutic composition of any of claims 27-38, wherein the therapeutic composition comprises two, three, four, five, six, seven, eight, nine, ten, eleven, twelve, thirteen, fourteen, fifteen, sixteen, seventeen, eighteen or more bacterial species.

40. The therapeutic composition of any of claims 24-39, wherein the therapeutic composition does not comprise one or more bacteria selected from Holdemania massiliensis, Rothia mucilaginosa, Hungatella sp2, Prevotella copri, Campylobacter concisus, [Atopobium]parvulum, Alistipes onderdonkii, Angelakisella massiliensis, Christensenellaceae NG5 sp2, Cuneatibacter caecimuris, Desulfovibrio fairfieldensis, Ruminococcaceae NG13 sp1, Ruminococcaceae NG16 sp1, [Coprococcus] catus, [Lactobacillus] fermentum, [Romboutsia] timonensis, [Ruminococcus] bromii, [Ruminococcus] gauvreauii, Actinomyces graevenitzii, Agathobaculum butyriciproducens group, Bacteroides caccae, Bacteroides intestinalis, Bittarella massiliensis, Blautia luti group, Clostridium saudiense, Corynebacterium durum, Fusicatenibacter sp2, Lachnospiraceae NG30 sp3, Massilimaliae sp1, Monoglobus pectinilyticus, Rothia dentocariosa, Rothia mucilaginosa, Ruminococcaceae NG17 sp1, Schaalia odontolytica, Streptococcus australis, Streptococcus gordonii, Streptococcus infantis group, Streptococcus parasanguinis, Streptococcus salivarius group, [Atopobium] parvulum, [Ruminococcus] gnavus, Bacteroides dorei group, Blautia sp1, Schaalia sp2, Actinomycetaceae_NG7 sp1, Allisonella histaminiformans, Bacteroides coprocola, Bacteroides faecis, Bacteroides massiliensis, Bifidobacterium animalis, Clostridium asparagiforme group, Desulfovibrionaceae NG5_sp1, Faecalibacterium prausnitzii, Gemmiger sp2, Granulicatella adiacens, Intestinimonas massiliensis, Lactobacillus delbrueckii, Lactobacillus paracasei, Lactobacillus reuteri, Lactococcus lactis, Marvinbryantia sp5, Prevotella buccalis, Propionibacterium freudenreichii, Ruminococcaceae NG18_sp7, Scardovia wiggsiae, Slackia isoflavoniconvertens, Thermodesulfobiaceae NG1_sp1, or bacteria having 16S rDNA having at least 94.5%, 95%, 97%, 98%, 98.7% or 99% sequence identity to any one of the 16S rDNA thereof.

41. The therapeutic composition of any of claims 24-39, wherein the therapeutic composition does not comprise Holdemania massiliensis, Rothia mucilaginosa, Hungatella sp2, Prevotella copri, Campylobacter concisus, or bacteria having 16S rDNA having at least 94.5%, 95%, 97%, 98%, 98.7% or 99% sequence identity to any one of the 16S rDNA thereof.

42. The therapeutic composition of any of claims 24-39, wherein the therapeutic composition does not comprise Rothia mucilaginosa, [Atopobium] parvulum, Holdemania massiliensis, Prevotella copri, Campylobacter concisus, or bacteria having 16S rDNA having at least 94.5%, 95%, 97%, 98%, 98.7% or 99% sequence identity to any one of the 16S rDNA thereof.

43. The therapeutic composition of any of claims 24-39, wherein the therapeutic composition does not comprise Alistipes onderdonkii, Angelakisella massiliensis, Christensenellaceae NG5 sp2, Cuneatibacter caecimuris, Desulfovibrio fairfieldensis, Ruminococcaceae NG13 sp1, Ruminococcaceae NG16 sp1, Bifidobacterium animalis, Faecalibacterium prausnitzii, or bacteria having 16S rDNA having at least 94.5%, 95%, 97%, 98%, 98.7% or 99% sequence identity to any one of the 16S rDNA thereof.

44. The therapeutic composition of any of claims 24-39, wherein the therapeutic composition does not comprise [Coprococcus] catus, [Lactobacillus] fermentum, [Romboutsia] timonensis, [Ruminococcus] bromii, [Ruminococcus] gauvreauii, Actinomyces graevenitzii, Agathobaculum butyriciproducens group, Bacteroides caccae, Bacteroides intestinalis, Bittarella massiliensis, Blautia luti group, Clostridium saudiense, Corynebacterium durum, Fusicatenibacter sp2, Lachnospiraceae NG30 sp3, Massilimaliae sp1, Monoglobus pectinilyticus, Rothia dentocariosa, Rothia mucilaginosa, Ruminococcaceae NG17 sp1, Schaalia odontolytica, Streptococcus australis, Streptococcus gordonii, Streptococcus infantis group, Streptococcus parasanguinis, Streptococcus salivarius group, Allisonella histaminiformans, Bacteroides faecis, Bacteroides massiliensis, Desulfovibrionaceae NG5_sp1, Gemmiger sp2, Intestinimonas massiliensis, Marvinbryantia sp5, Propionibacterium freudenreichii, Slackia isoflavoniconvertens, Thermodesulfobiaceae NG1_sp1, or bacteria having 16S rDNA having at least 94.5%, 95%, 97%, 98%, 98.7% or 99% sequence identity to any one of the 16S rDNA thereof.

45. The therapeutic composition of any of claims 24-39, wherein the therapeutic composition does not comprise [Atopobium] parvulum, [Ruminococcus] gnavus, Bacteroides dorei group, Blautia sp1, Schaalia sp2, Granulicatella adiacens, Lactococcus lactis, Scardovia wiggsiae, or bacteria having 16S rDNA having at least 94.5%, 95%, 97%, 98%, 98.7% or 99% sequence identity to any one of the 16S rDNA thereof.

46. The therapeutic composition of any of claims 24-39, wherein the therapeutic composition does not comprise one or more bacteria having a 16S rDNA sequence that is at least 85%, at least 90%, at least 95%, at least 96%, at least 97%, at least 98%, at least 99%, or 100% identical to a 16S rDNA sequence set forth in SEQ ID NOs: 187, 188, 189, 190, 191, 192, 193, 194, 195, 196, 197, 198, 199, 200, 201, 202, 203, 204, 205, 206, 207, 208, 209, 210, 211, 212, 213, 214, 215, 216, 217, 218, 219, 220, 221, 222, 223, 224, 225, 226, 227, 228, 229, 230, 231, 232, 233, 234, 235, 236, 237, 238, 239, 240, 241, 242, 243, 244, 245, 246, 247, 248, 249, 250, 251, 252, 253, 254, 255, 256, 257, 258, 259, 260, 261, 262, 263, 264, 265, 266, 267, 268, 269, 270, 271, 272, 273, 274, 275, 276, 277, 278, 279, 280, 281, 282, 283, 284, 285, 286, 287, 288, 289, 290, 291, 292, 293, 294, 295, 296, 297, 298, 299, 300, 301, 302, 303, 304, 305, 306, 307, 308, 309, 310, 311, 312, 313, 314, 315, 316, 317, 318, 319, 320, 321, 322, 323, 324, 325, 326, 327, 328, 329, 330, 331, 332, 333, 334, 335, 336, 337, 338, 339, 340, 341, 342, 343, 344, 345, 346, 347, 348, 349, 350, 351, 352, 353, 354, 355, 356, 357, 358, 359, 360, 361, 362, 363, 364, 365, 366, 367, 368, 369, 370, 371, 372, 373, 374, 375, 376, 377, 378, 379, 380, 381, 382, 383, 384, 385, 386, 387, 388, 389, 390, 391, 392, 393, 394, 395, 396, 397, 398, 399, 400, 401, 402, 403, 404, 405, 406, 407, 408, 409, 410, 411, 412, 413, 414, 415, 416, 417, 418, 419, 420, 421, 422, 423, 424, 425, 426, 427, 428, 429, 430, 431, 432, 433, 434, 435, 436, 437, 438, 439, 440, 441, 442, 443, 444, 445, 446, 447, 448, 449, 450, 451, 452, 453, 454, 455, 456, 457, 458, 459, 460, 461, 462, 463, 464, 465, 466, 467, 468, 469, 470, 471, 472, 473, 474, 475, 476, 477, 478, 479, 480, 481, 482, 483, 484, 485, 486, 487, 488, 489, 490, 491, 492, 493, 494, 495, 496, 497, 498, 499, 500, 501, 502, 503, 504, 505, 506, 507, 508, 509, 510, 511, 512, 513, 514, 515, 516, 517, 518, 519, 520, 521, 522, 523, 524, 525, 526, 527, 528, 529, 530, 531, 532, 533, 534, 535, 536, 537, 538, 539, 540, 541, 542, 543, 544, 545, 546, 547, 548, 549, 550, 551, 552, 553, 554, 555, 556, 557, 558, 559, 560, 561, 562, 563, 564, 565, 566, 567, 568, 569, 570, 571, 572, 573, 574, 575, 576, 577, 578, 579, 580, 581, 582, 583, 584, 585, 586, 587, 588, 589, 590, 591, 592, 593, 594, 595, 596, 597, 598, 599, 600, 608, 609, 610, 611, 612, 620, 621, 622, 623, 624, 625, 626, 627, 628, 629, 630, 631, 632, 633, 634, 635, 636, 637, 638, 639, 642, 644, 645, 646, 647, 648, 649, 650, 651, 652, 653, 654, 655, 656, 657, 658, 659, 660, 661, 668, 669, 670, 671, 672, 673, 674, 677, 678, 679, 680, 682, 683, 684, 685, 686, 687, 689, 692, 694, 695, 698, 701, 731, 734, 764, 1011, 1012, 1013, 1014, 1015, 1016, 1017, 774, 1107, 1108, 1109, 1110, 1111, 1112, 1113, 1114, 1115, 1116, 1117, 1118, 1119, 1120, 1121, 1122, 1123, 1124, 1125, 1126, 1127, 1130, 1131, 1132, 1133, 1134, 1135, 1156, 1157, 1158, 1159, 1160, 1161, 1162, 1163, 1164, 1165, 1166, 1167, 1168, 1169, 1170, 1171, 1172, 1173, 1174, 1175, 1176, 1177, 1178, 1179, 1180, 1181, 1182, 1183, 1184, 1185, 1186, 1187, 1188, 1189, 1190, 1191, 1192, 1193, 1194, 1195, 1196, 1197, 1198, 1199, 1200, 1201, 1202, 1203, 1204, 1205, 1206, 1207, 1208, 1209, 1210, 1211, 1212, 1213, 1214, 1215, 1216, 1217, 1218, 775, 776, 777, 778, 779, 780, 781, 782, 783, 784, 785, 786, 787, 788, 789, 1321, 1322, 1323, 1324, 1325, 1326, 1327, 1328, 1329, 1330, 1331, 1332, 1333, 1334, 1335, 1336, 1337, 1338, 1339, 1340, 1341, 1342, 1343, 1344, 1345, 1346, 1347, 1348, 1349, 1356, 1357, 1358, 1359, 1360, 1361, 1362, 1363, 1364, 1365, 1366, 1367, 1368, 1395, 1396, 1397, 1398, 1399, 1400, 1401, 1402, 1427, 1428, 1429, 1430, 1431, 1432, 1433, 1434, 1435, 1436, 1437, 1438, 1439, 1440, 1441, 1442, 1443, 1444, 1445, 1446, 1447, 1448, 1449, 1450, 1451, 1452, 1453, 1454, 1455, 1456, 1457, 1458, 1459, 1460, 1461, 1462, 1463, 1464, 1465, 1466, 1467, 1468, 1469, 1470, 1471, 1472, 1473, 1474, 1475, 1476, 1477, 1478, 1479, 1480, 1481, 1482, 1483, 1484, 1485, 1486, 1487, 1488, 1489, 1490, 1491, 1492, 1493, 1494, 1495, 1496, 1497, 1498, 1499, 1500, 1501, 1502, 1503, 1504, 1505, 931, 932, 933, 934, 935, 936, 937, 938, 939, 940, 941, 942, 943, 944, 945, 946, 947, 948, 949, 950, 951, 952, 953, 954, 955, 956, 957, 958, 959, 960, 961, 962, 963, 964, 965, 966, 967, 968, 969, 970, 971, 972, 973, 974, 975, 976, 977, 978, 979, 980, 981, 982, 983, 984, 985, 986, 987, 988, 989, 990, 991, 992, 993, 994, 995, 996, 997, 998, 999, 1000, 1001, 1002, 1003, 1004, 1005, 1006, 1007, 1008, 1009, 1506, 1507, 1508, 1509, 1510, 1511, 1512, 1513, 1514, 1515, 1516, 1517, 1518, 1519, 1520, 1521, 1522, 1523, 1524, 1525, 1526, 1527, 1528, 1529, 1530, 1531, 1532, 1533, 1534, 1535, 1536, 1537, 1538, 1539, 1540, 1541, 1542, 1543, 1544, 1545, 1546, 1547, 1548, 1549, 1550, 1551, 1552, 1553, 1554, 1555, 1556, 1557, 1558, 1559, 1560, 1561, 1562, 1563, 1564, 1565, 1566, 1567, 1568, 1569, 1570, 1571, 1572, 1573, 1574, 1575, 1576, 1577, 1578, 1579, 1580, 1581, 1582, 1583, 1584, 1585, 1586, 1587, 1588, 1589, 1590, 1591, 1592, 1593, 1594, 1595, 1596, 1597, 1598, 1599, 1600, 1601, 1602, 1603, 1616, 1617, 1618, 1619, 1620, 1654, 1655, 1656, 1657, 1658, 1659, 1660, 1662, 1663, 1664, 1665, 1666, 1667, 1668, 1669, 1670, 1671, 1672, 1673, 1674, 1675, 1676, 1677, 1678, 1679, 1680, 1681, 1682, 1683, 1684, 1685, 1686, 1687, 1688, 1689, 1690, 1691, 1692, 1693, 1694, 1695, 1750, 1751, 1752, 1753, 1754, 1755, and 1756.

47. The therapeutic composition of any of claims 24-39, wherein the therapeutic composition does not comprise one or more bacteria having a 16S rDNA sequence that is at least 85%, at least 90%, at least 95%, at least 96%, at least 97%, at least 98%, at least 99%, or 100% identical to a 16S rDNA sequence set forth in SEQ ID NOs: 608, 610, 611, 612, 620, 621, 622, 623, 624, 625, 626, 630, 631, 632, 633, 634, 635, 636, 637, 638, 639, 642, 644, 645, 646, 647, 648, 649, 650, 651, 652, 653, 654, 655, 656, 657, 658, 659, 660, 661, 668, 669, 670, 671, 672, 673, 674, 677, 678, 679, 680, 682, 683, 684, 685, 686, 687, 689, 692, 694, 695, 698, 701, 731, 734 and 764.

48. The therapeutic composition of any of claims 24-39, wherein the therapeutic composition does not comprise one or more bacteria having a 16S rDNA sequence that is at least 85%, at least 90%, at least 95%, at least 96%, at least 97%, at least 98%, at least 99%, or 100% identical to a 16S rDNA sequence set forth in SEQ ID NOs: 608, 609, 610, 611, 612, 620, 621, 624, 625, 626, 627, 628, 629, 630, 631, 632, 633, 634, 635, 636, 637, 638, 639, 642, 644, 645, 646, 647, 648, 649, 650, 651, 652, 653, 654, 655, 656, 657, 658, 659, 660, 661, 668, 669, 670, 671, 672, 673, 674, 677, 678, 679, 680, 682, 683, 684, 685, 686, 687, 689, 692, 694, 695, 698, 701, 731 and 764.

49. The therapeutic composition of any of claims 24-39, wherein the therapeutic composition does not comprise one or more bacteria having a 16S rDNA sequence that is at least 85%, at least 90%, at least 95%, at least 96%, at least 97%, at least 98%, at least 99%, or 100% identical to a 16S rDNA sequence set forth in SEQ ID NOs: 188, 213, 245, 323, 331, 332, 376, 455, 509, 516, 538, 582, 1156, 1157, 1158, 1159, 1160, 1161, 1162, 1163, 1164, 1165, 1166, 1167, 1168, 1169, 1170, 1171, 1172, 1173, 1174, 1175, 1176, 1177, 1178, 1179, 1180, 1181, 1182, 1183, 1184, 1185, 1186, 1187, 1188, 1189, 1190, 1191, 1192, 1193, 1194, 1195, 1196, 1197, 1198, 1199, 1200, 1201, 1202, 1203, 1204, 1205, 1206, 1207, 1208, 1209, 1210, 1211, 1212, 1213, 1214, 1215, 1216, 1217, 1218, o1321, 1322, 1323, 1324, 1325, 1326, 1327, 1328, 1329, 1330, 1331, 1332, 1333, 1334, 1335, 1336, 1337, 1338, 1339, 1340, 1341, 1342, 1343, 1344, 1345, 1346, 1347, 1348, and 1349.

50. The therapeutic composition of any of claims 24-39, wherein the therapeutic composition does not comprise one or more bacteria having a 16S rDNA sequence that is at least 85%, at least 90%, at least 95%, at least 96%, at least 97%, at least 98%, at least 99%, or 100% identical to a 16S rDNA sequence set forth in SEQ ID NOs: 187, 189, 190, 191, 192, 193, 194, 195, 196, 197, 198, 199, 200, 201, 202, 203, 204, 205, 211, 214, 216, 217, 218, 219, 220, 221, 222, 224, 225, 226, 227, 228, 229, 230, 231, 232, 233, 234, 235, 236, 237, 238, 239, 240, 241, 242, 243, 244, 246, 247, 248, 253, 254, 255, 257, 258, 259, 263, 264, 265, 267, 268, 269, 270, 271, 272, 273, 277, 283, 286, 289, 290, 291, 292, 293, 294, 295, 296, 297, 298, 299, 300, 301, 302, 303, 304, 305, 306, 307, 308, 309, 310, 311, 312, 313, 314, 315, 316, 317, 318, 319, 320, 321, 322, 324, 325, 326, 327, 328, 329, 330, 333, 334, 335, 336, 337, 338, 339, 340, 341, 342, 343, 344, 345, 346, 347, 348, 349, 350, 351, 352, 353, 354, 355, 356, 357, 358, 359, 360, 361, 362, 363, 364, 365, 366, 367, 368, 369, 370, 371, 372, 373, 374, 375, 377, 378, 379, 380, 381, 382, 383, 384, 385, 386, 387, 389, 390, 391, 392, 393, 394, 395, 396, 397, 398, 399, 400, 401, 402, 403, 409, 410, 411, 412, 413, 414, 415, 418, 421, 424, 425, 428, 429, 430, 431, 432, 433, 434, 435, 436, 437, 438, 439, 440, 441, 442, 443, 444, 445, 447, 449, 450, 452, 453, 454, 456, 457, 458, 460, 462, 463, 464, 465, 466, 467, 468, 469, 471, 472, 473, 474, 475, 476, 478, 479, 480, 481, 483, 484, 486, 487, 488, 489, 490, 491, 492, 493, 494, 495, 496, 497, 498, 499, 500, 501, 502, 503, 504, 505, 506, 507, 508, 510, 511, 512, 513, 514, 515, 520, 521, 522, 523, 524, 525, 526, 527, 528, 529, 530, 531, 537, 539, 540, 542, 543, 544, 545, 546, 547, 548, 550, 551, 552, 553, 554, 555, 560, 561, 564, 565, 566, 573, 574, 577, 579, 581, 583, 584, 585, 586, 587, 588, 589, 591, 594, 595, 596, 597, 598, 599, 600, 774, 1113, 1114, 1115, 1116, 1117, 1118, 1119, 1120, 1121, 1122, 1123, 1124, 1125, 1126, 1127, 1130, 1131, 1132, 1133, 1134, 1135, 1356, 1357, 1358, 1359, 1360, 1361, 1362, 1395, 1396, 1397, 1398, 1399, 1400, 1401, 1402, 1616, 1617, 1618, 1619, 1620, 1662, 1663, 1664, 1665, 1666, 1667, 1668, 1669, 1670, 1671, 1672, 1673, 1674, 1675, 1676, 1677, 1678, 1679, 1680, 1681, 1682, 1683, 1684, 1685, 1686, 1687, 1688, 1689, 1690, 1691, 1692, 1693, 1694, 1695, 1755, and 1756.

51. The therapeutic composition of any of claims 24-39, wherein the therapeutic composition does not comprise one or more bacteria having a 16S rDNA sequence that is at least 85%, at least 90%, at least 95%, at least 96%, at least 97%, at least 98%, at least 99%, or 100% identical to a 16S rDNA sequence set forth in SEQ ID NOs: 206, 207, 208, 209, 210, 212, 215, 223, 249, 250, 251, 252, 256, 260, 261, 262, 266, 274, 275, 276, 278, 279, 280, 281, 282, 284, 285, 287, 388, 404, 405, 406, 407, 408, 416, 417, 419, 420, 422, 423, 426, 427, 446, 448, 451, 459, 461, 482, 485, 517, 518, 519, 532, 533, 534, 535, 536, 549, 556, 557, 558, 559, 562, 563, 567, 568, 569, 570, 571, 572, 575, 576, 580, 590, 593, 1363, 1364, 1365, 1366, 1367, 1368, 1506, 1507, 1508, 1509, 1510, 1511, 1512, 1513, 1514, 1515, 1516, 1517, 1518, 1519, 1520, 1521, 1522, 1523, 1524, 1525, 1526, 1527, 1528, 1529, 1530, 1531, 1532, 1533, 1534, 1535, 1536, 1537, 1538, 1539, 1540, 1541, 1542, 1543, 1544, 1545, 1546, 1547, 1548, 1549, 1550, 1551, 1552, 1553, 1554, 1555, 1556, 1557, 1558, 1559, 1560, 1561, 1562, 1563, 1564, 1565, 1566, 1567, 1568, 1569, 1570, 1571, 1572, 1573, 1574, 1575, 1576, 1577, 1578, 1579, 1580, 1581, 1582, 1583, 1584, 1585, 1586, 1587, 1588, 1589, 1590, 1591, 1592, 1593, 1594, 1595, 1596, 1597, 1598, 1599, 1600, 1601, 1602, 1603, 1750, 1751, 1752, 1753, and 1754.

52. The therapeutic composition of any of claims 1-51, further comprising at least one anticancer agent.

53. The therapeutic composition of claim 52, wherein the anticancer agent is a checkpoint inhibitor.

54. The therapeutic composition of claim 53, wherein the checkpoint inhibitor is selected from an anti-PD-1 antibody, an anti-CTLA-4 antibody, an anti-PD-L1 antibody or combinations thereof.

55. The therapeutic composition of claim 54, wherein the checkpoint inhibitor is selected from pembrolizumab, nivolumab, atezolizumab, avelumab, durvalumab, ipilimumab, pidilizumab, AMP-224, AMP-514, STI-A1110, TSR-042, RG-7446, BMS-936559, BMS-936558, MK-3475, CT O11, MPDL3280A, MEDI-4736, MSB-0020718C, AUR-012, LAG-3, OX40 inhibitors, OX40L inhibitors, TIGIT inhibitors or STI-A1010, or combinations thereof.

56. The therapeutic composition of claim 52, wherein the anticancer agent is a chemotherapy agent.

57. The therapeutic composition of any of claims 52-56, wherein the anticancer agent is a combination of a checkpoint inhibitor and a chemotherapy agent.

58. The therapeutic composition of any of claims 1-57, wherein each of the purified or isolated populations of bacteria is present in the composition at a concentration of at least about 1×10² viable colony forming units (CFU).

59. The therapeutic composition of any of claims 1-58, wherein each purified or isolated population of bacteria is present in the composition at a concentration of about 1×10² to 1×10⁹ viable CFU.

60. The therapeutic composition of any of claims 1-59, wherein a fraction of the purified or isolated population of bacteria comprises a spore-forming bacteria.

61. The therapeutic composition of any of claims 1-60, wherein a fraction of the purified or isolated population of bacteria is in spore form.

62. The therapeutic composition of any of claims 1-60, wherein a fraction of the purified or isolated population of bacteria is in vegetative form.

63. The therapeutic composition of any of claims 1-60, wherein the composition further comprises a pharmaceutically acceptable excipient.

64. The therapeutic composition of any of claims 1-63, wherein the composition is formulated for delivery to the intestine.

65. The therapeutic composition of any of claims 1-64, wherein the composition is enterically coated.

66. The therapeutic composition of any of claims 1-65, wherein the composition is formulated for oral administration.

67. The therapeutic composition of any of claims 1-66, wherein the composition is formulated into a food or beverage.

68. The therapeutic composition of any of claims 1-67, wherein the composition can reduce the rate of tumor growth in an animal model or in a mammalian subject.

69. The therapeutic composition of any of claims 1-68, wherein the composition can reduce the rate of tumor growth in an animal model or in a mammalian subject when administered concomitantly with, prior to, or subsequent to the administration of at least one anticancer agent.

70. The therapeutic composition of any of claims 1-69, wherein the composition can increase the number of active CD8 T cells in a tumor of an animal model or of a mammalian subject when administered concomitantly with, prior to, or subsequent to the administration of at least one anticancer agent.

71. The therapeutic composition of any one of claims 1-70, wherein the composition is formulated for multiple administrations.

72. The therapeutic composition of any one of claims 1-58, wherein each of the populations of bacteria is present in the composition at a concentration of at least 1×10³ viable CFU.

73. A method of treating or preventing or reducing risk of a cancer in a mammalian subject in need thereof comprising administering to the subject a therapeutic composition according to any one of claims 1-72.

74. The method of claim 73, wherein the bacteria comprises one or more bacteria selected from Bifidobacterium catenulatum group, Blautia wexlerae, Hungatella sp1, Intestinibacter bartlettii, Lachnospiraceae NG31 sp1, Lactonifactor longoviformis, Leuconostoc gelidum, Sutterella wadsworthensis, Anaerostipes hadrus, Dialister invisus, Merdimonas faecis, Roseburia faecis, Roseburia intestinalis, Ruminococcaceae NG11_sp5, or bacteria having 16S rDNA having at least 94.5%, 95%, 97%, 98%, 98.7% or 99% sequence identity to any one of the 16S rDNA thereof.

75. The method of claim 74, wherein the cancer is a bladder cancer.

76. The method of claim 73, wherein the bacteria comprises one or more bacteria selected from [Extibacter] muris, Alistipes onderdonkii, Collinsella intestinalis, Collinsella stercoris, Muricomes sp1, Neobitarella massiliensis, Prevotellamassilia sp2, Ruminococcaceae NG33 sp1, Desulfovibrio desulfuricans, Roseburia intestinalis, or bacteria having 16S rDNA having at least 94.5%, 95%, 97%, 98%, 98.7% or 99% sequence identity to any one of the 16S rDNA thereof.

77. The method of claim 76, wherein the cancer is a non-small cell lung cancer.

78. The method of claim 73, wherein the bacteria comprises one or more bacteria selected from [Adlercreutzia] equolifaciens group, [Anaerotruncus] rubiinfantis, [Romboutsia] timonensis, Alistipes finegoldii, Alistipes indistinctus, Alistipes obesi, Alistipes putredinis, Alistipes shahii, Anaerofustis stercorihominis, Anaeromassilibacillus sp3, Barnesiella intestinihominis, Bilophila wadsworthia, Blautia faecis, Coriobacteriaceae NG5 sp1, Frisingicoccus sp3, Gordonibacter pamelaeae, Harryflintia acetispora, Lachnospiraceae NG29 sp1, Marvinbryantia sp8, Massilimaliae massiliensis, Massilimaliae timonensis, Neglecta timonensis, Parabacteroides merdae, Peptoniphilaceae NG4 sp1, Peptoniphilaceae NG4 sp3, Pseudoflavonifractor capillosus, Ruminococcaceae NG12 sp1, Ruminococcaceae NG15 sp3, Ruminococcaceae NG17 sp3, Ruthenibacterium sp1, Lachnoclostridium edouardi, Lachnospira pectinoschiza, Lawsonibacter sp7, Odoribacter splanchnicus, Ruthenibacterium lactatiformans, or bacteria having 16S rDNA having at least 94.5%, 95%, 97%, 98%, 98.7% or 99% sequence identity to any one of the 16S rDNA thereof.

79. The method of claim 78, wherein the cancer is a metastatic melanoma.

80. The method of claim 73, wherein the bacteria comprises one or more bacteria having a 16S rDNA sequence that is at least 85%, at least 90%, at least 95%, at least 96%, at least 97%, at least 98%, at least 99%, or 100% identical to a 16S rDNA sequence set forth in SEQ ID NOs: 2, 3, 6, 10, 12, 13, 19, 20, 21, 22, 23, 24, 34, 37, 38, 39, 42, 43, 44, 45, 46, 47, 48, 50, 51, 52, 55, 57, 58, 59, 64, 65, 66, 67, 73, 74, 75, 80, 82, 83, 84, 85, 86, 87, 88, 89, 90, 91, 92, 93, 94, 95, 96, 97, 98, 99, 100, 101, 104, 105, 106, 107, 108, 109, 110, 111, 112, 114, 115, 116, 120, 123, 129, 135, 136, 138, 139, 140, 141, 142, 143, 145, 146, 148, 153, 156, 157, 158, 161, 168, 169, 170, 173, 176, 178, 180, 182, 1018, 1019, 1020, 1021, 1022, 1023, 1024, 1025, 1026, 1027, 1028, 1029, 1030, 1031, 1032, 1033, 1034, 1035, 1036, 1037, 1038, 1039, 1040, 1041, 1042, 1043, 1044, 1045, 1046, 1047, 1048, 1049, 1050, 1051, 1052, 1053, 1054, 1055, 1056, 1057, 1297, 1298, 1299, 1010, 1696, 1697, 1698, 1699, 1700, 1701, 1702, 1703, 1704, 1705, 1706, 1707, 1708, 1709, 1710, 1711, 1712, 1713, 1714, 1715, 1716, 1717, 1718, 1719, 1720, 1721, 1722, 1723, 1724, 1725, 1726, 1727, 1728, 1729, 1730, 1731, and 1732.

81. The method of claim 80, wherein the cancer is a bladder cancer.

82. The method of claim 73, wherein the bacteria comprises one or more bacteria having a 16S rDNA sequence that is at least 85%, at least 90%, at least 95%, at least 96%, at least 97%, at least 98%, at least 99%, or 100% identical to a 16S rDNA sequence set forth in SEQ ID NOs: 16, 17, 18, 53, 54, 60, 77, 79, 81, 103, 119, 125, 132, 133, 134, 164, 175, 179, 184, 1293, 1294, 1295, 1296, 1705, 1706, 1707, 1708, 1709, 1710, 1711, 1712, 1713, 1714, 1715, 1716, 1717, 1718, 1719, 1720, 1721, 1722, 1723, 1724, 1725, 1726, 1727, 1728, 1729, 1730, 1731, and 1732.

83. The method of claim 82, wherein the cancer is a non-small cell lung cancer.

84. The method of claim 73, wherein the bacteria comprises one or more bacteria having a 16S rDNA sequence that is at least 85%, at least 90%, at least 95%, at least 96%, at least 97%, at least 98%, at least 99%, or 100% identical to a 16S rDNA sequence set forth in SEQ ID NOs: 1, 4, 5, 7, 8, 9, 11, 14, 15, 25, 26, 27, 28, 29, 30, 31, 32, 33, 35, 36, 40, 41, 61, 62, 68, 69, 70, 71, 72, 76, 78, 117, 118, 121, 122, 124, 127, 128, 130, 131, 137, 144, 147, 149, 150, 151, 152, 154, 155, 159, 160, 162, 163, 165, 166, 167, 171, 174, 177, 181, 183, 186, 1405, 1406, 1407, 1408, 1409, 1410, 1411, 1412, 1413, 1414, 1415, 1416, 1608, 1609, 1610, 1611, 1612, 1613, 1614, 1615, 1622, 1623, 1624, 1625, 1626, 1627, 1628, 1629, 1630, 1631, 1632, 1633, 1634, 1635, 1636, 1637, 1638, 1639, 1640, 1641, 1642, 1643, 1644, 1645, 1646, 1647, 1648, 1733, 1734, 1735, 1736, 1737, 1738, 1739, 1740, 1741, 1742, 1743, 1744, 1745, 1746, 1747, 1748, and 1749.

85. The method of claim 84, wherein the cancer is a metastatic melanoma.

86. The method of any of claims 73-85, wherein the therapeutic composition does not comprise Alistipes onderdonkii, Angelakisella massiliensis, Christensenellaceae NG5 sp2, Cuneatibacter caecimuris, Desulfovibrio fairfieldensis, Ruminococcaceae NG13 sp1, Ruminococcaceae NG16 sp1, Bifidobacterium animalis, Faecalibacterium prausnitzii, or bacteria having 16S rDNA having at least 94.5%, 95%, 97%, 98%, 98.7% or 99% sequence identity to any one of the 16S rDNA thereof.

87. The method of claim 86, wherein the cancer is a bladder cancer.

88. The method of any of claims 73-85, wherein the therapeutic composition does not comprise [Coprococcus] catus, [Lactobacillus] fermentum, [Romboutsia] timonensis, [Ruminococcus] bromii, [Ruminococcus] gauvreauii, Actinomyces graevenitzii, Agathobaculum butyriciproducens group, Bacteroides caccae, Bacteroides intestinalis, Bittarella massiliensis, Blautia luti group, Clostridium saudiense, Corynebacterium durum, Fusicatenibacter sp2, Lachnospiraceae NG30 sp3, Massilimaliae sp1, Monoglobus pectinilyticus, Rothia dentocariosa, Rothia mucilaginosa, Ruminococcaceae NG17 sp1, Schaalia odontolytica, Streptococcus australis, Streptococcus gordonii, Streptococcus infantis group, Streptococcus parasanguinis, Streptococcus salivarius group, Allisonella histaminiformans, Bacteroides faecis, Bacteroides massiliensis, Desulfovibrionaceae NG5_sp1, Gemmiger sp2, Intestinimonas massiliensis, Marvinbryantia sp5, Propionibacterium freudenreichii, Slackia isoflavoniconvertens, Thermodesulfobiaceae NG1_sp1, or bacteria having 16S rDNA having at least 94.5%, 95%, 97%, 98%, 98.7% or 99% sequence identity to any one of the 16S rDNA thereof.

89. The method of claim 88, wherein the cancer is a non-small cell lung cancer.

90. The method of any of claims 73-85, wherein the therapeutic composition does not comprise [Atopobium] parvulum, [Ruminococcus] gnavus, Bacteroides dorei group, Blautia sp1, Schaalia sp2, Granulicatella adiacens, Lactococcus lactis, Scardovia wiggsiae, or bacteria having 16S rDNA having at least 94.5%, 95%, 97%, 98%, 98.7% or 99% sequence identity to any one of the 16S rDNA thereof.

91. The method of claim 90, wherein the cancer is a metastatic melanoma.

92. The method of any of claims 73-85, wherein the therapeutic composition does not comprise one or more bacteria having a 16S rDNA sequence that is at least 85%, at least 90%, at least 95%, at least 96%, at least 97%, at least 98%, at least 99%, or 100% identical to a 16S rDNA sequence set forth in SEQ ID NOs: 188, 213, 245, 323, 331, 332, 376, 455, 509, 516, 538, 582, 1156, 1157, 1158, 1159, 1160, 1161, 1162, 1163, 1164, 1165, 1166, 1167, 1168, 1169, 1170, 1171, 1172, 1173, 1174, 1175, 1176, 1177, 1178, 1179, 1180, 1181, 1182, 1183, 1184, 1185, 1186, 1187, 1188, 1189, 1190, 1191, 1192, 1193, 1194, 1195, 1196, 1197, 1198, 1199, 1200, 1201, 1202, 1203, 1204, 1205, 1206, 1207, 1208, 1209, 1210, 1211, 1212, 1213, 1214, 1215, 1216, 1217, 1218, o1321, 1322, 1323, 1324, 1325, 1326, 1327, 1328, 1329, 1330, 1331, 1332, 1333, 1334, 1335, 1336, 1337, 1338, 1339, 1340, 1341, 1342, 1343, 1344, 1345, 1346, 1347, 1348, and 1349.

93. The method of claim 92, wherein the cancer is a bladder cancer.

94. The method of any of claims 73-85, wherein the therapeutic composition does not comprise one or more bacteria having a 16S rDNA sequence that is at least 85%, at least 90%, at least 95%, at least 96%, at least 97%, at least 98%, at least 99%, or 100% identical to a 16S rDNA sequence set forth in SEQ ID NOs: 187, 189, 190, 191, 192, 193, 194, 195, 196, 197, 198, 199, 200, 201, 202, 203, 204, 205, 211, 214, 216, 217, 218, 219, 220, 221, 222, 224, 225, 226, 227, 228, 229, 230, 231, 232, 233, 234, 235, 236, 237, 238, 239, 240, 241, 242, 243, 244, 246, 247, 248, 253, 254, 255, 257, 258, 259, 263, 264, 265, 267, 268, 269, 270, 271, 272, 273, 277, 283, 286, 289, 290, 291, 292, 293, 294, 295, 296, 297, 298, 299, 300, 301, 302, 303, 304, 305, 306, 307, 308, 309, 310, 311, 312, 313, 314, 315, 316, 317, 318, 319, 320, 321, 322, 324, 325, 326, 327, 328, 329, 330, 333, 334, 335, 336, 337, 338, 339, 340, 341, 342, 343, 344, 345, 346, 347, 348, 349, 350, 351, 352, 353, 354, 355, 356, 357, 358, 359, 360, 361, 362, 363, 364, 365, 366, 367, 368, 369, 370, 371, 372, 373, 374, 375, 377, 378, 379, 380, 381, 382, 383, 384, 385, 386, 387, 389, 390, 391, 392, 393, 394, 395, 396, 397, 398, 399, 400, 401, 402, 403, 409, 410, 411, 412, 413, 414, 415, 418, 421, 424, 425, 428, 429, 430, 431, 432, 433, 434, 435, 436, 437, 438, 439, 440, 441, 442, 443, 444, 445, 447, 449, 450, 452, 453, 454, 456, 457, 458, 460, 462, 463, 464, 465, 466, 467, 468, 469, 471, 472, 473, 474, 475, 476, 478, 479, 480, 481, 483, 484, 486, 487, 488, 489, 490, 491, 492, 493, 494, 495, 496, 497, 498, 499, 500, 501, 502, 503, 504, 505, 506, 507, 508, 510, 511, 512, 513, 514, 515, 520, 521, 522, 523, 524, 525, 526, 527, 528, 529, 530, 531, 537, 539, 540, 542, 543, 544, 545, 546, 547, 548, 550, 551, 552, 553, 554, 555, 560, 561, 564, 565, 566, 573, 574, 577, 579, 581, 583, 584, 585, 586, 587, 588, 589, 591, 594, 595, 596, 597, 598, 599, 600, 774, 1113, 1114, 1115, 1116, 1117, 1118, 1119, 1120, 1121, 1122, 1123, 1124, 1125, 1126, 1127, 1130, 1131, 1132, 1133, 1134, 1135, 1356, 1357, 1358, 1359, 1360, 1361, 1362, 1395, 1396, 1397, 1398, 1399, 1400, 1401, 1402, 1616, 1617, 1618, 1619, 1620, 1662, 1663, 1664, 1665, 1666, 1667, 1668, 1669, 1670, 1671, 1672, 1673, 1674, 1675, 1676, 1677, 1678, 1679, 1680, 1681, 1682, 1683, 1684, 1685, 1686, 1687, 1688, 1689, 1690, 1691, 1692, 1693, 1694, 1695, 1755, and 1756.

95. The method of claim 94, wherein the cancer is non-small cell lung cancer.

96. The method of any of claims 73-85, wherein the therapeutic composition does not comprise one or more bacteria having a 16S rDNA sequence that is at least 85%, at least 90%, at least 95%, at least 96%, at least 97%, at least 98%, at least 99%, or 100% identical to a 16S rDNA sequence set forth in SEQ ID NOs: 206, 207, 208, 209, 210, 212, 215, 223, 249, 250, 251, 252, 256, 260, 261, 262, 266, 274, 275, 276, 278, 279, 280, 281, 282, 284, 285, 287, 388, 404, 405, 406, 407, 408, 416, 417, 419, 420, 422, 423, 426, 427, 446, 448, 451, 459, 461, 482, 485, 517, 518, 519, 532, 533, 534, 535, 536, 549, 556, 557, 558, 559, 562, 563, 567, 568, 569, 570, 571, 572, 575, 576, 580, 590, 593, 1363, 1364, 1365, 1366, 1367, 1368, 1506, 1507, 1508, 1509, 1510, 1511, 1512, 1513, 1514, 1515, 1516, 1517, 1518, 1519, 1520, 1521, 1522, 1523, 1524, 1525, 1526, 1527, 1528, 1529, 1530, 1531, 1532, 1533, 1534, 1535, 1536, 1537, 1538, 1539, 1540, 1541, 1542, 1543, 1544, 1545, 1546, 1547, 1548, 1549, 1550, 1551, 1552, 1553, 1554, 1555, 1556, 1557, 1558, 1559, 1560, 1561, 1562, 1563, 1564, 1565, 1566, 1567, 1568, 1569, 1570, 1571, 1572, 1573, 1574, 1575, 1576, 1577, 1578, 1579, 1580, 1581, 1582, 1583, 1584, 1585, 1586, 1587, 1588, 1589, 1590, 1591, 1592, 1593, 1594, 1595, 1596, 1597, 1598, 1599, 1600, 1601, 1602, 1603, 1750, 1751, 1752, 1753, and 1754.

97. The method of claim 96, wherein the cancer is metastatic melanoma.

98. The method of any one of claims 73-97, further comprising administering at least one anticancer agent to the subject.

99. The method of claim 98, wherein the anticancer agent is a checkpoint inhibitor.

100. The method of claim 99, wherein the checkpoint inhibitor is selected from an anti-PD-1 antibody, an anti-CTLA-4 antibody, an anti-PD-L1 antibody or combinations thereof.

101. The method of claim 90, wherein the checkpoint inhibitor is selected from pembrolizumab, nivolumab, atezolizumab, avelumab, durvalumab, ipilimumab, pidilizumab, AMP-224, AMP-514, STI-A1110, TSR-042, RG-7446, BMS-936559, BMS-936558, MK-3475, CT O11, MPDL3280A, MEDI-4736, MSB-0020718C, AUR-012, LAG-3, OX40 inhibitors, OX40L inhibitors, TIGIT inhibitors, STI-A1010 or combinations thereof.

102. The method of claim 98, wherein the anticancer agent comprises a chemotherapy agent.

103. The method of any of claims 98-102, wherein the anticancer agent is a combination of a checkpoint inhibitor and a chemotherapy agent.

104. The method of any of claims 73-103, wherein the purified or isolated population of bacteria is administered at a concentration of at least about 1×10² viable colony forming units.

105. The method of any of claims 73-104, wherein the purified or isolated population of bacteria is administered at a concentration of at a concentration of about 1×10² to 1×10⁹ viable colony forming units.

106. The method of any of claims 73-105, wherein a fraction of the purified or isolated population of bacteria comprises a spore-forming bacteria.

107. The method of any of claims 73-105, wherein a fraction of the purified or isolated population of bacteria is in spore form.

108. The method of any of claims 73-105, wherein a fraction of the purified or isolated population of bacteria is in vegetative form.

109. The method of any of claims 73-108, wherein the composition further comprises a pharmaceutically acceptable excipient.

110. The method of any of claims 73-109, wherein the composition is formulated for delivery to the intestine.

111. The method of any of claims 73-110, wherein the composition is enterically coated.

112. The method of any of claims 73-111, wherein the composition is formulated for oral administration.

113. The method of any of claims 73-112, wherein the composition is formulated into a food or beverage.

114. The method of any of claims 73-113, wherein the mammalian subject is a human.

115. The method of any of claims 73-114, wherein the cancer is selected from a metastatic melanoma, melanoma of the skin, non-small cell lung cancer, a kidney cancer, a bladder cancer, a head and neck cancer, a Merkel cell skin cancer (Merkel cell carcinoma), or a Hodgkin lymphoma.

116. The method of claim 115, wherein the cancer is a metastatic melanoma.

117. The method of claim 115, wherein the cancer is a non-small cell lung cancer.

118. The method of claim 115, wherein the cancer is a bladder cancer.

119. The method of any of claims 73-118, wherein prior to administration of the population of bacteria the subject is subjected to antibiotic treatment and/or a bowel cleanse.

120. The method of any one of claims 73-119, wherein the subject has previously been treated for the cancer.

121. The method of claim 120, wherein the subject has been determined to be a non-responder to the previous treatment.

122. The method of claim 120 or 121, wherein the subject has been determined to have a toxic response to the previous treatment.

123. The method of any one of claims 120-122, wherein the previous treatment comprises immune checkpoint blockade monotherapy or immune checkpoint blockade combination therapy.

124. The method of any one of claims 73-123, wherein the cancer is recurrent cancer.

125. A method of identifying a mammalian subject as a candidate for immune checkpoint therapy in combination with adjuvant microbiome therapy to treat a cancer, the method comprising:
a) obtaining a microbiome sample from the subject,
b) determining the prevalence and/or abundance of the family of bacteria in the microbiome sample, and
c) determining that the subject is a candidate for treatment if the microbiome sample comprises the bacteria of any one of claims 1-72.

126. The method of any of claim 125, wherein the subject is determined to be a candidate for immune checkpoint inhibitor therapy.

127. The method of claim 125 or 126, wherein the immune checkpoint therapy comprises immune checkpoint blockade monotherapy or immune checkpoint blockade combination therapy.

128. The method of any of claims 125-127, wherein the treatment further comprises a chemotherapy.

129. The method of any of claims 125-128, wherein the mammalian subject is a human.

130. The method of any of claims 125-129, wherein the cancer is selected from a metastatic melanoma, a melanoma of the skin, a non-small cell lung cancer, a kidney cancer, a bladder cancer, a head and neck cancer, a Merkel cell skin cancer (Merkel cell carcinoma), or a Hodgkin lymphoma.

131. The method of claim 130, wherein the cancer is a metastatic melanoma.

132. The method of claim 130, wherein the cancer is a non-small cell lung cancer.

133. The method of claim 130, wherein the cancer is a bladder cancer.

134. A method of identifying a mammalian subject as a donor whose feces are useful for fecal matter transfer, the method comprising:
a) obtaining a microbiome sample from the potential donor,
b) determining the prevalence and/or abundance of the species of bacteria in the microbiome sample, and
c) determining that the donor's feces is useful for fecal matter transfer if the microbiome sample comprises the bacteria of any one of claims 1-72.

135. A therapeutic composition derived from fecal matter from a donor identified using the method of claim 134.

136. The therapeutic composition of claim 135, further comprising a pharmaceutically acceptable excipient.

137. The therapeutic composition of claim 135 or 136, wherein the therapeutic composition comprises bacteria that are in vegetative and/or spore form.

138. The therapeutic composition of any one of claims 135-137, wherein the therapeutic composition further comprises a checkpoint inhibitor.

139. The therapeutic composition of claim 138, wherein the checkpoint inhibitor is selected from anti-PD-1 antibody, an anti-CTLA-4 antibody, an anti-PD-L1 antibody or combinations thereof.

140. The therapeutic composition of claim 138, wherein the checkpoint inhibitor is selected from pembrolizumab, nivolumab, atezolizumab, avelumab, durvalumab, ipilimumab, pidilizumab, AMP-224, AMP-514, STI-A1110, TSR-042, RG-7446, BMS-936559, BMS-936558, MK-3475, CT O11, MPDL3280A, MEDI-4736, MSB-0020718C, AUR-012, LAG-3, OX40 inhibitors, OX40L inhibitors, TIGIT inhibitors, STI-A1010 or combinations thereof.

141. A method of treating or preventing or reducing risk of a cancer in a mammalian subject comprising administering to the subject a therapeutic composition of any one of claims 135-140.

142. A method of treating or preventing or reducing risk of a cancer comprising administering at least one anticancer treatment to a subject determined to have a microbiome sample comprising the bacteria of any one of claims 1-72.

143. A method comprising evaluating a microbiome profile in a sample from a subject for the bacteria of any one of claims 1-72.

144. The method of claim 143, wherein the method further comprises comparing the microbiome profile to a control microbiome.

145. The method of claim 144, wherein the control microbiome comprises a microbiome sample from a subject determined to be a responder to an anticancer treatment.

146. The method of claim 145, wherein the comparing comprises comparison of the bacteria from claim 143 to the control microbiome from a subject determined to be a responder to an anticancer treatment.

147. The method of claim 144, wherein the control microbiome comprises a microbiome sample from a subject determined to be a non-responder to an anticancer treatment.

148. The method of claim 147, wherein the comparing comprises comparison of the bacteria from claim 143 to the control microbiome from a subject determined to be a non-responder to an anticancer treatment.
